United States Patent Application Publication US 2021/0260178 A1 - sequence listing, part 20

SEQ ID NO: 32983 - RNA, 1686 nt, Artificial Sequence
  mRNA product Design i-3 (hSL-A100) comprising derived and/or modified sequence from LASV(LASV237-NIG-2010;Clade II)__AIT17638__GPCmut7 (opt5)
aggagaaagcuuaccaugggccagaucauuaccuucuuucaagaggugccccacgucaucgaagagguuaugaacauugugcugaucgcccucagccugcuugcuauucugaaggggaucuacaauguggccacaugcggacucuucggccuggucuccuuucuucugcucugugggagaucuugcagcacgaccuauaaaggaguguacgaacugcagacacuggagcucgacauggcgucccugaacaugaccaugccucuuucuuguacaaagaauaacagccaucacuauaucaugguuggcaaugaaaccgggcuggagcucacacugaccaacacguccauuaucaaucauaaauucugcaaccuuucugaugcucacaagaaagaccuguacgaucaugcccucaugagcauuaucuccaccuuucaccugagcauuccgaauuucaaccaguaugaggccaugucuugugacuuuaauggaggcaagaucuccgugcaguacaaccugagccacacauaugcugucgaugccgcuaaucauugcggcaccauugccaacggggugcuccaaacauucaugcggauggcguggggaggcucuuacaucgcccuggacuccgggaagggaagcugggauuguaucaugaccucuuaccaguaucuuauuauccagaauacgacaugggaagaccacugccaguuuucccgccccagcccuauuggcuaccuggggcuccugucccaaagaacccgggauaucuauauuucucgcagacuucugggaacauucaccuggacccucagcgacuccgagggcaacgaaacacccggcggguacugucugacgcgguggaugcugaucgaggcugagcucaaaugcuuuggaaacaccgccguugcuaaguguaaugaaaaacaugaugaggaguucugcgacaugcugcgccuuuuugauuucaacaagcaggccaucagacggcugaaaaccccugcgcagaugagcauucagcucaucaauaaggccgugaacgcucugauuaaugaccaacuuaucaugaagaaccaucugcgcgacauuaugggcauccccuauugcaauuacucuaaauauuguuaccucaaccacacagucacagggaagaccucccugccuagaugcugucuggugagcaauggaucuuaccucaacgaaacgcacuucagcgaugacaucgaacagcaggccgauaauaugauuacagagcugcuucaaaaagaguauauggaccggcagggcaagaccccgcuggggcucguggaucuguuugucuucuccaccucuuuuuaccugaucagcauuuuccuucaccucaucaaaauucccacacaucgccacaucaccggaaagccuugccccaaaccucauagacugaaccacaugggcauuuguuccugcggccuguauaagcaccccgggguuccggugaaguggaaacggugaggacuaguuauaagacugacuagcccgaugggccucccaacgggcccuccuccccuccuugcaccgagauuaaucaaaggcucuuuucagagccaccaaaaaaaaaaaaaaaaaaaaaaaaaaaaaaaaaaaaaaaaaaaaaaaaaaaaaaaaaaaaaaaaaaaaaaaaaaaaaaaaaaaaaaaaaaaaaaaaaaaaa

SEQ ID NO: 32984 - RNA, 1686 nt, Artificial Sequence
  mRNA product Design i-3 (hSL-A100) comprising derived and/or modified sequence from LASV(LASV253-NIG-2011;Clade II)__AIT17670__GPCmut7 (opt5)
aggagaaagcuuaccaugggccagaucauuaccuucuuucaagaggugccccacgucaucgaagagguuaugaacauugugcugaucgcccucagccugcuugcuauucugaaggggaucuacaauguggccacaugcggacucuucggccuggucuccuuucuucugcucugugggagaucuugcagcacgaccuauaaaggaguguacgaacugcagacacuggagcucgacauggcgucccugaacaugaccaugccucuuucuuguacaaagaauaacagccaucacuauaucaugguuggcaaugaaaccgggcuggagcucacacugaccaacacguccauuaucaaucauaaauucugcaaccuuucugaugcucacaagaaaaaucuguacgaccaugcccucaugagcauuaucuccaccuuucaccugagcauuccgaacuucaaucaguaugaggccaugucuugugauuuuaacggaggcaagaucuccgugcaguacaaucugagccacacauaugcugucgacgccgcuaaccauugcggcaccauugccaauggggugcuccaaacauucaugcggauggcguggggaggcucuuacaucgcccuggauuccgggaagggaagcugggacuguaucaugaccucuuaccaguaucuuauuauccagaacacgacaugggaagaucacugccaguuuucccgccccagcccuauuggcuaccuggggcuccugucccaaagaacccgggacaucuauauuucucgcagacuucugggaacauucaccuggacccucagcgauuccgagggcaacgaaacacccggcggguacugucugacgcgguggaugcugaucgaggcugagcucaaaugcuuuggaaauaccgccguugcuaaguguaacgaaaaacaugacgaggaguucugcgauaugcugcgccuuuuugacuucaauaagcaggccaucagacggcugaaagcgccugcccagaugagcauucagcucaucaacaaggcugugaaugcccugauuaacgaucaacuuaucaugaagaaucaucugcgcgacauuaugggcauccccuauugcaacuacucuaaauauuguuaccucaaucacacagucaccgggagaacaucccugccucggugcugucuggugagcaacggaucuuaccucaaugaaacccacuucagcgacgauaucgaacagcaggcugacaacaugauuacggagcugcuucaaaaggaguauaucgaucgccagggcaaaacaccgcuggggcucguggaccuguuugucuucuccaccucuuuuuaccugauuagcaucuuccuucaccucguuaagauucccacccauagacacaucauuggaaaaccuugccccaagccucaucggcugaaucacaugggcaucuguuccugcggccuguauaaacaccccggggugccggugaaguggaagcgcugaggacuaguuauaagacugacuagcccgaugggccucccaacgggcccuccuccccuccuugcaccgagauuaaucaaaggcucuuuucagagccaccaaaaaaaaaaaaaaaaaaaaaaaaaaaaaaaaaaaaaaaaaaaaaaaaaaaaaaaaaaaaaaaaaaaaaaaaaaaaaaaaaaaaaaaaaaaaaaaaaaaaa

SEQ ID NO: 32985 - RNA, 1686 nt, Artificial Sequence
  mRNA product Design i-3 (hSL-A100) comprising derived and/or modified sequence from LASV(LASV254-NIG-2011;Clade II)__AIT17674__GPCmut7 (opt5)
aggagaaagcuuaccaugggccagaucauuaccuucuuucaagaggugccccacgucaucgaagagguuaugaacauugugcugaucgcccucagccugcuugcuauucugaaggggaucuacaauguggccacaugcggacucuucggccuggucuccuuucuucugcucugugggagaucuugcagcacgaccuauaaaggaguguacgaacugcagacacuggagcucgacaugaccaaccugaauaugacaaugccucuuuccuguaccaagaacaauucucaucacuauaucaugguuggcaacgaaacagggcuggagcucacccugacgaauaccagcauuaucaaccauaaauucugcaaucuuuccgaugcgcacaagaaaaaccuguacaaucaugcucucaugucuauuaucagcacauuucaccuguccauuccgaacuucaaucaguaugaggccaugagcugugacuuuaacggaggcaagaucucugugcaguacaaucugucccacagcuaugccgucgaugcugccaaccauugcggcaccauugcuaacggggugcuccaaacauucaugcggauggccuggggaggcucuuacaucgcgcuggacuccgggaagggaaauugggauuguaucaugaccagcuaccaguaucuuauuauccagaacacgacaugggaagaccacugccaguuuucucgccccuccccuauuggcuaccuggggcuccugagccaaagaacccgggauaucuauauuucccgcagacuucugggaacauucaccuggacccucucugacagcgagggcaaugaaacacccggcggguacugucugacgcgguggaugcugaucgaggccgagcucaaaugcuuuggaaacaccgcuguugccaaguguaaugaaaaacaugaugaggaguucugcgacaugcugcgccuuuuugauuucaacaagcaggcuaucagacggcugaaaaccccugcccaggcgaauauucagcucaucaacaaggccgugaaugcucugauuaacgaccaacuuaucaugaagaaucaucugcgcgauauuaugggcauccccuauugcaacuacuccaaauauuguuaccucaaucacacagucacagggaagaccagccugccuagaugcugucuggugucuaacggauccuaccucaaugaaacgcacuucagcgacgacaucgaacagcaggccgauaacaugauuacagagcugcuucaaaaagaguauauggaccggcagggcaagaccccgcuggggcucguggaucuguuugucuucucuaccagcuuuuaccugaucuccauuuuccuucaccucguuaaaauccccacacaucgccacgugauuggaaagccuugccccaaaccucauagacugaaccacaugggcaucuguucuugcggccuguauaagcaccccggggugccggucaaguggaaacggugaggacuaguuauaagacugacuagcccgaugggccucccaacgggcccuccuccccuccuugcaccgagauuaaucaaaggcucuuuucagagccaccaaaaaaaaaaaaaaaaaaaaaaaaaaaaaaaaaaaaaaaaaaaaaaaaaaaaaaaaaaaaaaaaaaaaaaaaaaaaaaaaaaaaaaaaaaaaaaaaaaaaa

SEQ ID NO: 32986 - RNA, 1686 nt, Artificial Sequence
  mRNA product Design i-3 (hSL-A100) comprising derived and/or modified sequence from LASV(Nig08-A19;Clade III)__ADU56618__GPCmut7 (opt5)
aggagaaagcuuaccaugggccagaucgugaccuucuuucaagaggucccccacguuauugaagaggugaugaacaucgugcugauugcccucagcauccuggcuauucuuaaggggcuguacaauaucgccacaugcggacucaucggccuggucacguuccuucugcucuccgggagaucuuguagcaugaccuauaaaggaguguacgaacugcagacacuggagcucaacaugaauacccugaacaugacaaugccucuuuccugcaccaagaauaacucucaucacuauauuaugguuggcaaugaaacagggcuggagcucacccugacgaacaccagccuucugcaucacaaauuuuguaaucucuccgacgcgcauaagaaaaaccuguacgaucacacacugaugucuaucauuagcaccuuccaccucuccaucccgaauuuuaaccaguaugaggcuaugagcugcgacuucaauggaggcaagauuacagugcaguacaaccugucucauuccuaugccaucgaugccgcuaaucacuguggcaccgucgccaacggggugcuucaaacguuuaugcggauggcuuggggaggcagcuacauugcccuggacucugggcgcggaaagugggauugcaucaugacauccuaccaguaucucaucauucagaacaccacaugggaagaccauugucaguucagcagacccucuccuaucggcuaccuggggcuucugucccaacggacccgcgauauuuauaucagcagacggcuccugggaaccuuuacauggacgcuguccgacucugagggcaaugaaacccccggcggguacugccucacacgcuggaugcugauugaggcggagcuuaaauguuucggaaacaccgccguugcuaagugcaaugaaaaacacgaugaggaauuuugugacaugcugagacucuucgauuuuaacaagcaggccauccggcgccugaaagcuccugcccagaugagcauccagcuuauuaauaaggcggugaacgcccugaucaaugaccaacucauuaugaagaaccaccugagagauaucaugggcauucccuauugcaauuacuccaaauauugcuaccugaaccauacaagcaccgggcggacgucucucccucgcuguugccuggucuccaauggaagcuaccuuaacgagacacacuucucugacgacaucgaacagcaggcugauaauaugaucaccgagaugcugcaaaaggaguaucucgacagacagggcaaaaccccgcuggggcugguggaucuuuucguguuuagcacauccuucuaccucauuucuaucuuucugcaucuggucaagauucccacccaccggcauaucguuggaaaaccuugucccaagccucaccgccucaaccacaugggcauuugcagcuguggccuguauaaacagcccggggugccggugagauggaagcggugaggacuaguuauaagacugacuagcccgaugggccucccaacgggcccuccuccccuccuugcaccgagauuaaucaaaggcucuuuucagagccaccaaaaaaaaaaaaaaaaaaaaaaaaaaaaaaaaaaaaaaaaaaaaaaaaaaaaaaaaaaaaaaaaaaaaaaaaaaaaaaaaaaaaaaaaaaaaaaaaaaaaa

SEQ ID NO: 32987 - RNA, 1689 nt, Artificial Sequence
  mRNA product Design i-3 (hSL-A100) comprising derived and/or modified sequence from LASV(G1180-SLE-2010;Clade IV)__AIT17168__GPCmut7 (opt5)
aggagaaagcuuaccaugggccagaucgugaccuucuuucaagaggucccccacguuauugaagaggugaugaacaucgugcugauugcccucagcauccuggcuguccuuaaggggcuguacaauuucgccacaugcggacucgugggccugcuuacguuucugcuccugugugggagauccugcaccgcgucucgguauaaaggaguuuacgaacugcagacacucgagcugaacauggaaacccuuaauaugacaaugccucugagcuguaccaagaacaauucccaucacuauauuauggugggcaacgagacagggcucgagcugacccuuacgaauaccucuaucaucaaccauaaauucugcaaucugagcgacgcucacaagaaaaaccucuacgaucaugcccugauguccauuaucucuacauuucaccugagcauuccgaauuucaaccaguaugaagccauguccugugacuuuaauggaggcaagaucagcguccaguacaaccucucucacuccuaugcuggcgaugccgcuaaucauugcgggaccguggccaacggaguucugcaaacauucaugcgcauggcguggggcgggagcuacauugcccuugacucuggacacggcuccugggauuguaucaugaccagcuaccaguaucugauuauccagaacacgacaugggaggaccauugccaguuuucuagacccuccccuaucggguaccucggacugcuuagccaacggacccgcgauauuuauaucuccagacggcugcucggcacauucaccuggacccugucugacagcgaaggcaaggauacacccgggggauacugucugacgcgcuggaugcucauugaggcugagcugaaaugcuuuggcaauaccgccguggcuaaguguaacgaaaaacacgacgaggaguucugcgauaugcuuagacuguuugacuucaauaagcaggccauccagcggcucaaagcgccugcccagauguccauucaacugaucaacaaggcugucaaugcccuuaucaacgaucagcugauuaugaagaaucaccuccgcgacaucauggggauucccuauugcaacuacagcaaauauuguuaccugaaucauacaaccacaggaaagaccucucugccuaaaugcugucucguguccaacggcagcuaccugaaugaaacgcacuucucugacgauaucgaacagcaagcugacaacaugauuacagagaugcuucagaaggaguauauggaaagacaggggaaaaccccgcugggacucguggaucuguuugucuucagcaccuccuuuuaccugaucucuaucuuccuucaucucguuaagauucccacacaccggcauaucgugggcaaaagcugcccuaagccccaccgccugaaucacaugggcauuuguuccugcgggcuguauaagcagccuggagugcccgucaaauggaagagaugaggacuaguuauaagacugacuagcccgaugggccucccaacgggcccuccuccccuccuugcaccgagauuaaucaaaggcucuuuucagagccaccaaaaaaaaaaaaaaaaaaaaaaaaaaaaaaaaaaaaaaaaaaaaaaaaaaaaaaaaaaaaaaaaaaaaaaaaaaaaaaaaaaaaaaaaaaaaaaaaaaaaa

SEQ ID NO: 32988 - RNA, 1689 nt, Artificial Sequence
  mRNA product Design i-3 (hSL-A100) comprising derived and/or modified sequence from LASV(G1442-SLE-2011;Clade IV)__AIT17180__GPCmut7 (opt5)
aggagaaagcuuaccaugggccagaucgugaccuucuuucaagaggucccccacguuauugaagaggugaugaacaucgugcugauugcccucagcauccuggcuguccuuaaggggcuguacaauguggccacaugcggacucauuggccugguuacguuccuucugcucugugggagauccugcaccacaacccuguauaaaggaguguacgaacugcagacacucgagcugaacauggaaacccuuaauaugacaaugccucugucuuguaccaagaacaauagccaucacuauauccgggucggcaacgagacggggcucgagcugacccuuacaaauaccuccaucauuaaccauaaauuuugcaaucugucugacgcgcacaagaaaaaccucuacgaucaugcucugaugagcaucauuuccacauuccaccugucuaucccgaauuuuaaccaguaugaagccaugagcugugacuucaauggaggcaagauuuccgugcaguacaaccucagccacucuuaugccggcgaugcugccaaucauugcgggaccguugcuaacggagugcugcaaacguuuaugcgcauggccuggggcggguccuacaucgcgcuugacagcggaagaggcaacugggauuguauuaugacaucuuaccaguaucugaucauccagaauaccacaugggacgaucacugccaguucucccggcccagcccuauuggguaccucggacugcuuucucaacgcaccagagacgucuauaucucccggcgccugcucggcaccuuuacauggacgcugagcgauuccgagggcaaggacacccccgggggauacugucugacaagauggaugcucauugaagccgagcugaaaugcuucggcaacaccgcuguggccaaguguaaugagaaacaugaugaagaguuuugcgacaugcuucggcuguucgauuuuaacaagcaggcuauccagcgccucaaagccccugcgcagaugucuauucaacugaucaauaaggccgugaacgcucuuaucaaugaccagcugauuaugaagaaccaccucagagacaucauggggauucccuauugcaauuacagcaaauauuguuaccugaacaauacagccaccggaaagacgucccugccuaaaugcugucucaucagcaacggcucuuaccugaaugaaacacacuucuccgaugacauugagcaggaagcugauaacaugaucaccgagaugcuucaaaaggaguauauggaacggcaggggaaaaccccgcugggacucgucgaccuguucguuuuuagcacaucuuucuaccugaucagcauuuuucuucaucucgugaagauccccacccaccgccauauugugggcaaauccugcccuaagccccacagacugaaucauaugggcaucuguucuugcgggcuguauaagcagccuggaguccccgugcgguggaaacgcugaggacuaguuauaagacugacuagcccgaugggccucccaacgggcccuccuccccuccuugcaccgagauuaaucaaaggcucuuuucagagccaccaaaaaaaaaaaaaaaaaaaaaaaaaaaaaaaaaaaaaaaaaaaaaaaaaaaaaaaaaaaaaaaaaaaaaaaaaaaaaaaaaaaaaaaaaaaaaaaaaaaaa

SEQ ID NO: 32989 - RNA, 1689 nt, Artificial Sequence
  mRNA product Design i-3 (hSL-A100) comprising derived and/or modified sequence from LASV(G3010-SLE-2013;Clade IV)__AIT17344__GPCmut7 (opt5)
aggagaaagcuuaccaugggccagaucgugaccuucuuucaagaggucccccacguuauugaagaggugaugaacaucgugcugauugcccucagcauccuggcuguccuuaaggggcuguacaauuucgccacaugcggacucgugggccugguuacguuucuucugcucugugggagauccugcaccacaucucuguauaaaggaguguacgaacugcagacccucgagcugaacauggaaacacuuaauaugaccaugccucugagcuguacaaagaacaauucccaucacuauauuauggucggcaacgagaccgggcucgagcugacgcuuaccaauacaucuaucaucaaccauaaauucugcaaucugagcgacgcgcacaagaaaaaccucuacaaucaugcucugauguccauuaucucuaccuuucaccugagcauuccgaacuucaaucaguaugaagccauguccugugauuuuaacggaggcaagaucagcgugcaguacaaucucucucacuccuaugccggcgacgcugccagccauugcgggacaguugcuaacggagugcugcaaaccuucaugcggauggccuggggcgggucuuacauugcgcuugauuccggauacggcaagugggacuguaucaugacgagcuaucaguaccugauuauccagaacacaaccugggaggaucacugccaguuuucucgccccuccccuaucggguaucucggacugcuuagccaaagaacacgggacauuuacaucucccgcagacugcucggcaccuucaccuggacacugucugauagcgaaggcaaagacacgcccgggggauauugucugacccgguggaugcucauugaggccgagcugaagugcuuuggcaauacagcugucgccaaauguaacgaaaagcaugaugaggaguucugcgacaugcuucgccuguuugauuucaauaaacaggcuauccagagacucaagaccccugcccagauguccauucaacugaucaacaaggcggugaaugcccuuaucaacgaccagcugauuaugaaaaaucaccuccgggauaucauggggauucccuacugcaacuauagcaaguacuguuaccugaaucacacaaccacgggaaaaacaucucugccuaagugcugucucguguccaacggcagcuaucugaaugaaacccauuucucugacgacaucgaacagcaagcugauaacaugauuaccgagaugcuucagaaagaguacauggaacgccaggggaagacaccgcugggacucgucgaccuguuuguuuucagcaccuccuuuuaucugaucucuaucuuccuucaccucgugaaaauucccacacauagacacaucgugggcaagagcugcccuaagccccaucggcugaaucacaugggcauuuguuccugcgggcuguacaaacagccuggaguccccgugcgcuggaagagaugaggacuaguuauaagacugacuagcccgaugggccucccaacgggcccuccuccccuccuugcaccgagauuaaucaaaggcucuuuucagagccaccaaaaaaaaaaaaaaaaaaaaaaaaaaaaaaaaaaaaaaaaaaaaaaaaaaaaaaaaaaaaaaaaaaaaaaaaaaaaaaaaaaaaaaaaaaaaaaaaaaaaa

SEQ ID NO: 32990 - RNA, 1689 nt, Artificial Sequence
  mRNA product Design i-3 (hSL-A100) comprising derived and/or modified sequence from LASV(G502-SLE-2009;Clade IV)__AIT17126__GPCmut7 (opt5)
aggagaaagcuuaccaugggccagaucgugaccuucuuucaagaggucccccacguuauugaagaggugaugaacaucgugcugauugcccucagcauccuggcuguccuuaaggggcuguacaauuucgccacaugcggacucgugggccugcuuacguuucugcuccugugugggagauccugcaccacaggacuguauaaaggcguuuacgaacuccagacccuggagcuuaacauggaaacacugaauaugaccaugccucucucuuguacaaagaacaauagccaucacuauauuaugguggggaacgagaccggacuggagcuuacgcugaccaauacauccaucaucaaccauaaauucugcaaucucucugacgcgcacaagaaaaaccuguacgaucaugcucugaugagcauuaucuccaccuuucaccucucuauuccgaauuucaaccaguaugaagccaugagcugugacuuuaauggcggcaagaucuccguccaguacaaccugagccacucuuaugccggggaugcugccgaccauugcggaacaguggcuaauggcguucuucaaaccuucaugcggauggccuggggaggguccuacauugcgcuggauagcggccgcgggagaugggacuguaucaugacgucuuaccaguaucucauuauccagaacacaaccugggaggaucacugccaguuuucccggcccagcccuaucggauaccugggccuucugucucaacgcacaagagacauuuauaucucccggcgccuccugggcaccuucaccuggacacugagcgauuccgaagggaaggacacgcccggaggcuacugucucaccagauggaugcugauugaggccgagcuuaaaugcuuugggaacacagcuguggccaaguguaaugaaaaacaugaugaggaguucugcgacaugcugcggcucuuugauuucaacaagcaggcuauccagcgccugaaagccccugcgcagaugucuauucaacuuaucaauaaggccgucaacgcucugaucaaugaccagcucgugaugaagaaccaccugagagacauuaugggaauccccuauugcaauuacagccgguauuguuaccugaaccacaccacaaccggccgcacgucccucccuaaaugcugucuggugagcaaugggucuuaccuuaacgaaacacauuucuccgaugacauugaacagcaagccgauaauaugaucaccgagaugcugcagaaggaguauauggaaagacagggaaaaaccccgcucggccuggucgaccuguuuguuuucagcacaucuuuuuaccuuauuagcaucuuccuccaccuggugaagauccccacccaucggcacauugugggcaaauccugcccuaagccccaucgccugaaccacauggggaucuguucuugcggacucuauaaacagccuggcguccccgugaaguggaagagaugaggacuaguuauaagacugacuagcccgaugggccucccaacgggcccuccuccccuccuugcaccgagauuaaucaaaggcucuuuucagagccaccaaaaaaaaaaaaaaaaaaaaaaaaaaaaaaaaaaaaaaaaaaaaaaaaaaaaaaaaaaaaaaaaaaaaaaaaaaaaaaaaaaaaaaaaaaaaaaaaaaaaa

SEQ ID NO: 32991 - RNA, 1689 nt, Artificial Sequence
  mRNA product Design i-3 (hSL-A100) comprising derived and/or modified sequence from LASV(G733-SLE-2010;Clade IV)__AIT17154__GPCmut7 (opt5)
aggagaaagcuuaccaugggccagaucgugaccuucuuucaagaggucccccacguuauugaagaggugaugaacaucgugcugauugcccucagcauccuggcuguccuuaaggggcuguacaauuucgccacaugcggaauugugggccucguuuccuuucugcuucugugugggagaucuugcacgaccagccucuauaaaggaguguacgaacugcagacacuggagcucaacauggaaacccugaauaugacaaugccucuuuccuguaccaagaacaauucucaucacuauaucauggucggcaacgagacagggcuggagcucacccugacgaauaccagcaucauuaaccauaaauucugcaaucuuuccgacgcgcacaagaaaaaccuguacgaucaugcucucaugucuaucauuagcacauuucaccuguccaucccgaauuucaaccaguaugaagccaugagcugugacuuuaauggaggcaagauuucugugcaguacaaccugucccacagcuaugccggcgaugcugccaaucauugcgggaccaucgcuaacggaguucuccaaacauucaugcggauggccuggggcgggucuuacauugcgcuggacuccggacgcgauagaugggacuguaucaugaccagcuaccaguaucuuaucauucagaacacgacaugggaggaucacugccaguuuucucggcccuccccuaucggcuaccuggggcuccugagccaacgcaccagagacauuuauaucucccggcgccuucugggaacauucaccuggacccucucugauagcgaaggcaaggacacacccggcggguacugucugacgagauggaugcugauugaggccgagcucaaaugcuuuggaaauaccgcuguggccaaguguaacgaaaaacaugaugaggaguucugcgacaugcugcggcuuuuugauuucaauaagcaggcuauccagcgccugaaagccccugcgcagauguccauccaacucauuaacaaggccgucaaugcucugaucaacgaccagcuuauuaugaagaaucaccugagagacaucaugggcauucccuauugcaacuacagcaaauauuguuaccucaaucacacaaccacagggaagaccucucugccuaaaugcugucugguguccaacggaagcuaccucaaugaaacgcauuucucugaugacaucgaacagcaagccgauaacaugaucacagagaugcugcagaaggaguauauggaacggcagggcaaaaccccgcuugggcugguggaccucuuugucuucagcaccuccuuuuaccugauuucuaucuuccugcaccuuguuaagauucccacacaucgccacguggugggaaaaagcugcccuaagccccauagacucaaucacaugggcaucuguuccugcggccuguaugggcagccuggaguccccgugaaguggaaacggugaggacuaguuauaagacugacuagcccgaugggccucccaacgggcccuccuccccuccuugcaccgagauuaaucaaaggcucuuuucagagccaccaaaaaaaaaaaaaaaaaaaaaaaaaaaaaaaaaaaaaaaaaaaaaaaaaaaaaaaaaaaaaaaaaaaaaaaaaaaaaaaaaaaaaaaaaaaaaaaaaaaaa

SEQ ID NO: 32992 - RNA, 1689 nt, Artificial Sequence
  mRNA product Design i-3 (hSL-A100) comprising derived and/or modified sequence from MOPV/LASV reassortant(IGS-1;Clade IV)__AFY05576__GPCmut7 (opt5)
aggagaaagcuuaccaugggccagaucgugaccuucuuucaagaggucccccacguuauugaagaggugaugaacaucgugcugauugcccucagcguccuggcugugcuuaaggggcuguacaauuucgccacaugcggacucguuggccuggugacguuucuucugcucugugggagauccugcaccacaucucuguauaaaggagucuacgaacugcagacccucgagcugaacauggaaacacuuaauaugaccaugccucugagcuguacaaagaacaauucccaucacuauaucauggugggcaacgagaccgggcucgagcugacgcuuaccaauacaucuauuaucaaccauaaauucugcaaucugagcgacgcgcacaagaaaaaccucuacgaucaugcucugauguccaucauuucuaccuuucaccugagcaucccgaauuucaaccaguaugaagccauguccugugacuuuaauggaggcaagauuagcguucaguacaaccucucucacuccuaugccggcgaugcugccaaucauugcgggacaguggcuaacggaguccugcaaaccuucaugcggauggccuggggcgggagcuacaucgcgcuugacucuggacgcggcaacugggauuguauuaugacguccuaccaguaucugaucauucagaauacaaccugggaggaccacugccaguuuagcagacccucuccuaucggguaccucggacugcuuucccaacggacacgcgauaucuauauuagcagacggcugcucggcaccuucaccuggacacuguccgacucugaaggcgaggauacgcccgggggauacugucugacccgcuggaugcucaucgaggccgaacugaagugcuuuggcaacacagcuguggccaaauguaaugagaagcaugacgaagaguucugcgauaugcuuagacuguuugacuucaacaaacaggcuauucagcggcucaaggccccugcgcagaugagcauccaacugauuaauaaagccgugaacgcucuuaucaaugaucagcugaucaugaagaaccaccuccgcgacauuauggggauccccuauugcaauuacuccaaguauuguuaccugaaccacaccacaaccggaagaacgagccugccuaaaugcugucucgucucuaauggcuccuaccugaacgaaacacauuucagcgacgauauugagcagcaagccgacaauaugaucaccgagaugcuucagaaggaauauauggagcggcaggggaaaaccccgcugggacucguugaucuguuuguguucucuaccagcuuuuaccugauuuccaucuuccuucaccucgugaagauccccacacaucgccacauugucggcaaaucuugcccuaagccccauagacugaaccacaugggcaucuguagcugcgggcuguauaaacagccuggagugcccguuaaguggaagcggugaggacuaguuauaagacugacuagcccgaugggccucccaacgggcccuccuccccuccuugcaccgagauuaaucaaaggcucuuuucagagccaccaaaaaaaaaaaaaaaaaaaaaaaaaaaaaaaaaaaaaaaaaaaaaaaaaaaaaaaaaaaaaaaaaaaaaaaaaaaaaaaaaaaaaaaaaaaaaaaaaaaaa

SEQ ID NO: 32993 - RNA, 1689 nt, Artificial Sequence
  mRNA product Design i-3 (hSL-A100) comprising derived and/or modified sequence from LASV(LM765-SLE-2012;Clade IV)__AIT17814__GPCmut7 (opt5)
aggagaaagcuuaccaugggccagaucgugaccuucuuucaagaggucccccacguuauugaagaggugaugaacaucgugcugauugcccucagcauccuggcuguccuuaaggggcuguacaauuucgccacaugcggacucgugggccugguuacguuucuucugcucugugggagauccugcaccacaucucuguauaaaggaguguacgaacugcagacccucgagcugaacauggaaacacuuaauaugaccaugccucugagcuguacaaagaacaauucccaucacuauauuauggucggcaacgagaccgggcucgagcugacgcuuaccaauacaucuaucaucgaccauaaauucugcaaccugagcgaugcgcaccggaagaaucucuacgaccaugcucugauguccauuaucucuaccuuucaccugagcauuccgaacuucaaucaguaugaagccauguccugugauuuuaacggaggcaaaaucagcgugcaguacaaucucucucacuccuaugccaaggacgcugccgaucauugcggcacaguugcuaacggggugcugcaaaccuucaugcgcauggccuggggaggcagcuacauugcgcuugacucugggagaggacggugggauuguaucaugacguccuaccaguaucugauuauccagaauacaaccugggaggaccacugccaguuuagccgccccucuccuaucggcuaccucgggcugcuuucccaaagaacacgggauauuuauaucagccgcagacugcucggaaccuucaccuggacacuguccgacucugaaggcaaggauacgcccggcggguacugucugacccgguggaugcucauugaggccgagcugaaaugcuuuggaaacacagcugucgccaaguguaacgaaaaacaugacgaggaguucugcgauaugcuucgccuguuugacuucaauaagcaggcuauccagagacucaaagccccugcgcagaugagcauucaacugaucaacaaggccgugaaugcucuuaucaacgaccagcugauuaugaagaaucaccuccgggauaucaugggcauucccuauugcaacuacuccaaauauuguuaccugaaucacaccacaaccgggaagacgagccugccuaaaugcugucucgugucuaacggauccuaccugaaugaaacacauuucagcgacgauaucgaacagcaagccgacaacaugauuaccgagaugcuucagaaggaguauauggaacgccagggcaaaaccccgcuggggcucgucgaucuguuuguuuucucuaccagcuuuuaccugaucuccaucuuccuucaccucgugaagauucccacacauagacacaucgugggaaaaccuugccccaagccucaucggcugaaucacaugggcauuuguucuugcggccuguauaagcagcccggggucccggugaaauggaagcgcugaggacuaguuauaagacugacuagcccgaugggccucccaacgggcccuccuccccuccuugcaccgagauuaaucaaaggcucuuuucagagccaccaaaaaaaaaaaaaaaaaaaaaaaaaaaaaaaaaaaaaaaaaaaaaaaaaaaaaaaaaaaaaaaaaaaaaaaaaaaaaaaaaaaaaaaaaaaaaaaaaaaaa

SEQ ID NO: 32994 - RNA, 1689 nt, Artificial Sequence
  mRNA product Design i-3 (hSL-A100) comprising derived and/or modified sequence from LASV(LM776-SLE-2012;Clade IV)__AIT17824__GPCmut7 (opt5)
aggagaaagcuuaccaugggccagaucgugaccuucuuucaagaggucccccacguuauugaagaggugaugaacaucgugcugauugcccucagcauccuggcuguccuuaaggggcuguacaauuucgccacaugcggacucgugggccugguuacguuucuucugcucugugggagauccugcaccacaucuguguauaaaggagucuacgaacugcagacccuggagcucaacauggaaacacugaauaugaccaugccucuuagcuguacaaagaacaauucccaucacuauauuauggugggcaacgagaccgggcuggagcucacgcugaccaauacaucuaucaucaaccauaaauucugcaaucuuagcgacgcgcacaagaaaaaccuguacgaucaugcucucauguccauuaucucuaccuuucaccugagcauuccgaauuucaaccaguaugaagccauguccugugacuuuaauggaggcaagaucagcguucaguacaaccugucucacuccuaugccggcgaugcugccaaucauugcgggacaguggcuaacggaguccuccaaaccuucaugcggauggccuggggcgggagcuacauugcgcuggacucuggacacggcaagugggauuguaucaugacguccuaccaguaucuuauuauccagaacacaaccugggaggaccauugccaguuuagccgccccucuccuaucggguaccugggacuccugucccaaagaacacgggauauuuauaucagccgcagacuucugggcaccuucaccuggacacucuccgacucugaaggcaaagauacgcccgggggauacugucugacccgguggaugcugauugaggccgagcucaagugcuuuggcaauacagcuguggccaaauguaacgaaaagcacgacgaggaguucugcgauaugcugcgccuuuuugacuucaauaaacaggcuauccagagacugaaggccccugcgcagaugagcauucaacucaucaacaaggccgugaaugcucugaucaacgaucagcuuauuaugaaaaaucaucugcgggacaucauggggauucccuauugcaacuacuccaaguauuguuaccucaaucacaccacaaccggaaaaacgagccugccuaagugcugucuggucucuaacggcuccuaccucaaugaaacacacuucagcgacgauaucgaacagcaagccgacaacaugauuaccgagaugcugcagaaagaguauauggaacgccaggggaagaccccgcuuggacugguugaucucuuuguguucucuaccagcuuuuaccugaucuccaucuuccugcaucuugugaaaauucccacacacagacauaucgucggcaagucuugcccuaagccccaccggcucaaucacaugggcauuuguagcugcgggcuguauaaacagccuggagugcccguucgcuggaagagaugaggacuaguuauaagacugacuagcccgaugggccucccaacgggcccuccuccccuccuugcaccgagauuaaucaaaggcucuuuucagagccaccaaaaaaaaaaaaaaaaaaaaaaaaaaaaaaaaaaaaaaaaaaaaaaaaaaaaaaaaaaaaaaaaaaaaaaaaaaaaaaaaaaaaaaaaaaaaaaaaaaaaa

SEQ ID NO: 32995 - RNA, 1689 nt, Artificial Sequence
  mRNA product Design i-3 (hSL-A100) comprising derived and/or modified sequence from LASV(Mad39;Clade IV)__ANH09722__GPCmut7 (opt5)
aggagaaagcuuaccaugggccagaucgugaccuucuuucaagaggucccccacguuauugaagaggugaugaacaucgugcugauugcccucagcauccuggcuguccuuaaggggcuguacaauguggccacaugcggacucauuggccugguuacguuccuucugcucugugggagauccugcaccacaacccuguauaaaggaguguacgaacugcaggcgcucgagcugaacauggaaacacuuaauaugaccaugccucugucuuguacaaagaacaauagccaucacuauauccgggucggcaacgagaccgggcucgagcugacgcuuaccaauacaucccugaucaaccauaaauuuugcaaucucucugacgcucacaagaaaaaccuguacgaucaugcccugaugagcauuaucuccaccuuccaccucucuauuccgaauuuuaaccaguaugaagccaugagcugugacuucaaugauggaaagaucuccgugcaguacaaccugagccacacauaugcuggcgacaccgccaaucauugcggcacgguugcuaacggggugcuucaaacauuuaugcgcauggccuggggaggcucuuacauugcgcuggauuccgggagaggaggcugggacuguaucaugaccagcuaccaguaucucauuauccagaacacaaccugggaggaucacugccaguucucucggcccuccccuaucggguaccugggacuucugagccaacgcaccagagacauuuauaucucucggcgccuccugggcacauuuacguggacccuguccgauagcgaaggcaaggacacacccgggggauacugucucaccagauggaugcugauugaggccgagcuuaaaugcuucggcaauacagcugucgccaaguguaacgaaaaacaugaugaggaauuuugcgacaugcugcgccucuucgauuuuaauaagcaggcuauccagcggcugaaagccccugcgcagauguccauucaacuuaucaacaaggccgugaaugcucugaucaacgaccagcucauuaugaagaaucaccugagagacaucauggggauucccuauugcaacuacucuaaauauuguuaccugaaucacaccgugacgggaaagacaagccucccuaaaugcugucuggucuccaacggcagcuaccuuaaugagacccauuucucugaugacaucgaacagcaagccgauaacaugauuaccgagaugcugcagaaggaguauauggaacggcaggggaaaacaccgcucggacugguugaccuguucguguuuuccaccagcuucuaccuuaucucuaucuuucuccaccuggugaagauucccacacaucgccacgucgugggcaaaccuugccccaagccucauagacugaaucacaugggcaucuguagcugcggguucuauaagcagcccggaguuccggugcgguggaaacgcugaggacuaguuauaagacugacuagcccgaugggccucccaacgggcccuccuccccuccuugcaccgagauuaaucaaaggcucuuuucagagccaccaaaaaaaaaaaaaaaaaaaaaaaaaaaaaaaaaaaaaaaaaaaaaaaaaaaaaaaaaaaaaaaaaaaaaaaaaaaaaaaaaaaaaaaaaaaaaaaaaaaaa

SEQ ID NO: 32996 - RNA, 1689 nt, Artificial Sequence
  mRNA product Design i-3 (hSL-A100) comprising derived and/or modified sequence from LASV(Z0947-SLE-2011;Clade IV)__AIT17840__GPCmut7 (opt5)
aggagaaagcuuaccaugggccagaucgugaccuucuuucaagaggucccccacguuauugaagaggugaugaacaucgugcugauugcccucagcauccuggcuguccuuaaggggcuguacaauuucgccacaugcggacucgugggccugguuacguuucuucugcucugugggagauccugcaccauuucucuguauaaaggaguguacgaacugcagacacucgagcugaacauggaaacccuuaauaugacaaugccucugagcuguaccaagaacaauucccaucacuauaucauggucggcaacgagacagggcucgagcugacccuuacgaauaccucuaucauuaaccauaaauucugcaaucugagcgacgcgcacaagaaaaaccucuacgaucaugcucugauguccaucauuucuacauuucaccugagcaucccgaauuucaaccaguaugaagccauguccugugacuuuaauggaggcaagauuagcgugcaguacaaccucucucacuccuaugccggcgaugcugccaaucauugcgggaccguugcuaacggagugcugcaaacauucaugcggauggccuggggcgggagcuacaucgcgcuugacucuggacgcgauagaugggacuguauuaugaccuccuaccaguaucugaucauccagaacacgacaugggaggaucacugccaguuuagccggcccucuccuauuggcuaccucgggcugcuuucccaacgcaccagagacaucuauauuagccggcgccugcucggaacauucaccuggacccuguccgauucugaaggcaaggacacacccggcggguacugucugacgagauggaugcucaucgaggccgagcugaaaugcuuuggaaauaccgcugucgccaaguguaacgaaaaacaugaugaggaguucugcgacaugcuucggcuguuugauuucaauaagcaggcuauucagcgccucaaagccccugcgcagaugagcauccaacugaucaacaaggccgugaaugcucuuauuaacgaccagcugaucaugaagaaucaccucagagacauuaugggcauccccuauugcaacuacuccaaauauuguuaccugaaucacacaaccacagggaagaccagccugccuaaaugcugucucgugucuaacggauccuaccugaaugaaacgcauuucagcgaugacauugaacagcaagccgauaacaugaucacagagaugcuucagaaggaguauauggaacggcagggcaaaaccccgcuggggcucgucgaccuguuuguuuucucuaccagcuuuuaccugaucuccauuuuccuucaccucgugaagauccccacacaucgccacauugugggaaaaccuugccccaagccucauagacugaaucacaugggcaucuguucuugcggccuguauaagcagcccggggucccggugaaauggaagcggugaggacuaguuauaagacugacuagcccgaugggccucccaacgggcccuccuccccuccuugcaccgagauuaaucaaaggcucuuuucagagccaccaaaaaaaaaaaaaaaaaaaaaaaaaaaaaaaaaaaaaaaaaaaaaaaaaaaaaaaaaaaaaaaaaaaaaaaaaaaaaaaaaaaaaaaaaaaaaaaaaaaaa

SEQ ID NO: 32997 - RNA, 1665 nt, Artificial Sequence
  mRNA product Design i-3 (A100) comprising derived and/or modified sequence from LASV(Josiah;Clade IV)__NP_694870__GPCmut7 (opt1)
aggagaaagcuuaccaugggccagaucgugaccuucuuccaggaggucccccacgugaucgaggaggugaugaacaucguccugaucgcccucagcgugcuggccgugcugaaggggcucuacaacuucgcgaccugcggccuggucgggcuggugacguuccuccugcugugcggccgcuccugcaccaccagccucuacaaggggguguacgagcugcagacccuggagcucaacauggagacgcugaacaugaccaugccgcuguccugcaccaagaacaacagccaccacuacaucauggucggcaacgagaccggccucgagcugacgcugaccaacaccuccaucaucaaccacaaguucugcaaccucagcgacgcccacaagaagaaccuguacgaccacgcccugauguccaucaucagcaccuuccaccucuccauccccaacuucaaccaguacgaggccaugagcugcgacuucaacgggggcaagaucuccgugcaguacaaccugagccacuccuacgccggggacgcggccaaccacugcggcacgguggccaacgggguccugcagaccuucaugcggauggccuggggcggcagcuacaucgcgcucgacuccgggcgcggcaacugggacugcaucaugaccagcuaccaguaccugaucauccagaacaccacgugggaggaccacugccaguucucccggcccagccccaucggguaccugggccuccugucccagcgcacccgggacaucuacaucagccgccggcugcucggcaccuucaccuggacgcugagcgacuccgaggggaaggacaccccgggcggguacugccugacccgcuggaugcucaucgaggccgagcugaagugcuucggcaacaccgccguggccaagugcaacgagaagcacgacgaggaguucugcgacaugcugcggcuguucgacuucaacaagcaggccauccagcgccugaaggcgcccgcccagaugagcauccagcugaucaacaaggccgugaacgcccucaucaacgaccagcugaucaugaagaaccaccuccgggacaucauggggauccccuacugcaacuacuccaaguacugcuaccucaaccacacgaccaccggccgcaccagccugcccaagugcugccuggucuccaacggcagcuaccucaacgagacgcacuucuccgacgacaucgagcagcaggccgacaacaugaucaccgagaugcugcagaaggaguacauggagcggcaggggaagacgccccugggccucguggaccuguucguguucagcaccuccuucuaccugaucagcaucuuccugcaccucgucaagaucccgacccaccgccacaucguggggaaguccugccccaagccccaccggcugaaccacaugggcaucugcagcugcgggcuguacaagcagcccggcgugccggucaaguggaagcgcugaggacuaguuauaagacugacuagcccgaugggccucccaacgggcccuccuccccuccuugcaccgagauuaauaaaaaaaaaaaaaaaaaaaaaaaaaaaaaaaaaaaaaaaaaaaaaaaaaaaaaaaaaaaaaaaaaaaaaaaaaaaaaaaaaaaaaaaaaaaaaaaaaaaa

SEQ ID NO: 32998 - RNA, 1662 nt, Artificial Sequence
  mRNA product Design i-3 (A100) comprising derived and/or modified sequence from LASV(LP;Clade I)__AAF86701__GPCmut7 (opt1)
aggagaaagcuuaccaugggccagaucaucaccuucuuccaggaggugccccacgucaucgaggaggugaugaacaucgugcugaucgcccucagccugcuggccauccucaaggggcuguacaacaucgcgaccugcggcaucaucgggcuggucgccuuccucuuccugugcggcaaguccugcagccugacgcucaagggcggguacgagcugcagacccuggagcucaacauggagacccugaacaugaccaugccgcuguccugcacgaagaacagcucccaccacuacauccgcgugggcaacgagaccgggcucgagcugacccugaccaacacgagcaucaucaaccacaaguucugcaaccucuccgacgcccacaagaagaaccuguacgaccacgcccugaugagcaucaucuccaccuuccaccucagcauccccaacuucaaccaguacgaggccauguccugcgacuucaacggcgggaagaucagcgugcaguacaaccugucccacagcuacgcgggcgacgccgccgagcacugcgggaccgucgccaacggcgugcugcagaccuucaugcggauggcguggggcgggcgcuacaucgcccucgacuccggcaaggggaacugggacugcaucaugacgagcuaccaguaccugaucauccagaacaccaccugggaggaccacugccaguucucccggcccagccccaucggcuaccugggccuccugucccagcgcacccgggacaucuacaucagccgccggcugcucgggacguucaccuggacccugagcgacuccgagggcaacgagacccccgggggcuacugccugacgcgcuggaugcucaucgaggccgagcugaagugcuucgggaacaccgccguggccaagugcaacgagaagcacgacgaggaguucugcgacaugcugcggcuguucgacuucaacaagcaggcgauccgccggcugaaggcccccgcccagaugagcauccagcugaucaacaaggccgucaacgcccucaucaacgaccagcugaucaugaagaaccaccuccgcgacaucaugggcauccccuacugcaacuacuccaaguacugcuaccucaaccacaccagcuccggccggaccagccugcccaagugcugccugaucuccaacgggagcuaccucaacgagacgcaguucuccgacgacaucgagcagcaggcggacaacaugaucaccgagaugcugcagaaggaguacaucgagcgccagggcaagaccccgcuggggcucguggacaucuucaucuucagcaccuccuucuaccugaucagcaucuuccugcaccugaucaagaucccgacgcaccggcacaucgugggcaagcccugccccaagccccaccgccucaaccacaugggggucugcuccugcggccuguacaagcacccgggcgugcccaccaaguggaagcggugaggacuaguuauaagacugacuagcccgaugggccucccaacgggcccuccuccccuccuugcaccgagauuaauaaaaaaaaaaaaaaaaaaaaaaaaaaaaaaaaaaaaaaaaaaaaaaaaaaaaaaaaaaaaaaaaaaaaaaaaaaaaaaaaaaaaaaaaaaaaaaaaaaaa

SEQ ID NO: 32999 - RNA, 1662 nt, Artificial Sequence
  mRNA product Design i-3 (A100) comprising derived and/or modified sequence from LASV(803213;Clade II)__AAF86703__GPCmut7 (opt1)
aggagaaagcuuaccaugggccagaucaucaccuucuuccaggaggugccccacgucaucgaggaggugaugaacaucgugcugaucgcccucagccugcuggccauccucaaggggaucuacaacgucgcgaccugcggccuguucgggcugaucuccuuccuccugcugugcggccgcagcugcuccgugacguacaaggggguguacgagcuccagacccuggagcugaacauggccaaccucaacaugaccaugccgcugagcugcaccaagaacaacucccaccacuacaucauggucggcaacgagacgggccuggagcucacccugaccaacaccagcaucaucaaccacaaguucugcaaccuguccgacgcccacaagaagaaccucuacgaccacgcccugaugagcaucaucuccacguuccaccugagcauccccaacuucaaccaguacgaggccauguccugcgacuucaacgggggcaagaucagcgugcaguacaaccucucccacagcuucgcgguggacgccgccaaccacugcgggaccaucgccaacggcguccugcagaccuucaugcggauggcguggggcggguccuacaucgcccuggacagcggcaaggggaacugggacugcaucaugaccuccuaccaguaccucaucauccagaacacgaccugggaggaccacugccaguucagccgccccucccccaucggcuaccuggggcugcucagccagcggacccgcgacaucuacaucagccggcgccugcugggcaccuucacguggacccucuccgacagcgagggcaacgaggcccccgggggcuacugccugacccgguggaugcugaucgaggccgagcucaagugcuucgggaacaccgccguggcgaagugcaacgagaagcacgacgaggaguucugcgacaugcugcgccuguucgacuucaacaagcaggccaucaagcggcucaagacgcccgcccagauguccauccagcugaucaacaaggccgugaacgcccugaucaacgaccagcucaucaugaagaaccaccuccgcgacaucaugggcauccccuacugcaacuacagccgguacugcuaccugaaccacaccgucaccgggaagaccucccugccccgcugcugccuggugagcaacggcuccuaccugaacgagacgcacuucagcgacgacaucgagcagcaggcggacaacaugaucaccgagaugcuccagaaggaguacauggaccggcagggcaagaccccgcuggggcugguggaccucuucgucuucuccaccagcuucuaccugaucuccaucuuccugcaccuggugaagaucccgacgcaccgccacaucgugggcaagcccugccccaagccccaccggcucaaccacauggggaucugcagcugcggccuguacaagcacccggggguccccgugaaguggaagcgcugaggacuaguuauaagacugacuagcccgaugggccucccaacgggcccuccuccccuccuugcaccgagauuaauaaaaaaaaaaaaaaaaaaaaaaaaaaaaaaaaaaaaaaaaaaaaaaaaaaaaaaaaaaaaaaaaaaaaaaaaaaaaaaaaaaaaaaaaaaaaaaaaaaaa

SEQ ID NO: 33000 - RNA, 1662 nt, Artificial Sequence
  mRNA product Design i-3 (A100) comprising derived and/or modified sequence from LASV(GA391;Clade III)__CAA36645__GPCmut7 (opt1)
aggagaaagcuuaccaugggccagaucgugaccuucuuccaggaggucccccacgugaucgaggaggugaugaacaucguccugaucgcccucagcauccuggccauccugaaggggcucuacaacguggcgaccugcggccugaucgggcuggugacguuccuccugcuguccggccgcagcugcucccucaucuacaaggggaccuacgagcugcagacccuggagcucaacauggagacccugaacaugacgaugccgcugagcugcaccaagaacaacucccaccacuacauccgggucggcaacgagaccggccucgagcugacccugacgaacaccagcauccucaaccacaaguucugcaaccuguccgacgcccacaagcgcaaccuguacgaccacagccucauguccaucaucagcaccuuccaccuguccauccccaacuucaaccaguacgaggccaugagcugcgacuucaacgggggcaagaucaccgugcaguacaaccugucccacagcuucgccguggacgccgcggggcacugcggcacgcucgccaacgggguccugcagaccuucaugcggauggccuggggcggcuccuacaucgcccuggacagcgggcgcggcaacugggacugcaucaugaccuccuaccaguaccucaucauccagaacaccacgugggacgaccacugccaguucagccggcccucccccaucggguaccugggccugcucagccagcgcacccgggacaucuacaucagccgccggcugcugggcaccuucaccuggacgcucuccgacagcgaggggaacgagaccccgggcggguacugccugacccgcuggaugcugaucgaggcggagcucaagugcuucggcaacaccgccguggccaagugcaacgagaagcacgacgaggaguucugcgacaugcugcggcuguucgacuucaacaagcaggccauccgccggcucaagacgcccgcccagauguccauccagcugaucaacaaggcggugaacgcccugaucaacgaccagcucaucaugaagaaccaccuccgcgacaucauggggauccccuacugcaacuacagccgguacugcuaccugaaccacaccuccaccggcaagaccagccugccccgcugcugccugaucuccaacggcagcuaccugaacgagacgaaguucuccgacgacaucgagcagcaggccgacaacaugaucaccgagaugcuccagaaggaguacaucgaccggcaggggaagacgccccugggccuggucgaccuguucguguucagcaccuccuucuaccucaucagcaucuuccugcaccuggugaagaucccgacccaccgccacaucgucgggaagcccugccccaagccccaccggcucaaccacaugggcaucugcuccugcgggcuguacaagcagccgggcgugcccgugcgcuggaagcggugaggacuaguuauaagacugacuagcccgaugggccucccaacgggcccuccuccccuccuugcaccgagauuaauaaaaaaaaaaaaaaaaaaaaaaaaaaaaaaaaaaaaaaaaaaaaaaaaaaaaaaaaaaaaaaaaaaaaaaaaaaaaaaaaaaaaaaaaaaaaaaaaaaaa

SEQ ID NO: 33001 - RNA, 1665 nt, Artificial Sequence
  mRNA product Design i-3 (A100) comprising derived and/or modified sequence from LASV(AV;Clade V)__CCA30314__GPCmut7 (opt1)
aggagaaagcuuaccaugggccagaucgugaccuucuuccaggaggucccccacgugaucgaggaggugaugaacaucguccugaucgcccucagcauccuggccgugcugaaggggcucuacaacaucgcgaccugcggccugaucgggcugaucacguuccuccugcugugcggccgcuccugcagcuccaaccucuacaaggggguguacgagcugcagagccuggaccucaacauggagacccugaacaugaccaugccgcuguccugcaccaagaacaacagccaccacuacauccgggucggcaacgacacgggccucgagcugacccugaccaacaccuccauccucaaccacaaguucugcaaccugagcgacgcccacaagaaggaccuguacgaccacgcccucauguccaucaucagcacguuccaccuguccauccccaacuucaaccaguacgaggccaugagcugcgacuucaacgggggcaagaucuccgugcaguacaaccugagccacuccuacgccaucgacgcggccaaccacugcgggaccguggccaacggcauccuccagaccuucaugcgcauggccuggggcgggagcuacaucgcgcuggacuccggccgggggaacugggacugcaucaugaccagcuaccaguaccugaucauccagaacacgaccugggagaaccacugccaguucucccgccccagccccaucggcuaccucgggcugcugagccagcggacccgcgacaucuacaucucccggcgccuccugggcaccuucacguggacccugagcgacuccgagggcaacgccacccccgggggcuacugccucacccgguggaugcugaucgaggccgagcugaagugcuucgggaacacggccgucgccaagugcaacgagaagcacgacgaggaguucugcgacaugcuccgccuguucgacuucaacaagcaggcgaucagccggcugaagucccccgcccagaugagcauccagcucaucaacaaggccgugaacgcccugaucaacgaccagcugaucaugaagaaccaccuccgcgacaucaugggcauccccuacugcaacuacuccaaguacugcuaccugaaccacaccaucaccgggaagaccagccugcccaagugcugccucguguccaacggcagcuaccugaacgagacgcacuucuccgacgacaucgagcagcaggccgacaacaugaucaccgagaugcugcagaaggaguacauggagcggcagggcaagaccccgcucgggcuggucgaccuguucguguucagcaccuccuucuaccugaucagcaucuuccuccgccuggugaagaucccgacgcaccggcacaucgucggcaagcccugccccaagccccaccgccugaaccacauggggaucugcuccugcggccucuacaagcagccgggggugcccgugcgguggaagcgcugaggacuaguuauaagacugacuagcccgaugggccucccaacgggcccuccuccccuccuugcaccgagauuaauaaaaaaaaaaaaaaaaaaaaaaaaaaaaaaaaaaaaaaaaaaaaaaaaaaaaaaaaaaaaaaaaaaaaaaaaaaaaaaaaaaaaaaaaaaaaaaaaaaaa

SEQ ID NO: 33002 - RNA, 1662 nt, Artificial Sequence
  mRNA product Design i-3 (A100) comprising derived and/or modified sequence from LASV(Togo/2016/7082;Clade VI)__AMR44577__GPCmut7 (opt1)
aggagaaagcuuaccaugggccagaucaucaccuucuuccaggaggugccccacgucaucgaggaggugaugaacaucgugcugaucgcccucagccugcuggccauccucaagggggucuacaacguggcgaccugcggcaucaucgggcuggugacguuccuguuccucugcggccgcuccugcagccugaucuacaagggguccuacgagcugcagacccucgagcugaacauggagacccugaacaugaccaugccgcucagcugcacgaagaacuccagccaccacuacauccgggucggcaacgagaccggccuggagcugacccucaccaacacguccaucaucaaccacaaguucugcaaccugagcgacgcccacaagcgcaaccuguacgaccacgcccucauguccauccugagcaccuuccaccuguccauccccaacuucaaccaguacgaggccaugagcugcgacuucaacgggggcaagaucuccgugcaguacaaccucagccacgccuacgcgguggacgccgccgagcacugcgggaccgucgccaacggcgugcugcagaccuucaugcggauggcguggggcggguccuacaucgcccuggacagcggccgcgggaacugggacugcaucaugacguccuaccaguaccucaucauccagaacaccaccugggaggaccacugccaguucagccggcccucccccaucggcuaccuggggcugcucagccagcgcacccgggacaucuacaucagccgccggcugcugggcacguucaccuggacccucuccgacagcgagggcaacgagacccccgggggcuacugccugacgcgcuggaugcugaucgaggccgagcucaagugcuucgggaacaccgccguggccaagugcaacgagaagcacgacgaggaguucugcgacaugcugcggcuguucgacuucaacaagcaggcgauccagcgccucaagucccccgcccagaugagcauccagcugaucaacaaggccgucaacgcccugaucaacgaccagcucaucaugaagaaccaccuccgggacaugaugggcauccccuacugcaacuacuccaaguacugcuaccugaaccacaccagcuccgggcgcaccagccugcccaagugcugccugguguccaacggcagcuaccugaacgagacgcacuucuccgacgacaucgagcagcaggccgacaacaugaucaccgagaugcuccagaaggaguacaucgaccggcagggcaagaccccgcuggggcugguggaccucuucgucuucagcaccuccuucuaccugaucagcaucuuccugcaccugaucaagaucccgacgcaccgccacaucgugggcaagcccugccccaagccccaccggcucaaccacauggggaucugcuccugcggccuguacaagcagccgggggugcccacccgcuggaagcggugaggacuaguuauaagacugacuagcccgaugggccucccaacgggcccuccuccccuccuugcaccgagauuaauaaaaaaaaaaaaaaaaaaaaaaaaaaaaaaaaaaaaaaaaaaaaaaaaaaaaaaaaaaaaaaaaaaaaaaaaaaaaaaaaaaaaaaaaaaaaaaaaaaaa

SEQ ID NO: 33003 - RNA, 1662 nt, Artificial Sequence
  mRNA product Design i-3 (A100) comprising derived and/or modified sequence from LASV(KAK-428;Clade n.d. (VII))__ANH09740__GPCmut7 (opt1)
aggagaaagcuuaccaugggccagaucgugaccuucuuccaggaggucccccacgugaucgaggaggugaugaacaucguccugaucgcccucagccugcuggccauccucaaggggcuguacaacuucgcgaccugcggcgugaucgggcugaucacguuccuccugcugugcggccgcuccugcagcgccaccuacaaggggcaguacgagcuccagacccuggagcugaacauggagucccucaacaugaccaugccgcugagcugcacgaagaacaacucccaccacuacauccgggccggcaacaacaccggccuggagcucacccugaccaacacgagcaucaucucccacaaguucugcaaccugagcgacgcccacaagaagaaccucuacgaccacacccugauguccaucaucaccaccuuccaccugagcauccccaacuucaaccaguacgaggccauguccugcgacuucaacgggggcaagaucagcauccaguacaaccucucccacagcuacgcgggggacgccgcccagcacugcggcacgguggccaacgggguccugcagaccuucaugcgcauggcguggggcggcuccuaccuggcccucgacagcgggcggcgcggcugggacugcaucaucuccagcuaccaguaccugaucauccagaacaccaccugggacgaccacugccaguucucccggcccagccccaucggguaccugggcuucgugagccagaagacgcgcgacaucuacaucucccggcgccuccugggcaccuucaccuggacccugagcgacuccgaggggcacgacaugccgggcggguacugccucacgcgguggaugcugaucgaggccgaccugaagugcuucggcaacaccgccguggccaagugcaacgagaagcacgacgaggaguucugcgacauguggcgccucuucgacuucaacaagcaggcgauccagcggcugaaggcccccgcccagaugaacauccagcugaucaacaaggccgucaacgcccucaucaacgaccagcugaugaugaagaaccaccuccgcgacaucauggggauccccuacugcaacuacagcaaguucugcuaccugaacaacaccaccacgggccggaccucccugccccgcugcugccugaucagcaacggcuccuaccucaacgagacccacuucagcgacgacaucgagcagcaggcggacaacaugaucaccgagaugcugcagaaggaguacauggaccggcaggggaagacgccccugggccucguggaccuguucguguucuccaccagcuucuaccugaucaccaucuuccuccaccuggucaagaucccgacccaccgccacaucguggggaagcccugccccaagccccaccggcugaaccacaugggcaucugcuccugcgggcuguacaagcagccgggcgugcccguccgcuggaagcggugaggacuaguuauaagacugacuagcccgaugggccucccaacgggcccuccuccccuccuugcaccgagauuaauaaaaaaaaaaaaaaaaaaaaaaaaaaaaaaaaaaaaaaaaaaaaaaaaaaaaaaaaaaaaaaaaaaaaaaaaaaaaaaaaaaaaaaaaaaaaaaaaaaaa

SEQ ID NO: 33004 - RNA, 1662 nt, Artificial Sequence; identical to SEQ ID NO: 32998
  mRNA product Design i-3 (A100) comprising derived and/or modified sequence from LASV(Pinneo-NIG-1969;Clade I)__AIT17836__GPCmut7 (opt1)

SEQ ID NO: 33005 - RNA, 1662 nt, Artificial Sequence
  mRNA product Design i-3 (A100) comprising derived and/or modified sequence from LASV(ISTH0009-NIG-2011;Clade II)__AIT17404__GPCmut7 (opt1)
aggagaaagcuuaccaugggccagaucaucaccuucuuccaggaggugccccacgucaucgaggaggugaugaacaucgugcugaucgcccucagccugcuggccauccucaaggggaucuacaacgucgcgaccugcggccuguucgggcugguguccuuccuccugcugugcggccgcagcugcuccacgaccuacaaggggguguacgagcuccagacccuggagcuggacauggccagccucaacaugaccaugccgcuguccugcacgaagaacaacagccaccacuacaucauggucggcaacgagaccggccuggagcucacccugaccaacacguccaucaucaaccacaaguucugcaaccugagcgacgcccacaagaagaaccucuacgaccacgcccugauguccaucaucagcaccuuccaccuguccauccccaacuucaaccaguacgaggccaugagcugcgacuucaacgggggcaagaucuccgugcaguacaaccucagccacgcguacgccguggacgccgccaaccacugcgggaccaucgcgaacggcguccugcagaccuucaugcggauggccuggggcggguccuacaucgcccuggacagcggcaagggguccugggacugcaucaugacgagcuaccaguaccucaucauccagaacaccaccugggaggaccacugccaguucucccgccccagccccaucggcuaccuggggcugcucagccagcggacccgcgacaucuacaucucccggcgccugcugggcacguucaccuggacccucagcgacuccgagggcaacgagacccccgggggcuacugccugacgcgguggaugcugaucgaggccgagcucaagugcuucgggaacaccgccguggcgaagugcaacgagaagcacgacgaggaguucugcgacaugcugcgccuguucgacuucaacaagcaggccauccggcgccucaagacccccgcccagaugagcauccagcugaucaacaaggccgugaacgcccugaucaacgaccagcucaucaugaagaaccaccuccgggacaucaugggcaucccguacugcaacuacuccaaguacugcuaccugaaccacaccgucacggggaagaccagccugccccgcugcugccugguguccaacggcagcuaccugaacgagacccacuucuccgacgacaucgagcagcaggcggacaacaugaucaccgagcuccugcagaaggaguacauggaccggcagggcaagacgccccuggggcucguggaccuguucgucuucagcaccuccuucuaccugaucagcaucuuccugcaccucaucaagaucccgacccaccgccacaucaccggcaagcccugccccaagccccaccggcugaaccacauggggaucugcuccugcggccuguacaagcacccgggggugcccgugaaguggaagcgcugaggacuaguuauaagacugacuagcccgaugggccucccaacgggcccuccuccccuccuugcaccgagauuaauaaaaaaaaaaaaaaaaaaaaaaaaaaaaaaaaaaaaaaaaaaaaaaaaaaaaaaaaaaaaaaaaaaaaaaaaaaaaaaaaaaaaaaaaaaaaaaaaaaaa

SEQ ID NO: 33006 - RNA, 1662 nt, Artificial Sequence
  mRNA product Design i-3 (A100) comprising derived and/or modified sequence from LASV(ISTH2010-NIG-2012;Clade II)__AIT17482__GPCmut7 (opt1)
aggagaaagcuuaccaugggccagaucaucaccuucuuccaggaggugccccacgucaucgaggaggugaugaacaucgugcugaucgcccucagccugcuggccauccucaaggggaucuacaacgucgcgaccugcggccuguucgggcugguguccuuccuccugcugugcggccgcagcugcuccacgaccuacaaggggguguacgagcuccagacccuggagcuggacauggccagccucaacaugaccaugccgcuguccugcacgaagaacaacagccaccacuacaucauggucggcaacgagaccggccuggagcucacccugaccaacacguccaucaucaaccacaaguucugcaaccugagcgacgcccacaagaagaaccucuacgaccacgcccugauguccaucaucagcaccuuccaccuguccauccccaacuucaaccaguacgaggccaugagcugcgacuucaacgggggcaagaucuccgugcaguacaaccucagccacgcguacgccguggacgccgccaaccacugcgggaccaucgcgaacggcguccugcagaccuucaugcggauggccuggggcggguccuacaucgcccuggacagcggcaagggguccugggacugcaucaugacgagcuaccaguaccucaucauccagaacaucaccugggaggaccacugccaguucucccgccccagccccaucggcuaccuggggcugcucagccagcggacccgcgacaucuacaucucccggcgccugcugggcaccuucacguggacccucagcgacuccgagggcaacgagacccccgggggcuacugccugacccgguggaugcugaucgaggccgagcucaagugcuucgggaacacggccguggcgaagugcaacgagaagcacgacgaggaguucugcgacaugcugcgccuguucgacuucaacaagcaggccauccggcgccucaagacccccgcccagaugagcauccagcugaucaacaaggccgugaacgcccugaucaacgaccagcucaucaugaagaaccaccuccgggacaucaugggcauccccuacugcaacuacuccaaguacugcuaccugaaccacaccgucaccgggaagacgagccugccccgcugcugccugguguccaacggcagcuaccugaacgagacccacuucuccgacgacaucgagcagcaggcggacaacaugaucaccgagcuccugcagaaggaguacaucgaccggcagggcaagaccccgcuggggcucguggaccuguucgucuucagcacguccuucuaccugaucagcaucuuccugcaccucgugaagaucccgacccaccgccacguggucggcaagcccugccccaagccccaccggcugaaccacauggggaucugcuccugcggccuguacaagcacccgggggugcccgugaaguggaagcgcugaggacuaguuauaagacugacuagcccgaugggccucccaacgggcccuccuccccuccuugcaccgagauuaauaaaaaaaaaaaaaaaaaaaaaaaaaaaaaaaaaaaaaaaaaaaaaaaaaaaaaaaaaaaaaaaaaaaaaaaaaaaaaaaaaaaaaaaaaaaaaaaaaaaa

SEQ ID NO: 33007 - RNA, 1662 nt, Artificial Sequence
  mRNA product Design i-3 (A100) comprising derived and/or modified sequence from LASV(Lassa virus/H.sapiens-wt/NGA/2015/ISTH_0543;Clade II)__AVO03639__GPCmut7 (opt1)
aggagaaagcuuaccaugggccagaucaucaccuucuuccaggaggugccccacgucaucgaggaggugaugaacaucgugcugaucgcccucagccugcuggccauccucaaggggaucuacaacgucgcgaccugcggccuguucgggcugguguccuuccuccugcugugcggccgcagcugcuccacgaccuacaaggggguguacgagcuccagacccuggagcuggacauggccaaccucaacaugaccaugccgcugagcugcacgaagaacaacucccaccacuacaucauggucggcaacgagaccggccuggagcucacccugaccaacacgagcaucaucaaccacaaguucugcaaccuguccgacgcccacaagaagaaccucuacgaccacgcccugaugagcaucaucuccaccuuccaccugagcauccccaacuucaaccaguacgaggccauguccugcgacuucaacgggggcaagaucagcgugcaguacaaccucucccacaccuacgcgguggacgccgccaaccacugcgggaccaucgccaacggcguccugcagacguucaugcggauggcguggggcgggagcuacaucgcccuggacuccggcaaggggagcugggacugcaucaugaccuccuaccaguaccucgugauccagaacaccaccugggaggaccacugccaguucagccgccccucccccaucggcuaccuggggcugcucagccagcggacgcgcgacaucuacaucagccggcgccugcugggcaccuucaccuggacccucuccgacagcgagggcaacgagacgcccgggggcuacugccugacccgguggaugcugaucgaggccgagcucaagugcuucgggaacaccgccguggccaagugcaacgagaagcacgacgaggaguucugcgacaugcugcgccuguucgacuucaacaagcaggcgauccggcgccucaagacccccgcccagauguccauccagcugaucaacaaggccgucaacgcccugaucaacgaccagcucaucaugaagaaccaccuccgggacaucaugggcauccccuacugcaacuacagcaaguacugcuaccugaaccacacggugaccgggaagaccucccugccccgcugcugccuggugagcaacggcuccuaccugaacgagacccacuucagcgacgacaucgagcagcaggccgacaacaugaucacggagcuccugcagaaggaguacaucgaccggcagggcaagaccccgcuggggcucgucgaccuguucguguucuccaccagcuucuaccugaucuccaucuuccugcaccucgugaagaucccgacccaccgccacaucacgggcaagcccugccccaagccccaccggcugaaccacauggggaucugcagcugcggccuguacaagcacccggggguccccgugaaguggaagcgcugaggacuaguuauaagacugacuagcccgaugggccucccaacgggcccuccuccccuccuugcaccgagauuaauaaaaaaaaaaaaaaaaaaaaaaaaaaaaaaaaaaaaaaaaaaaaaaaaaaaaaaaaaaaaaaaaaaaaaaaaaaaaaaaaaaaaaaaaaaaaaaaaaaaa

SEQ ID NO: 33008 - RNA, 1662 nt, Artificial Sequence
  mRNA product Design i-3 (A100) comprising derived and/or modified sequence from LASV(Lassa virus/H.sapiens-wt/NGA/2016/ISTH_0009;Clade II)__AVO03571__GPCmut7 (opt1)
aggagaaagcuuaccaugggccagaucaucaccuucuuccaggaggugccccacgucaucgaggaggugaugaacaucgugcugaucgcccucagccugcuggccauccucaaggggaucuacaacgucgcgaccugcggccugcuggggcucguguccuuccugcugcucugcggccgcagcugcuccacgaccuacaaggggguguacgagcugcagacccuggagcucgacauggccagccugaacaugaccaugccgcuguccugcacgaagaacaacagccaccacuacaucauggucggcaacgagaccggccucgagcugacccugaccaacacguccaucaucaaccacaaguucugcaaccucagcgacgcccacaagaagaaccuguacgaccacgcccugauguccaucaucagcaccuuccaccucuccauccccaacuucaaccaguacgaggccaugagcugcgacuucaacgggggccggaucuccgugcaguacaaccugagccacuccuacgcgguggacgccgccaaccacugcgggaccaucgccaacggcguccugcagaccuucaugcgcauggcguggggcgggagcuacaucgcccucgacuccggcaaggggagcugggacugcaucaugacguccuaccaguaccugaucauccagaacaccaccugggaggaccacugccaguucagccggcccagccccaucggcuaccuggggcuccugucccagcgcacccgggacaucuacaucagccgccggcugcucggcacguucaccuggacccuguccgacagcgagggcaacgagacccccgggggcuacugccugacgcgcuggaugcucaucgaggccgagcugaagugcuucgggaacaccgccguggccaagugcaacgagaagcacgacgaggaguucugcgacaugcugcggcuguucgacuucaacaagcaggcgauccgccggcugaagacccccgcccagauguccauccagcugaucaacaaggccgugaacgcccucaucaacgaccagcugaucaugaagaaccaccuccgcgacaucaugggcaucccguacugcaacuacagcaaguacugcuaccucaaccacaccgucacggggaagaccucccugccccggugcugccuggugagcaacggcuccuaccucaacgagacccacuucagcgacgacaucgagcagcaggccgacaacaugaucaccgagcugcugcagaaggaguacaucgaccgccagggcaagacgccccucgggcugguggaccuguucgucuucuccaccagcuucuaccugaucuccaucuuccuccaccuggugaagaucccgacccaccggcacaucaccggcaagcccugccccaagccccaccgccugaaccacauggggaucugcagcugcggccucuacaaccacccgggggugcccgucaaguggaagcggugaggacuaguuauaagacugacuagcccgaugggccucccaacgggcccuccuccccuccuugcaccgagauuaauaaaaaaaaaaaaaaaaaaaaaaaaaaaaaaaaaaaaaaaaaaaaaaaaaaaaaaaaaaaaaaaaaaaaaaaaaaaaaaaaaaaaaaaaaaaaaaaaaaaa

SEQ ID NO: 33009 - RNA, 1662 nt, Artificial Sequence
  mRNA product Design i-3 (A100) comprising derived and/or modified sequence from LASV(Lassa virus/H.sapiens-wt/NGA/2016/ISTH_0017;Clade II)__AVO03567__GPCmut7 (opt1)
aggagaaagcuuaccaugggccagaucaucaccuucuuccaggaggugccccacgucaucgaggaggugaugaacaucgugcugaucgcccucagccugcuggccauccucaaggggaucuacaacgucgcgaccugcggccuguucgggcugguguccuuccuccugcugugcggccgcagcugcuccacgaccuacaaggggguguacgagcuccagacccuggagcuggacauggccagccucaacaugaccaugccgcuguccugcacgaagaacaacagccaccacuacaucauggucggcaacgagaccggccuggagcucacccugaccaacacguccaucaucaaccacaaguucugcaaccugagcgacgcccacaagaagaaccucuacgaccacgcccugauguccaucaucagcaccuuccaccuguccauccccaacuucaaccaguacgaggccaugagcugcgacuucaacgggggcaagaucuccgugcaguacaaccucagccacaccuacgcgaucgacgccgccaaccacugcgggaccaucgccaacggcgugcugcagacguucaugcggauggcguggggcggguccuacaucgcccuggacagcggcaagggguccugggacugcaucaugaccagcuaccaguaccucaucauccagaacaccaccugggaggaccacugccaguucucccgccccagccccaucggcuaccuggggcugcucagccagcggacgcgcgacaucuacaucucccggcgccugcugggcaccuucaccuggacccucagcgacuccgagggcaacgagacgcccgggggcuacugccugacccgguggaugcugaucgaggccgagcucaagugcuucgggaacaccgccgucgccaagugcaacgagaagcacgacgaggaguucugcgacaugcugcgccuguucgacuucaacaagcaggcgauccggcgccucaagacccccgcccagaugagcauccagcugaucaacaaggccgugaacgcccugaucaacgaccagcucaucaugaagaaccaccuccgggacaucaugggcauccccuacugcaacuacuccaaguacugcuaccugaaccacacggugaccgggaagaccagccugccccgcugcugccuggucuccaacggcagcuaccugaacgagacccacuucuccgacgacaucgagcagcaggccgacaacaugaucacggagcuccugcagaaggaguacauggaccggcagggcaagaccccgcuggggcucguggaccuguucguguucagcaccuccuucuaccugaucagcaucuuccugcaccucguccgcaucccgacccaccggcacgugaucggcaagcccugccccaagccccaccgccugaaccacauggggaucugcuccugcggccuguacaagcacccgggggugcccgucaaguggaagcggugaggacuaguuauaagacugacuagcccgaugggccucccaacgggcccuccuccccuccuugcaccgagauuaauaaaaaaaaaaaaaaaaaaaaaaaaaaaaaaaaaaaaaaaaaaaaaaaaaaaaaaaaaaaaaaaaaaaaaaaaaaaaaaaaaaaaaaaaaaaaaaaaaaaa

SEQ ID NO: 33010 - RNA, 1662 nt, Artificial Sequence
  mRNA product Design i-3 (A100) comprising derived and/or modified sequence from LASV(Lassa virus/H.sapiens-wt/NGA/2018/ISTH_0959;Clade II)__AVV65099__GPCmut7 (opt1)
aggagaaagcuuaccaugggccagaucaucaccuucuuccaggaggugccccacgucaucgaggaggugaugaacaucgugcugaucgcccucagccugcuggccauccucaaggggaucuacaacgucgugaccugcggccuguucgggcugguguccuuccuccugcugugcggccgcagcugcuccacgaccuacaagggggucuacgagcuccagacccuggagcuggacauggcgagccucaacaugaccaugccgcuguccugcacgaagaacaacagccaccacuacaucauggugggcaacgagaccggccuggagcucacccugaccaacacguccaucaucaaccacaaguucugcaaccugagcgacgcccacaagaagaaccucuacgaccacgcccugauguccaucaucagcaccuuccaccuguccauccccaacuucaaccaguacgaggccaugagcugcgacuucaacgggggcaagaucuccgugcaguacaaccucagccacgccuacgcgaucgacgccgccaaccacugcgggaccaucgccaacggcguccugcagaccuucaugcggauggcguggggcggguccuacaucgcccuggacagcggcaagggguccugggacugcaucaugacgagcuaccaguaccucaucauccagaacaccaccugggaggaccacugccaguucucccgccccagccccaucggcuaccuggggcugcucagccagcggacccgcgacaucuacaucucccggcgccugcugggcacguucaccuggacccucagcgacuccgagggcaacgagacccccgggggcuacugccugacgcgguggaugcugaucgaggccgagcucaagugcuucgggaacaccgccguggccaagugcaacgagaagcacgacgaggaguucugcgacaugcugcgccuguucgacuucaacaagcaggcgauccggcgccucaagacccccgcccagaugagcauccagcugaucaacaaggccgugaacgcccugaucaacgaccagcucaucaugaagaaccaccuccgggacaucaugggcaucccguacugcaacuacuccaaguacugcuaccugaaccacaccgucacggggaagaccagccugccccgcugcugccugguguccaacggcagcuaccugaacgagacccacuucuccgacgacaucgagcagcaggccgacaacaugaucaccgagcuccugcagaaggaguacaucgaccggcagggcaagacgccccuggggcucguggaccuguucgucuucagcaccuccuucuaccugaucagcaucuuccugcaccucgugaagaucccgacccaccgccacgugaucggcaagcccugccccaagccccaccggcugaaccacauggggaucugcuccugcggccuguacaagcacccggggguccccgugaaguggaagcgcugaggacuaguuauaagacugacuagcccgaugggccucccaacgggcccuccuccccuccuugcaccgagauuaauaaaaaaaaaaaaaaaaaaaaaaaaaaaaaaaaaaaaaaaaaaaaaaaaaaaaaaaaaaaaaaaaaaaaaaaaaaaaaaaaaaaaaaaaaaaaaaaaaaaa

SEQ ID NO: 33011 - RNA, 1662 nt, Artificial Sequence
  mRNA product Design i-3 (A100) comprising derived and/or modified sequence from LASV(LASV003-NIG-2008;Clade II)__AIT17580__GPCmut7 (opt1)
aggagaaagcuuaccaugggccagaucaucaccuucuuccaggaggugccccacgucaucgaggaggugaugaacaucgugcugaucgcccucagccugcuggccauccucaaggggaucuacaacgucgcgaccugcggccuguucgggcugguguccuuccuccugcugugcggccgcagcugcuccacgaccuacaaggggguguacgagcuccagacccuggagcuggacauggccagccucaacaugaccaugccgcuguccugcacgaagaacaacagccaccacuacaucauggucggcaacgagaccggccuggagcucacccugaccaacacguccaucaucaaccacaaguucugcaaccugagcgacgcccacaagaagaaccucuacgaccacgcccugauguccaucaucagcaccuuccaccuguccauccccaacuucaaccaguacgaggccaugagcugcgacuucaacgggggcaagaucuccgugcaguacaaccucagccacaccuacgcgguggacgccgccaaccacugcgggaccaucgccaacggcguccugcagacguucaugcggauggcguggggcggguccuacaucgcccuggacagcggcaagggguccugggacugcaucaugaccagcuaccaguaccucaucauccagaacaccaccugggaggaccacugccaguucucccgccccagccccaucggcuaccuggggcugcucagccagcggacgcgcgacaucuacaucucccggcgccugcugggcaccuucaccuggacccucagcgacuccgagagcaacgagacgccgggcggguacugccugacccgguggaugcugaucgaggccgagcucaagugcuucggcaacaccgccguggccaagugcaacgagaagcacgacgaggaguucugcgacaugcugcgccuguucgacuucaacaagcaggcgauccggcgccucaaggcccccgcccagauguccauccagcugaucaacaaggccgugaacgcccugaucaacgaccagcucaucaugaagaaccaccuccgggacaucauggggauccccuacugcaacuacagcaaguacugcuaccugaaccacaccgucacgggccgcaccucccugccccggugcugccuggugagcaacggguccuaccugaacgagacccacuucagcgacgacaucgagcagcaggcggacaacaugaucaccgagcuccugcagaaggaguacauggaccgccagggcaagacgccccugggccucguggaccuguucgucuucuccaccagcuucuaccugaucuccaucuuccugcaccucgugaagaucccgacccaccggcacgugaucgggaagcccugccccaagccccaccgccugaaccacaugggcaucugcagcugcgggcuguacaagcacccgggcguccccgugaaguggaagcggugaggacuaguuauaagacugacuagcccgaugggccucccaacgggcccuccuccccuccuugcaccgagauuaauaaaaaaaaaaaaaaaaaaaaaaaaaaaaaaaaaaaaaaaaaaaaaaaaaaaaaaaaaaaaaaaaaaaaaaaaaaaaaaaaaaaaaaaaaaaaaaaaaaaa

SEQ ID NO: 33012 - RNA, 1662 nt, Artificial Sequence
  mRNA product Design i-3 (A100) comprising derived and/or modified sequence from LASV(LASV035-NIG-2009;Clade II)__AIT17588__GPCmut7 (opt1)
aggagaaagcuuaccaugggccagaucaucaccuucuuccaggaggugccccacgucaucgaggaggugaugaacaucgugcugaucgcccucagccugcuggccauccucaaggggaucuacaacgucgcgaccugcggccuguucgggcugguguccuuccuccugcugugcggccgcagcugcuccacgaccuacaaggggguguacgagcuccagacccuggagcuggacauggccagccucaacaugaccaugccgcuguccugcacgaagaacaacagccaccacuacaucauggucggcaacgagaccggccuggagcucacccugaccaacacguccaucaucaaccacaaguucugcaaccugagcgacgcccacaagaagaaccucuacgaccacgcccugauguccaucaucagcaccuuccaccuguccauccccaacuucaaccaguacgaggccaugagcugcgacuucaacgggggcaagaucuccgugcaguacaaccucagccacgcguacgccguggacgccgccaaccacugcgggaccaucgcgaacggcguccugcagaccuucaugcggauggccuggggcggguccuacaucgcccuggacagcggcaagggguccugggacugcaucaugacgagcuaccaguaccucaucauccagaacaccaccugggaggaccacugccaguucucccgccccagccccaucggcuaccuggggcugcucagccagcggacccgcgacaucuacaucucccggcgccugcugggcacguucaccuggacccucagcgacuccgagggcaacgagacccccgggggcuacugccugacgcgguggaugcugaucgaggccgagcucaagugcuucgggaacaccgccguggcgaagugcaacgagaagcacgacgaggaguucugcgacaugcugcgccuguucgacuucaacaagcaggccauccggcgccucaaggcccccgcccagaugagcauccagcugaucaacaaggccgugaacgcgcugaucaacgaccagcucaucaugaagaaccaccuccgggacaucaugggcauccccuacugcaacuacuccaaguacugcuaccugaaccacaccgucaccgggaagacgagccugccccgcugcugccugguguccaacggcagcuaccugaacgagacccacuucuccgacgacaucgagcagcaggccgacaacaugaucaccgagcuccugcagaaggaguacaucgaccggcagggcaagaccccgcuggggcucguggaccuguucgucuucagcacguccuucuaccugaucagcaucuuccugcaccucgugaagaucccgacccaccgccacgugaucggcaagcccugccccaagccccaccggcugaaccacauggggaucugcuccugcggccuguacaagcacccggggguccccgugaaguggaagcgcugaggacuaguuauaagacugacuagcccgaugggccucccaacgggcccuccuccccuccuugcaccgagauuaauaaaaaaaaaaaaaaaaaaaaaaaaaaaaaaaaaaaaaaaaaaaaaaaaaaaaaaaaaaaaaaaaaaaaaaaaaaaaaaaaaaaaaaaaaaaaaaaaaaaa

SEQ ID NO: 33013 - RNA, 1662 nt, Artificial Sequence
  mRNA product Design i-3 (A100) comprising derived and/or modified sequence from LASV(LASV1000-NIG-2009;Clade II)__AIT17782__GPCmut7 (opt1)
aggagaaagcuuaccaugggccagaucaucaccuucuuccaggaggugccccacgucaucgaggaggugaugaacaucgugcugaucgcccucagccugcuggccauccucaaggggaucuacaacgucgcgaccugcggccuguucgggcugguguccuuccuccugcugugcggccgcagcugcuccacgaccuacaaggggguguacgagcuccagacccuggagcuggacauggccagccucaacaugaccaugccgcuguccugcacgaagaacaacagccaccacuacaucauggucggcaacgagaccggccuggagcucacccugaccaacacguccaucaucaaccacaaguucugcaaccugagcgacgcccacaagaagaaccucuacgaccacgcccugauguccaucaucagcaccuuccaccuguccauccccaacuucaaccaguacgaggccaugagcugcgacuucaacgggggcaagaucuccgugcaguacaaccucagccacaccuacgcgguggacgccgccaaccacugcgggaccaucgccaacggcguccugcagacguucaugcggauggcguggggcggguccuacaucgcccuggacagcggcaagggguccugggacugcaucaugaccagcuaccaguaccucaucauccagaacaccaccugggaggaccacugccaguucucccgccccagccccaucggcuaccuggggcugcucagccagcggacgcgcgacaucuacaucucccggcgccugcugggcaccuucaccuggacccucagcgacuccgagggcaacgagacgcccgggggcuacugccugacccgguggaugcugaucgaggccgagcucaagugcuucgggaacaccgccguggccaagugcaacgagaagcacgacgaggaguucugcgacaugcugcgccuguucgacuucaacaagcaggcgaucaagcggcucaagacccccgcccagaugagcauccagcugaucaacaaggccgugaacgcccugaucaacgaccagcucaucaugaagaaccaccuccgcgacaucaugggcauccccuacugcaacuacuccaaguacugcuaccugaaccacacggucaccgggaagaccagccugccccggugcugccugguguccaacggcagcuaccugaacgagacccacuucuccgacgacaucgagcagcaggccgacaacaugaucacggagcuccugcagaaggaguacaucgaccgccagggcaagaccccgcuggggcucguggaccuguucgucuucagcaccuccuucuaccugaucagcaucuuccugcaccucgugaagaucccgacccaccggcacguggucggcaagcccugccccaagccccaccgccugaaccacauggggaucugcuccugcggccuguacaagcacccgggggugcccgugaaguggaagcggugaggacuaguuauaagacugacuagcccgaugggccucccaacgggcccuccuccccuccuugcaccgagauuaauaaaaaaaaaaaaaaaaaaaaaaaaaaaaaaaaaaaaaaaaaaaaaaaaaaaaaaaaaaaaaaaaaaaaaaaaaaaaaaaaaaaaaaaaaaaaaaaaaaaa

SEQ ID NO: 33014 - RNA, 1662 nt, Artificial Sequence
  mRNA product Design i-3 (A100) comprising derived and/or modified sequence from LASV(LASV221-NIG-2010;Clade II)__AIT17624__GPCmut7 (opt1)
aggagaaagcuuaccaugggccagaucaucaccuucuuccaggaggugccccacgucaucgaggaggugaugaacaucgugcugaucgcccucagccugcuggccauccucaaggggaucuacaacgucgcgaccugcggccuguucgggcugguguccuuccuccugcugugcggccgcagcugcuccacgaccuacaaggggguguacgagcuccagacccuggagcuggacauggccagccucaacaugaccaugccgcuguccugcacgaagaacaacagccaccacuacaucauggucggcaacgagaccggccuggagcucacccugaccaacacguccaucaucaaccacaaguucugcaaccugagcgacgcccacaagaagaaccucuacgaccacgcccugauguccaucaucagcaccuuccaccuguccauccccaacuucaaccaguacgaggccaugagcugcgacuucaacgggggcaagaucuccgugcaguacaaccucagccacaccuacgcgaucgacgccgccaaccacugcgggaccaucgccaacggcgugcugcagacguucaugcggauggcguggggcggguccuacaucgcccuggacagcggcaagggguccugggacugcaucaugaccagcuaccaguaccucaucauccagaacaccaccugggaggaccacugccaguucucccgccccagccccaucggcuaccuggggcugcucagccagcggacgcgcgacaucuacaucucccggcgccugcugggcaccuucaccuggacccucagcgacuccgagggcaacgagacgcccgggggcuacugccugacccgguggaugcugaucgaggccgagcucaagugcuucgggaacaccgccgucgccaagugcaacgagaagcacgacgaggaguucugcgacaugcugcgccuguucgacuucaacaagcaggcgauccggcgccucaagacccccgcccagaugagcauccagcugaucaacaaggccgugaacgcccugaucaacgaccagcucaucaugaagaaccaccuccgggacaucaugggcauccccuacugcaacuacuccaaguacugcuaccugaaccacacggugaccgggaagaccagccugccccgcugcugccuggucuccaacggcagcuaccugaacgagacccacuucuccgacgacaucgagcagcaggccgacaacaugaucacggagaugcuccagaaggaguacauggaccggcagggcaagaccccgcuggggcugguggaccucuucguguucagcaccuccuucuaccugaucagcaucuuccugcaccuggucaagaucccgacccaccgccacgugaucggcaagcccugccccaagccccaccggcucaaccacauggggaucugcuccugcggccuguacaagcacccgggggugcccgucaaguggaagcgcugaggacuaguuauaagacugacuagcccgaugggccucccaacgggcccuccuccccuccuugcaccgagauuaauaaaaaaaaaaaaaaaaaaaaaaaaaaaaaaaaaaaaaaaaaaaaaaaaaaaaaaaaaaaaaaaaaaaaaaaaaaaaaaaaaaaaaaaaaaaaaaaaaaaa

SEQ ID NO: 33015 - RNA, 1662 nt, Artificial Sequence
  mRNA product Design i-3 (A100) comprising derived and/or modified sequence from LASV(LASV237-NIG-2010;Clade II)__AIT17638__GPCmut7 (opt1)
aggagaaagcuuaccaugggccagaucaucaccuucuuccaggaggugccccacgucaucgaggaggugaugaacaucgugcugaucgcccucagccugcuggccauccucaaggggaucuacaacgucgcgaccugcggccuguucgggcugguguccuuccuccugcugugcggccgcagcugcuccacgaccuacaaggggguguacgagcuccagacccuggagcuggacauggccagccucaacaugaccaugccgcuguccugcacgaagaacaacagccaccacuacaucauggucggcaacgagaccggccuggagcucacccugaccaacacguccaucaucaaccacaaguucugcaaccugagcgacgcccacaagaaggaccucuacgaccacgcccugauguccaucaucagcaccuuccaccuguccauccccaacuucaaccaguacgaggccaugagcugcgacuucaacgggggcaagaucuccgugcaguacaaccucagccacaccuacgcgguggacgccgccaaccacugcgggaccaucgccaacggcguccugcagacguucaugcggauggcguggggcggguccuacaucgcccuggacagcggcaagggguccugggacugcaucaugaccagcuaccaguaccucaucauccagaacaccaccugggaggaccacugccaguucucccgccccagccccaucggcuaccuggggcugcucagccagcggacgcgcgacaucuacaucucccggcgccugcugggcaccuucaccuggacccucagcgacuccgagggcaacgagacgcccgggggcuacugccugacccgguggaugcugaucgaggccgagcucaagugcuucgggaacaccgccguggccaagugcaacgagaagcacgacgaggaguucugcgacaugcugcgccuguucgacuucaacaagcaggcgauccggcgccucaagacccccgcccagaugagcauccagcugaucaacaaggccgugaacgcccugaucaacgaccagcucaucaugaagaaccaccuccgggacaucaugggcauccccuacugcaacuacuccaaguacugcuaccugaaccacacggucaccgggaagaccagccugccccgcugcugccugguguccaacggcagcuaccugaacgagacccacuucuccgacgacaucgagcagcaggccgacaacaugaucacggagcuccugcagaaggaguacauggaccggcagggcaagaccccgcuggggcucguggaccuguucgucuucagcaccuccuucuaccugaucagcaucuuccugcaccucaucaagaucccgacccaccgccacaucacgggcaagcccugccccaagccccaccggcugaaccacauggggaucugcuccugcggccuguacaagcacccgggggugcccgugaaguggaagcgcugaggacuaguuauaagacugacuagcccgaugggccucccaacgggcccuccuccccuccuugcaccgagauuaauaaaaaaaaaaaaaaaaaaaaaaaaaaaaaaaaaaaaaaaaaaaaaaaaaaaaaaaaaaaaaaaaaaaaaaaaaaaaaaaaaaaaaaaaaaaaaaaaaaaa

SEQ ID NO: 33016 - RNA, 1662 nt, Artificial Sequence
  mRNA product Design i-3 (A100) comprising derived and/or modified sequence from LASV(LASV253-NIG-2011;Clade II)__AIT17670__GPCmut7 (opt1)
aggagaaagcuuaccaugggccagaucaucaccuucuuccaggaggugccccacgucaucgaggaggugaugaacaucgugcugaucgcccucagccugcuggccauccucaaggggaucuacaacgucgcgaccugcggccuguucgggcugguguccuuccuccugcugugcggccgcagcugcuccacgaccuacaaggggguguacgagcuccagacccuggagcuggacauggccagccucaacaugaccaugccgcuguccugcacgaagaacaacagccaccacuacaucauggucggcaacgagaccggccuggagcucacccugaccaacacguccaucaucaaccacaaguucugcaaccugagcgacgcccacaagaagaaccucuacgaccacgcccugauguccaucaucagcaccuuccaccuguccauccccaacuucaaccaguacgaggccaugagcugcgacuucaacgggggcaagaucuccgugcaguacaaccucagccacaccuacgcgguggacgccgccaaccacugcgggaccaucgccaacggcguccugcagacguucaugcggauggcguggggcggguccuacaucgcccuggacagcggcaagggguccugggacugcaucaugaccagcuaccaguaccucaucauccagaacaccaccugggaggaccacugccaguucucccgccccagccccaucggcuaccuggggcugcucagccagcggacgcgcgacaucuacaucucccggcgccugcugggcaccuucaccuggacccucagcgacuccgagggcaacgagacgcccgggggcuacugccugacccgguggaugcugaucgaggccgagcucaagugcuucgggaacaccgccguggccaagugcaacgagaagcacgacgaggaguucugcgacaugcugcgccuguucgacuucaacaagcaggcgauccggcgccucaaggcccccgcccagaugagcauccagcugaucaacaaggccgugaacgcccugaucaacgaccagcucaucaugaagaaccaccuccgggacaucaugggcaucccguacugcaacuacuccaaguacugcuaccugaaccacaccgucacggggcgcaccagccugccccggugcugccugguguccaacggcagcuaccugaacgagacccacuucuccgacgacaucgagcagcaggcggacaacaugaucaccgagcuccugcagaaggaguacaucgaccgccagggcaagacgccccuggggcucguggaccuguucgucuucagcaccuccuucuaccugaucagcaucuuccugcaccucgugaagaucccgacccaccggcacaucaucggcaagcccugccccaagccccaccgccugaaccacauggggaucugcuccugcggccuguacaagcacccgggggugcccgucaaguggaagcggugaggacuaguuauaagacugacuagcccgaugggccucccaacgggcccuccuccccuccuugcaccgagauuaauaaaaaaaaaaaaaaaaaaaaaaaaaaaaaaaaaaaaaaaaaaaaaaaaaaaaaaaaaaaaaaaaaaaaaaaaaaaaaaaaaaaaaaaaaaaaaaaaaaaa

SEQ ID NO: 33017 - RNA, 1662 nt, Artificial Sequence
  mRNA product Design i-3 (A100) comprising derived and/or modified sequence from LASV(LASV254-NIG-2011;Clade II)__AIT17674__GPCmut7 (opt1)
aggagaaagcuuaccaugggccagaucaucaccuucuuccaggaggugccccacgucaucgaggaggugaugaacaucgugcugaucgcccucagccugcuggccauccucaaggggaucuacaacgucgcgaccugcggccuguucgggcugguguccuuccuccugcugugcggccgcagcugcuccacgaccuacaaggggguguacgagcuccagacccuggagcuggacaugaccaaccucaacaugacgaugccgcugagcugcaccaagaacaacucccaccacuacaucauggucggcaacgagaccggccuggagcucacccugacgaacaccagcaucaucaaccacaaguucugcaaccuguccgacgcccacaagaagaaccucuacaaccacgcccugaugagcaucaucuccaccuuccaccugagcauccccaacuucaaccaguacgaggccauguccugcgacuucaacgggggcaagaucagcgugcaguacaaccucucccacagcuacgccguggacgcggccaaccacugcgggaccaucgccaacggcguccugcagacguucaugcggauggccuggggcggguccuacaucgcgcuggacagcggcaaggggaacugggacugcaucaugaccuccuaccaguaccucaucauccagaacaccaccugggaggaccacugccaguucagccgccccucccccaucggcuaccuggggcugcucagccagcggacgcgcgacaucuacaucagccggcgccugcugggcaccuucaccuggacccucuccgacagcgagggcaacgagacgcccgggggcuacugccugacccgguggaugcugaucgaggccgagcucaagugcuucgggaacaccgccguggccaagugcaacgagaagcacgacgaggaguucugcgacaugcugcgccuguucgacuucaacaagcaggccauccggcgccucaagacccccgcgcaggccaacauccagcugaucaacaaggccgugaacgcccugaucaacgaccagcucaucaugaagaaccaccuccgggacaucaugggcauccccuacugcaacuacuccaaguacugcuaccugaaccacacggucaccgggaagaccagccugccccgcugcugccugguguccaacggcagcuaccugaacgagacccacuucuccgacgacaucgagcagcaggccgacaacaugaucacggagcuccugcagaaggaguacauggaccggcagggcaagaccccgcuggggcucguggaccuguucgucuucagcaccuccuucuaccugaucagcaucuuccugcaccucgugaagaucccgacccaccgccacgugaucggcaagcccugccccaagccccaccggcugaaccacauggggaucugcuccugcggccuguacaagcacccggggguccccgugaaguggaagcgcugaggacuaguuauaagacugacuagcccgaugggccucccaacgggcccuccuccccuccuugcaccgagauuaauaaaaaaaaaaaaaaaaaaaaaaaaaaaaaaaaaaaaaaaaaaaaaaaaaaaaaaaaaaaaaaaaaaaaaaaaaaaaaaaaaaaaaaaaaaaaaaaaaaaa

SEQ ID NO: 33018 - RNA, 1662 nt, Artificial Sequence
  mRNA product Design i-3 (A100) comprising derived and/or modified sequence from LASV(Nig08-A19;Clade III)__ADU56618__GPCmut7 (opt1)
aggagaaagcuuaccaugggccagaucgugaccuucuuccaggaggucccccacgugaucgaggaggugaugaacaucguccugaucgcccucagcauccuggccauccugaaggggcucuacaacaucgcgaccugcggccugaucgggcuggugacguuccuccugcuguccggccgcagcugcuccaugaccuacaaggggguguacgagcuccagacccuggagcugaacaugaacacccucaacaugacgaugccgcugagcugcaccaagaacaacucccaccacuacaucauggucggcaacgagaccggccuggagcucacccugacgaacaccagccugcuccaccacaaguucugcaaccuguccgacgcccacaagaagaaccuguacgaccacacccucaugagcaucaucuccaccuuccaccugagcauccccaacuucaaccaguacgaggccauguccugcgacuucaacgggggcaagaucacggugcaguacaaccugagccacuccuacgccaucgacgccgcgaaccacugcgggaccguggccaacggcguccuccagaccuucaugcggauggccuggggcgggagcuacaucgcccuggacuccggccgcgggaagugggacugcaucaugaccagcuaccaguaccugaucauccagaacacgaccugggaggaccacugccaguucucccggcccagccccaucggcuaccucgggcugcugucccagcgcacccgggacaucuacaucagccgccggcuccugggcaccuucacguggacccugagcgacuccgagggcaacgagacccccgggggcuacugccucacccgcuggaugcugaucgaggcggagcugaagugcuucgggaacacggccguggccaagugcaacgagaagcacgacgaggaguucugcgacaugcuccggcuguucgacuucaacaagcaggccauccgccggcugaaggcccccgcgcagaugagcauccagcucaucaacaaggccgugaacgcccugaucaacgaccagcugaucaugaagaaccaccuccgcgacaucaugggcauccccuacugcaacuacuccaaguacugcuaccugaaccacaccagcaccgggcggaccucccugccccgcugcugccucgucagcaacggcuccuaccugaacgagacgcacuucagcgacgacaucgagcagcaggccgacaacaugaucaccgagaugcugcagaaggaguaccucgaccggcagggcaagaccccgcuggggcugguggaccuguucguguucuccaccagcuucuaccucaucuccaucuuccugcaccuggucaagaucccgacgcaccgccacaucgugggcaagcccugccccaagccccaccggcucaaccacauggggaucugcagcugcggccuguacaagcagccgggggugcccguccgcuggaagcggugaggacuaguuauaagacugacuagcccgaugggccucccaacgggcccuccuccccuccuugcaccgagauuaauaaaaaaaaaaaaaaaaaaaaaaaaaaaaaaaaaaaaaaaaaaaaaaaaaaaaaaaaaaaaaaaaaaaaaaaaaaaaaaaaaaaaaaaaaaaaaaaaaaaa

SEQ ID NO: 33019 - RNA, 1665 nt, Artificial Sequence
  mRNA product Design i-3 (A100) comprising derived and/or modified sequence from LASV(G1180-SLE-2010;Clade IV)__AIT17168__GPCmut7 (opt1)
aggagaaagcuuaccaugggccagaucgugaccuucuuccaggaggucccccacgugaucgaggaggugaugaacaucguccugaucgcccucagcauccuggccgugcugaaggggcucuacaacuucgcgaccugcggccugguggggcugcucaccuuccugcugcucugcggccgcuccugcaccgccagccgguacaagggggucuacgagcugcagacccuggagcucaacauggagacccugaacaugacgaugccgcuguccugcaccaagaacaacagccaccacuacaucauggugggcaacgagaccggccucgagcugacccugacgaacaccuccaucaucaaccacaaguucugcaaccucagcgacgcccacaagaagaaccuguacgaccacgcccugauguccaucaucagcaccuuccaccucuccauccccaacuucaaccaguacgaggccaugagcugcgacuucaacgggggcaagaucuccgugcaguacaaccugagccacuccuacgcgggggacgccgccaaccacugcggcaccgucgccaacggggugcugcagacguucaugcgcauggcguggggcggcagcuacaucgcccucgacuccgggcacggcagcugggacugcaucaugaccuccuaccaguaccugaucauccagaacaccaccugggaggaccacugccaguucagccggcccucccccaucggguaccugggccuccugagccagcgcacgcgggacaucuacaucagccgccggcugcucggcaccuucaccuggacccuguccgacagcgaggggaaggacacgccgggcggguacugccugacccgcuggaugcucaucgaggccgagcugaagugcuucggcaacaccgccguggccaagugcaacgagaagcacgacgaggaguucugcgacaugcugcggcuguucgacuucaacaagcaggcgauccagcgccugaaggcccccgcccagauguccauccagcugaucaacaaggccgucaacgcccucaucaacgaccagcugaucaugaagaaccaccuccgggacaucauggggauccccuacugcaacuacagcaaguacugcuaccucaaccacaccacgaccggcaagaccucccugcccaagugcugccuggugagcaacggcuccuaccucaacgagacccacuucagcgacgacaucgagcagcaggcggacaacaugaucacggagaugcugcagaaggaguacauggagcgccaggggaagacgccccugggccucguggaccuguucgucuucuccaccagcuucuaccugaucuccaucuuccugcaccucgugaagaucccgacccaccggcacaucgugggcaagagcugccccaagccccaccgccugaaccacauggggaucugcuccugcgggcuguacaagcagcccggcgucccggugaaguggaagcggugaggacuaguuauaagacugacuagcccgaugggccucccaacgggcccuccuccccuccuugcaccgagauuaauaaaaaaaaaaaaaaaaaaaaaaaaaaaaaaaaaaaaaaaaaaaaaaaaaaaaaaaaaaaaaaaaaaaaaaaaaaaaaaaaaaaaaaaaaaaaaaaaaaaa

SEQ ID NO: 33020 - RNA, 1665 nt, Artificial Sequence
  mRNA product Design i-3 (A100) comprising derived and/or modified sequence from LASV(G1442-SLE-2011;Clade IV)__AIT17180__GPCmut7 (opt1)
aggagaaagcuuaccaugggccagaucgugaccuucuuccaggaggucccccacgugaucgaggaggugaugaacaucguccugaucgcccucagcauccuggccgugcugaaggggcucuacaacguggcgaccugcggccugaucgggcuggucacguuccuccugcugugcggccgcuccugcaccaccacccucuacaaggggguguacgagcugcagacgcuggagcucaacauggagacccugaacaugaccaugccgcugagcugcaccaagaacaacucccaccacuacauccgggugggcaacgagacgggccucgagcugacccugaccaacaccagcaucaucaaccacaaguucugcaaccucuccgacgcccacaagaagaaccuguacgaccacgcccugaugagcaucaucuccacguuccaccucagcauccccaacuucaaccaguacgaggccauguccugcgacuucaacgggggcaagaucagcguccaguacaaccugucccacagcuacgccggggacgcggccaaccacugcggcaccguggccaacggggugcugcagaccuucaugcgcauggccuggggcggcuccuacaucgcgcucgacagcgggcggggcaacugggacugcaucaugaccuccuaccaguaccugaucauccagaacacgaccugggacgaccacugccaguucagccgccccucccccaucggguaccugggccuccugagccagcggacccgcgacgucuacaucucccggcgccugcucggcaccuucacguggacccugagcgacagcgaggggaaggacaccccgggcggguacugccugacccgguggaugcucaucgaggccgagcugaagugcuucggcaacacggccguggccaagugcaacgagaagcacgacgaggaguucugcgacaugcugcgccucuucgacuucaacaagcaggccauccagcggcugaaggcgcccgcccagauguccauccagcugaucaacaaggccgugaacgcccucaucaacgaccagcugaucaugaagaaccaccuccgcgacaucauggggauccccuacugcaacuacagcaaguacugcuaccugaacaacaccgccaccggcaagaccucccugcccaagugcugccugaucagcaacggcuccuaccucaacgagacgcacuucagcgacgacaucgagcaggaggcggacaacaugaucaccgagaugcugcagaaggaguacauggagcggcaggggaagacgccccugggccucgucgaccuguucguguucuccaccagcuucuaccugaucuccaucuuccugcaccucgugaagaucccgacccaccgccacaucgucggcaagagcugccccaagccccaccggcugaaccacauggggaucugcuccugcgggcuguacaagcagcccggcgugccggugcgcuggaagcggugaggacuaguuauaagacugacuagcccgaugggccucccaacgggcccuccuccccuccuugcaccgagauuaauaaaaaaaaaaaaaaaaaaaaaaaaaaaaaaaaaaaaaaaaaaaaaaaaaaaaaaaaaaaaaaaaaaaaaaaaaaaaaaaaaaaaaaaaaaaaaaaaaaaa

SEQ ID NO: 33021 - RNA, 1665 nt, Artificial Sequence
  mRNA product Design i-3 (A100) comprising derived and/or modified sequence from LASV(G3010-SLE-2013;Clade IV)__AIT17344__GPCmut7 (opt1)
aggagaaagcuuaccaugggccagaucgugaccuucuuccaggaggucccccacgugaucgaggaggugaugaacaucguccugaucgcccucagcauccuggccgugcugaaggggcucuacaacuucgcgaccugcggccugguggggcuggucacguuccuccugcugugcggccgcuccugcaccaccagccucuacaaggggguguacgagcugcagacccuggagcucaacauggagacgcugaacaugaccaugccgcuguccugcaccaagaacaacagccaccacuacaucauggugggcaacgagaccggccucgagcugacgcugaccaacaccuccaucaucaaccacaaguucugcaaccucagcgacgcccacaagaagaaccuguacaaccacgcccugauguccaucaucagcaccuuccaccucuccauccccaacuucaaccaguacgaggccaugagcugcgacuucaacgggggcaagaucuccguccaguacaaccugagccacuccuacgccggggacgcggccagccacugcggcacgguggccaacggggugcugcagaccuucaugcggauggccuggggcggcuccuacaucgcgcucgacagcggguacggcaagugggacugcaucaugaccuccuaccaguaccugaucauccagaacaccacgugggaggaccacugccaguucagccgccccucccccaucggguaccugggccuccugagccagcggacccgcgacaucuacaucagccggcgccugcucggcaccuucaccuggacgcuguccgacagcgaggggaaggacaccccgggcggguacugccugacccgguggaugcucaucgaggccgagcugaagugcuucggcaacaccgccgucgccaagugcaacgagaagcacgacgaggaguucugcgacaugcugcgccucuucgacuucaacaagcaggccauccagcggcugaagacgcccgcgcagauguccauccagcugaucaacaaggccgugaacgcccucaucaacgaccagcugaucaugaagaaccaccuccgcgacaucauggggauccccuacugcaacuacagcaaguacugcuaccugaaccacaccaccaccggcaagacgucccugcccaagugcugccuggugagcaacggcuccuaccucaacgagacccacuucagcgacgacaucgagcagcaggccgacaacaugaucaccgagaugcugcagaaggaguacauggagcggcaggggaagacgccccugggccucgucgaccuguucguguucuccaccagcuucuaccugaucuccaucuuccugcaccucgugaagaucccgacccaccgccacaucgucggcaagagcugccccaagccccaccggcugaaccacauggggaucugcuccugcgggcuguacaagcagcccggcgugccggugcgcuggaagcggugaggacuaguuauaagacugacuagcccgaugggccucccaacgggcccuccuccccuccuugcaccgagauuaauaaaaaaaaaaaaaaaaaaaaaaaaaaaaaaaaaaaaaaaaaaaaaaaaaaaaaaaaaaaaaaaaaaaaaaaaaaaaaaaaaaaaaaaaaaaaaaaaaaaa

SEQ ID NO: 33022 - RNA, 1665 nt, Artificial Sequence
  mRNA product Design i-3 (A100) comprising derived and/or modified sequence from LASV(G502-SLE-2009;Clade IV)__AIT17126__GPCmut7 (opt1)
aggagaaagcuuaccaugggccagaucgugaccuucuuccaggaggucccccacgugaucgaggaggugaugaacaucguccugaucgcccucagcauccuggccgugcugaaggggcucuacaacuucgcgaccugcggccugguggggcugcucacguuccugcugcucugcggccgcuccugcaccaccgggcuguacaagggcgucuacgagcugcagacccucgagcugaacauggagacgcugaacaugaccaugccgcucagcugcaccaagaacaacucccaccacuacaucauggugggcaacgagaccgggcuggagcugacgcucaccaacaccagcaucaucaaccacaaguucugcaaccuguccgacgcccacaagaagaaccuguacgaccacgcccucaugagcaucaucuccaccuuccaccugagcauccccaacuucaaccaguacgaggccauguccugcgacuucaacggcgggaagaucagcgugcaguacaaccugucccacagcuacgccggcgacgcggccgaccacugcgggacggucgccaacggcgugcuccagaccuucaugcggauggccuggggcggguccuacaucgcgcuggacagcggccgcgggcggugggacugcaucaugaccuccuaccaguaccugaucauccagaacaccacgugggaggaccacugccaguucagccgccccucccccaucggcuaccucggccugcugagccagcggacccgcgacaucuacaucucccggcgccuccuggggaccuucaccuggacgcugagcgacagcgagggcaaggacacccccgggggcuacugccucacccgguggaugcugaucgaggccgagcugaagugcuucgggaacaccgccguggccaagugcaacgagaagcacgacgaggaguucugcgacaugcuccgccuguucgacuucaacaagcaggccauccagcggcugaaggcgcccgcccagauguccauccagcucaucaacaaggccgucaacgcccugaucaacgaccagcuggugaugaagaaccaccuccgcgacaucaugggcauccccuacugcaacuacagccgguacugcuaccugaaccacacgaccaccggccgcaccucccugcccaagugcugccucgugagcaacggguccuaccugaacgagacgcacuucagcgacgacaucgagcagcaggccgacaacaugaucaccgagaugcugcagaaggaguacauggagcggcagggcaagaccccgcucgggcuggucgaccuguucguguucuccaccagcuucuaccugaucuccaucuuccuccaccuggugaagaucccgacgcaccgccacaucgucggcaagagcugccccaagccccaccggcugaaccacauggggaucugcuccugcggccucuacaagcagcccggcgugccggugaaguggaagcgcugaggacuaguuauaagacugacuagcccgaugggccucccaacgggcccuccuccccuccuugcaccgagauuaauaaaaaaaaaaaaaaaaaaaaaaaaaaaaaaaaaaaaaaaaaaaaaaaaaaaaaaaaaaaaaaaaaaaaaaaaaaaaaaaaaaaaaaaaaaaaaaaaaaaa

SEQ ID NO: 33023 - RNA, 1665 nt, Artificial Sequence
  mRNA product Design i-3 (A100) comprising derived and/or modified sequence from LASV(G733-SLE-2010;Clade IV)__AIT17154__GPCmut7 (opt1)
aggagaaagcuuaccaugggccagaucgugaccuucuuccaggaggucccccacgugaucgaggaggugaugaacaucguccugaucgcccucagcauccuggccgugcugaaggggcucuacaacuucgcgaccugcggcaucguggggcuggucuccuuccugcuccugugcggccgcagcugcacgaccucccuguacaaggggguguacgagcuccagacccuggagcugaacauggagacccucaacaugacgaugccgcugagcugcaccaagaacaacucccaccacuacaucauggugggcaacgagaccggccuggagcucacccugacgaacaccagcaucaucaaccacaaguucugcaaccuguccgacgcccacaagaagaaccucuacgaccacgcccugaugagcaucaucuccaccuuccaccugagcauccccaacuucaaccaguacgaggccauguccugcgacuucaacgggggcaagaucagcguccaguacaaccucucccacagcuacgccggggacgcggccaaccacugcggcaccaucgccaacggggugcugcagacguucaugcggauggccuggggcggcuccuacaucgcgcuggacagcgggcgcgaccggugggacugcaucaugaccuccuaccaguaccucaucauccagaacaccaccugggaggaccacugccaguucagccgccccucccccaucggcuaccuggggcugcucagccagcggacgcgcgacaucuacaucagccggcgccugcugggcaccuucaccuggacccucuccgacagcgagggcaaggacacgcccgggggcuacugccugacccgguggaugcugaucgaggccgagcucaagugcuucgggaacaccgccguggccaagugcaacgagaagcacgacgaggaguucugcgacaugcugcgccuguucgacuucaacaagcaggccauccagcggcucaaggcgcccgcccagauguccauccagcugaucaacaaggccgucaacgcccugaucaacgaccagcucaucaugaagaaccaccuccgcgacaucaugggcauccccuacugcaacuacagcaaguacugcuaccugaaccacaccacgaccgggaagaccucccugcccaagugcugccuggugagcaacggcuccuaccugaacgagacccacuucagcgacgacaucgagcagcaggccgacaacaugaucacggagaugcuccagaaggaguacauggagcggcagggcaagaccccgcuggggcugguggaccucuucgucuucuccaccagcuucuaccugaucuccaucuuccugcaccuggugaagaucccgacccaccgccacguggucggcaagagcugccccaagccccaccggcucaaccacauggggaucugcuccugcggccuguacgggcagcccggcgugccggugaaguggaagcgcugaggacuaguuauaagacugacuagcccgaugggccucccaacgggcccuccuccccuccuugcaccgagauuaauaaaaaaaaaaaaaaaaaaaaaaaaaaaaaaaaaaaaaaaaaaaaaaaaaaaaaaaaaaaaaaaaaaaaaaaaaaaaaaaaaaaaaaaaaaaaaaaaaaaa

SEQ ID NO: 33024 - RNA, 1665 nt, Artificial Sequence
  mRNA product Design i-3 (A100) comprising derived and/or modified sequence from MOPV/LASV reassortant(IGS-1;Clade IV)__AFY05576__GPCmut7 (opt1)
aggagaaagcuuaccaugggccagaucgugaccuucuuccaggaggucccccacgugaucgaggaggugaugaacaucguccugaucgcccucagcgugcuggccgugcugaaggggcucuacaacuucgcgaccugcggccuggucgggcuggugacguuccuccugcugugcggccgcuccugcaccaccagccucuacaaggggguguacgagcugcagacccuggagcucaacauggagacgcugaacaugaccaugccgcuguccugcaccaagaacaacagccaccacuacaucauggucggcaacgagaccggccucgagcugacgcugaccaacaccuccaucaucaaccacaaguucugcaaccucagcgacgcccacaagaagaaccuguacgaccacgcccugauguccaucaucagcaccuuccaccucuccauccccaacuucaaccaguacgaggccaugagcugcgacuucaacgggggcaagaucuccgugcaguacaaccugagccacuccuacgccggggacgcggccaaccacugcggcacgguggccaacgggguccugcagaccuucaugcggauggccuggggcggcagcuacaucgcgcucgacuccgggcgcggcaacugggacugcaucaugaccagcuaccaguaccugaucauccagaacaccacgugggaggaccacugccaguucucccggcccagccccaucggguaccugggccuccugucccagcgcacccgggacaucuacaucagccgccggcugcucggcaccuucaccuggacgcugagcgacuccgagggggaggacaccccgggcggguacugccugacccgcuggaugcucaucgaggccgagcugaagugcuucggcaacaccgccguggccaagugcaacgagaagcacgacgaggaguucugcgacaugcugcggcuguucgacuucaacaagcaggccauccagcgccugaaggcgcccgcccagaugagcauccagcugaucaacaaggccgugaacgcccucaucaacgaccagcugaucaugaagaaccaccuccgggacaucauggggauccccuacugcaacuacuccaaguacugcuaccucaaccacacgaccaccggccgcaccagccugcccaagugcugccuggucuccaacggcagcuaccucaacgagacgcacuucuccgacgacaucgagcagcaggccgacaacaugaucaccgagaugcugcagaaggaguacauggagcggcaggggaagacgccccugggccucguggaccuguucguguucagcaccuccuucuaccugaucagcaucuuccugcaccucgucaagaucccgacccaccgccacaucguggggaaguccugccccaagccccaccggcugaaccacaugggcaucugcagcugcgggcuguacaagcagcccggcgugccggucaaguggaagcgcugaggacuaguuauaagacugacuagcccgaugggccucccaacgggcccuccuccccuccuugcaccgagauuaauaaaaaaaaaaaaaaaaaaaaaaaaaaaaaaaaaaaaaaaaaaaaaaaaaaaaaaaaaaaaaaaaaaaaaaaaaaaaaaaaaaaaaaaaaaaaaaaaaaaa

SEQ ID NO: 33025 - RNA, 1665 nt, Artificial Sequence
  mRNA product Design i-3 (A100) comprising derived and/or modified sequence from LASV(LM765-SLE-2012;Clade IV)__AIT17814__GPCmut7 (opt1)
aggagaaagcuuaccaugggccagaucgugaccuucuuccaggaggucccccacgugaucgaggaggugaugaacaucguccugaucgcccucagcauccuggccgugcugaaggggcucuacaacuucgcgaccugcggccugguggggcuggucacguuccuccugcugugcggccgcuccugcaccaccagccucuacaaggggguguacgagcugcagacccuggagcucaacauggagacgcugaacaugaccaugccgcuguccugcaccaagaacaacagccaccacuacaucauggugggcaacgagaccggccucgagcugacgcugaccaacaccuccaucaucgaccacaaguucugcaaccucagcgacgcccaccggaagaaccuguacgaccacgcccugauguccaucaucagcaccuuccaccucuccauccccaacuucaaccaguacgaggccaugagcugcgacuucaacgggggcaagaucuccguccaguacaaccugagccacuccuacgccaaggacgcggccgaccacugcgggacgguggccaacggcgugcugcagaccuucaugcgcauggccuggggcgggagcuacaucgcgcucgacuccggccgggggcgcugggacugcaucaugaccagcuaccaguaccugaucauccagaacaccacgugggaggaccacugccaguucucccggcccagccccaucggcuaccuggggcuccugucccagcgcacccgggacaucuacaucagccgccggcugcucggcaccuucaccuggacgcugagcgacuccgagggcaaggacacccccgggggcuacugccugacccgcuggaugcucaucgaggccgagcugaagugcuucgggaacaccgccgucgccaagugcaacgagaagcacgacgaggaguucugcgacaugcugcggcuguucgacuucaacaagcaggccauccagcgccugaaggcgcccgcccagaugagcauccagcugaucaacaaggccgugaacgcccucaucaacgaccagcugaucaugaagaaccaccuccgggacaucaugggcauccccuacugcaacuacuccaaguacugcuaccucaaccacacgaccaccgggaagaccagccugcccaagugcugccugguguccaacggcagcuaccucaacgagacgcacuucuccgacgacaucgagcagcaggccgacaacaugaucaccgagaugcugcagaaggaguacauggagcgccagggcaagaccccgcuggggcucgucgaccuguucguguucagcaccuccuucuaccugaucagcaucuuccugcaccucgugaagaucccgacgcaccggcacaucgucggcaagcccugccccaagccccaccgccugaaccacauggggaucugcuccugcggccuguacaagcagccgggggugcccgugaaguggaagcggugaggacuaguuauaagacugacuagcccgaugggccucccaacgggcccuccuccccuccuugcaccgagauuaauaaaaaaaaaaaaaaaaaaaaaaaaaaaaaaaaaaaaaaaaaaaaaaaaaaaaaaaaaaaaaaaaaaaaaaaaaaaaaaaaaaaaaaaaaaaaaaaaaaaa

SEQ ID NO: 33026 - RNA, 1665 nt, Artificial Sequence
  mRNA product Design i-3 (A100) comprising derived and/or modified sequence from LASV(LM776-SLE-2012;Clade IV)__AIT17824__GPCmut7 (opt1)
aggagaaagcuuaccaugggccagaucgugaccuucuuccaggaggucccccacgugaucgaggaggugaugaacaucguccugaucgcccucagcauccuggccgugcugaaggggcucuacaacuucgcgaccugcggccugguggggcuggucacguuccuccugcugugcggccgcuccugcaccaccagcguguacaaggggguguacgagcuccagacccuggagcugaacauggagacgcucaacaugaccaugccgcuguccugcaccaagaacaacagccaccacuacaucauggucggcaacgagaccggccuggagcucacgcugaccaacaccuccaucaucaaccacaaguucugcaaccugagcgacgcccacaagaagaaccucuacgaccacgcccugauguccaucaucagcaccuuccaccuguccauccccaacuucaaccaguacgaggccaugagcugcgacuucaacgggggcaagaucuccgugcaguacaaccucagccacuccuacgccggggacgcggccaaccacugcggcacgguggccaacgggguccugcagaccuucaugcggauggccuggggcggcagcuacaucgcgcuggacuccgggcacggcaagugggacugcaucaugaccagcuaccaguaccucaucauccagaacaccacgugggaggaccacugccaguucucccgccccagccccaucggguaccugggccugcucucccagcggacccgcgacaucuacaucagccggcgccugcugggcaccuucaccuggacgcucagcgacuccgaggggaaggacaccccgggcggguacugccugacccgguggaugcugaucgaggccgagcucaagugcuucggcaacaccgccguggccaagugcaacgagaagcacgacgaggaguucugcgacaugcugcgccuguucgacuucaacaagcaggccauccagcggcucaaggcgcccgcccagaugagcauccagcugaucaacaaggccgugaacgcccugaucaacgaccagcucaucaugaagaaccaccuccgcgacaucauggggauccccuacugcaacuacuccaaguacugcuaccugaaccacacgaccaccggcaagaccagccugcccaagugcugccuggucuccaacggcagcuaccugaacgagacgcacuucuccgacgacaucgagcagcaggccgacaacaugaucaccgagaugcuccagaaggaguacauggagcggcaggggaagacgccccugggccugguggaccucuucguguucagcaccuccuucuaccugaucagcaucuuccugcaccuggucaagaucccgacccaccgccacaucguggggaaguccugccccaagccccaccggcucaaccacaugggcaucugcagcugcgggcuguacaagcagcccggcgugccgguccgcuggaagcggugaggacuaguuauaagacugacuagcccgaugggccucccaacgggcccuccuccccuccuugcaccgagauuaauaaaaaaaaaaaaaaaaaaaaaaaaaaaaaaaaaaaaaaaaaaaaaaaaaaaaaaaaaaaaaaaaaaaaaaaaaaaaaaaaaaaaaaaaaaaaaaaaaaaa

SEQ ID NO: 33027 - RNA, 1665 nt, Artificial Sequence
  mRNA product Design i-3 (A100) comprising derived and/or modified sequence from LASV(Mad39;Clade IV)__ANH09722__GPCmut7 (opt1)
aggagaaagcuuaccaugggccagaucgugaccuucuuccaggaggucccccacgugaucgaggaggugaugaacaucguccugaucgcccucagcauccuggccgugcugaaggggcucuacaacguggcgaccugcggccugaucgggcuggucacguuccuccugcugugcggccgcuccugcaccaccacccucuacaaggggguguacgagcugcaggcccuggagcucaacauggagacgcugaacaugaccaugccgcugagcugcaccaagaacaacucccaccacuacauccgggugggcaacgagaccggccucgagcugacgcugaccaacaccagccucaucaaccacaaguucugcaaccuguccgacgcccacaagaagaaccuguacgaccacgcccucaugagcaucaucuccaccuuccaccugagcauccccaacuucaaccaguacgaggccauguccugcgacuucaacgacgggaagaucagcguccaguacaaccugucccacacguacgcgggcgacaccgccaaccacugcgggaccguggccaacggcgugcuccagaccuucaugcgcauggccuggggcgggagcuacaucgcgcuggacuccggccgcgggggcugggacugcaucaugacgagcuaccaguaccugaucauccagaacaccaccugggaggaccacugccaguucucccggcccagccccaucggguaccucggccugcugucccagcggacccgcgacaucuacaucagccggcgccuccugggcacguucaccuggacccuguccgacagcgaggggaaggacaccccgggcggguacugccucacgcgguggaugcugaucgaggccgagcugaagugcuucggcaacaccgccgucgccaagugcaacgagaagcacgacgaggaguucugcgacaugcuccgccuguucgacuucaacaagcaggccauccagcggcugaaggcgcccgcccagaugagcauccagcucaucaacaaggccgugaacgcccugaucaacgaccagcugaucaugaagaaccaccuccgcgacaucauggggauccccuacugcaacuacuccaaguacugcuaccugaaccacaccgugaccggcaagacgagccugcccaagugcugccucgucuccaacggcagcuaccugaacgagacccacuucuccgacgacaucgagcagcaggccgacaacaugaucaccgagaugcugcagaaggaguacauggagcggcaggggaagacgccccucggccugguggaccuguucguguucagcaccuccuucuaccugaucagcaucuuccuccaccuggucaagaucccgacccaccgccacgugguggggaagcccugccccaagccccaccggcugaaccacaugggcaucugcuccugcggguucuacaagcagccgggcguccccgugcgcuggaagcggugaggacuaguuauaagacugacuagcccgaugggccucccaacgggcccuccuccccuccuugcaccgagauuaauaaaaaaaaaaaaaaaaaaaaaaaaaaaaaaaaaaaaaaaaaaaaaaaaaaaaaaaaaaaaaaaaaaaaaaaaaaaaaaaaaaaaaaaaaaaaaaaaaaaa

SEQ ID NO: 33028 - RNA, 1665 nt, Artificial Sequence
  mRNA product Design i-3 (A100) comprising derived and/or modified sequence from LASV(Z0947-SLE-2011;Clade IV)__AIT17840__GPCmut7 (opt1)
aggagaaagcuuaccaugggccagaucgugaccuucuuccaggaggucccccacgugaucgaggaggugaugaacaucguccugaucgcccucagcauccuggccgugcugaaggggcucuacaacuucgcgaccugcggccugguggggcuggucacguuccuccugcugugcggccgcuccugcaccaucagccucuacaaggggguguacgagcugcagacccuggagcucaacauggagacccugaacaugacgaugccgcuguccugcaccaagaacaacagccaccacuacaucauggugggcaacgagaccggccucgagcugacccugacgaacaccuccaucaucaaccacaaguucugcaaccucagcgacgcccacaagaagaaccuguacgaccacgcccugauguccaucaucagcaccuuccaccucuccauccccaacuucaaccaguacgaggccaugagcugcgacuucaacgggggcaagaucuccguccaguacaaccugagccacuccuacgccggggacgcggccaaccacugcggcaccguggccaacggggugcugcagacguucaugcggauggccuggggcggcagcuacaucgcgcucgacuccgggcgcgaccggugggacugcaucaugaccagcuaccaguaccugaucauccagaacaccaccugggaggaccacugccaguucucccgccccagccccaucggcuaccuggggcuccugucccagcggacgcgcgacaucuacaucagccggcgccugcucggcaccuucaccuggacccugagcgacuccgagggcaaggacacgcccgggggcuacugccugacccgguggaugcucaucgaggccgagcugaagugcuucgggaacaccgccgucgccaagugcaacgagaagcacgacgaggaguucugcgacaugcugcgccucuucgacuucaacaagcaggccauccagcggcugaaggcgcccgcccagaugagcauccagcugaucaacaaggccgugaacgcccucaucaacgaccagcugaucaugaagaaccaccuccgcgacaucaugggcauccccuacugcaacuacuccaaguacugcuaccugaaccacaccacgaccgggaagaccagccugcccaagugcugccugguguccaacggcagcuaccucaacgagacccacuucuccgacgacaucgagcagcaggccgacaacaugaucacggagaugcugcagaaggaguacauggagcggcagggcaagaccccgcuggggcucgucgaccuguucguguucagcaccuccuucuaccugaucagcaucuuccugcaccucgugaagaucccgacccaccgccacaucgucggcaagcccugccccaagccccaccggcugaaccacauggggaucugcuccugcggccuguacaagcagccgggggugcccgugaaguggaagcgcugaggacuaguuauaagacugacuagcccgaugggccucccaacgggcccuccuccccuccuugcaccgagauuaauaaaaaaaaaaaaaaaaaaaaaaaaaaaaaaaaaaaaaaaaaaaaaaaaaaaaaaaaaaaaaaaaaaaaaaaaaaaaaaaaaaaaaaaaaaaaaaaaaaaa

SEQ ID NO: 33029 - RNA, 1665 nt, Artificial Sequence
  mRNA product Design i-3 (A100) comprising derived and/or modified sequence from LASV(Josiah;Clade IV)__NP_694870__GPCmut7 (opt1)
aggagaaagcuuaccaugggccagaucgugaccuucuuccaggaggucccccacgugaucgaggaggugaugaacaucguccugaucgcccucagcgugcuggccgugcugaaggggcucuacaacuucgcgaccugcggccuggucgggcuggugacguuccuccugcugugcggccgcuccugcaccaccagccucuacaaggggguguacgagcugcagacccuggagcucaacauggagacgcugaacaugaccaugccgcuguccugcaccaagaacaacagccaccacuacaucauggucggcaacgagaccggccucgagcugacgcugaccaacaccuccaucaucaaccacaaguucugcaaccucagcgacgcccacaagaagaaccuguacgaccacgcccugauguccaucaucagcaccuuccaccucuccauccccaacuucaaccaguacgaggccaugagcugcgacuucaacgggggcaagaucuccgugcaguacaaccugagccacuccuacgccggggacgcggccaaccacugcggcacgguggccaacgggguccugcagaccuucaugcggauggccuggggcggcagcuacaucgcgcucgacuccgggcgcggcaacugggacugcaucaugaccagcuaccaguaccugaucauccagaacaccacgugggaggaccacugccaguucucccggcccagccccaucggguaccugggccuccugucccagcgcacccgggacaucuacaucagccgccggcugcucggcaccuucaccuggacgcugagcgacuccgaggggaaggacaccccgggcggguacugccugacccgcuggaugcucaucgaggccgagcugaagugcuucggcaacaccgccguggccaagugcaacgagaagcacgacgaggaguucugcgacaugcugcggcuguucgacuucaacaagcaggccauccagcgccugaaggcgcccgcccagaugagcauccagcugaucaacaaggccgugaacgcccucaucaacgaccagcugaucaugaagaaccaccuccgggacaucauggggauccccuacugcaacuacuccaaguacugcuaccucaaccacacgaccaccggccgcaccagccugcccaagugcugccuggucuccaacggcagcuaccucaacgagacgcacuucuccgacgacaucgagcagcaggccgacaacaugaucaccgagaugcugcagaaggaguacauggagcggcaggggaagaccccgcugggccugguggaccucuucguguucagcaccuccuucuaccugaucagcaucuuccugcaccucgucaagauccccacgcaccgccacaucguggggaaguccugccccaagccccaccggcugaaccacaugggcaucugcagcugcgggcuguacaagcagccgggcgugcccgucaaguggaagcgcugaggacuaguuauaagacugacuagcccgaugggccucccaacgggcccuccuccccuccuugcaccgagauuaauaaaaaaaaaaaaaaaaaaaaaaaaaaaaaaaaaaaaaaaaaaaaaaaaaaaaaaaaaaaaaaaaaaaaaaaaaaaaaaaaaaaaaaaaaaaaaaaaaaaa

SEQ ID NO: 33030 - RNA, 1662 nt, Artificial Sequence
  mRNA product Design i-3 (A100) comprising derived and/or modified sequence from LASV(LP;Clade I)__AAF86701__GPCmut7 (opt1)
aggagaaagcuuaccaugggccagaucaucaccuucuuccaggaggugccccacgucaucgaggaggugaugaacaucgugcugaucgcccucagccugcuggccauccucaaggggcuguacaacaucgcgaccugcggcaucaucgggcuggucgccuuccucuuccugugcggcaaguccugcagccugacgcucaagggcggguacgagcugcagacccuggagcucaacauggagacccugaacaugaccaugccgcuguccugcacgaagaacagcucccaccacuacauccgcgugggcaacgagaccgggcucgagcugacccugaccaacacgagcaucaucaaccacaaguucugcaaccucuccgacgcccacaagaagaaccuguacgaccacgcccugaugagcaucaucuccaccuuccaccucagcauccccaacuucaaccaguacgaggccauguccugcgacuucaacggcgggaagaucagcgugcaguacaaccugucccacagcuacgcgggcgacgccgccgagcacugcgggaccgucgccaacggcgugcugcagaccuucaugcggauggcguggggcgggcgcuacaucgcccucgacuccggcaaggggaacugggacugcaucaugacgagcuaccaguaccugaucauccagaacaccaccugggaggaccacugccaguucucccggcccagccccaucggcuaccugggccuccugucccagcgcacccgggacaucuacaucagccgccggcugcucgggacguucaccuggacccugagcgacuccgagggcaacgagacccccgggggcuacugccugacgcgcuggaugcucaucgaggccgagcugaagugcuucgggaacaccgccguggccaagugcaacgagaagcacgacgaggaguucugcgacaugcugcggcuguucgacuucaacaagcaggcgauccgccggcugaaggccccggcccagaugagcauccagcugaucaacaaggccgucaacgcccucaucaacgaccagcugaucaugaagaaccaccuccgcgacaucaugggcauccccuacugcaacuacuccaaguacugcuaccucaaccacaccagcuccggccggaccagccugcccaagugcugccugaucuccaacgggagcuaccucaacgagacgcaguucuccgacgacaucgagcagcaggcggacaacaugaucaccgagaugcugcagaaggaguacaucgagcgccagggcaagaccccgcuggggcugguggacaucuucaucuucagcaccuccuucuaccucaucagcaucuuccugcaccugaucaagauccccacgcaccggcacaucgugggcaagcccugccccaagccgcaccgccucaaccacaugggggucugcuccugcggccuguacaagcaccccggcgugcccaccaaguggaagcggugaggacuaguuauaagacugacuagcccgaugggccucccaacgggcccuccuccccuccuugcaccgagauuaauaaaaaaaaaaaaaaaaaaaaaaaaaaaaaaaaaaaaaaaaaaaaaaaaaaaaaaaaaaaaaaaaaaaaaaaaaaaaaaaaaaaaaaaaaaaaaaaaaaaa

SEQ ID NO: 33031 - RNA, 1662 nt, Artificial Sequence
  mRNA product Design i-3 (A100) comprising derived and/or modified sequence from LASV(803213;Clade II)__AAF86703__GPCmut7 (opt1)
aggagaaagcuuaccaugggccagaucaucaccuucuuccaggaggugccccacgucaucgaggaggugaugaacaucgugcugaucgcccucagccugcuggccauccucaaggggaucuacaacgucgcgaccugcggccuguucgggcugaucuccuuccuccugcugugcggccgcagcugcuccgugacguacaaggggguguacgagcuccagacccuggagcugaacauggccaaccucaacaugaccaugccgcugagcugcaccaagaacaacucccaccacuacaucauggucggcaacgagacgggccuggagcucacccugaccaacaccagcaucaucaaccacaaguucugcaaccuguccgacgcccacaagaagaaccucuacgaccacgcccugaugagcaucaucuccacguuccaccugagcauccccaacuucaaccaguacgaggccauguccugcgacuucaacgggggcaagaucagcgugcaguacaaccucucccacagcuucgcgguggacgccgccaaccacugcgggaccaucgccaacggcguccugcagaccuucaugcggauggcguggggcggguccuacaucgcccuggacagcggcaaggggaacugggacugcaucaugaccuccuaccaguaccucaucauccagaacacgaccugggaggaccacugccaguucagccgccccucccccaucggcuaccuggggcugcucagccagcggacccgcgacaucuacaucagccggcgccugcugggcaccuucacguggacccucuccgacagcgagggcaacgaggcccccgggggcuacugccugacccgguggaugcugaucgaggccgagcucaagugcuucgggaacaccgccguggcgaagugcaacgagaagcacgacgaggaguucugcgacaugcugcgccuguucgacuucaacaagcaggccaucaagcggcucaagacgccggcccagauguccauccagcugaucaacaaggccgugaacgcccugaucaacgaccagcucaucaugaagaaccaccuccgcgacaucaugggcauccccuacugcaacuacagccgguacugcuaccugaaccacaccgucaccgggaagaccucccugccccgcugcugccuggugagcaacggcuccuaccugaacgagacgcacuucagcgacgacaucgagcagcaggcggacaacaugaucaccgagaugcuccagaaggaguacauggaccggcagggcaagaccccgcuggggcugguggaccuguucgucuucuccaccagcuucuaccucaucuccaucuuccugcaccuggugaagauccccacgcaccgccacaucgugggcaagcccugccccaagccgcaccggcucaaccacauggggaucugcagcugcggccuguacaagcaccccgggguccccgugaaguggaagcgcugaggacuaguuauaagacugacuagcccgaugggccucccaacgggcccuccuccccuccuugcaccgagauuaauaaaaaaaaaaaaaaaaaaaaaaaaaaaaaaaaaaaaaaaaaaaaaaaaaaaaaaaaaaaaaaaaaaaaaaaaaaaaaaaaaaaaaaaaaaaaaaaaaaaa

SEQ ID NO: 33032 - RNA, 1662 nt, Artificial Sequence
  mRNA product Design i-3 (A100) comprising derived and/or modified sequence from LASV(GA391;Clade III)__CAA36645__GPCmut7 (opt1)
aggagaaagcuuaccaugggccagaucgugaccuucuuccaggaggucccccacgugaucgaggaggugaugaacaucguccugaucgcccucagcauccuggccauccugaaggggcucuacaacguggcgaccugcggccugaucgggcuggugacguuccuccugcuguccggccgcagcugcucccucaucuacaaggggaccuacgagcugcagacccuggagcucaacauggagacccugaacaugacgaugccgcugagcugcaccaagaacaacucccaccacuacauccgggucggcaacgagaccggccucgagcugacccugacgaacaccagcauccucaaccacaaguucugcaaccuguccgacgcccacaagcgcaaccuguacgaccacagccucauguccaucaucagcaccuuccaccuguccauccccaacuucaaccaguacgaggccaugagcugcgacuucaacgggggcaagaucaccgugcaguacaaccugucccacagcuucgccguggacgccgcggggcacugcggcacgcucgccaacgggguccugcagaccuucaugcggauggccuggggcggcuccuacaucgcccuggacagcgggcgcggcaacugggacugcaucaugaccuccuaccaguaccucaucauccagaacaccacgugggacgaccacugccaguucagccggcccucccccaucggguaccugggccugcucagccagcgcacccgggacaucuacaucagccgccggcugcugggcaccuucaccuggacgcucuccgacagcgaggggaacgagaccccgggcggguacugccugacccgcuggaugcugaucgaggcggagcucaagugcuucggcaacaccgccguggccaagugcaacgagaagcacgacgaggaguucugcgacaugcugcggcuguucgacuucaacaagcaggccauccgccggcucaagacgcccgcccagauguccauccagcugaucaacaaggcggugaacgcccugaucaacgaccagcucaucaugaagaaccaccuccgcgacaucauggggauccccuacugcaacuacagccgguacugcuaccugaaccacaccuccaccggcaagaccagccugccccgcugcugccugaucuccaacggcagcuaccugaacgagacgaaguucuccgacgacaucgagcagcaggccgacaacaugaucaccgagaugcugcagaaggaguacaucgaccggcaggggaagaccccgcucggccuggucgaccuguucguguucagcaccuccuucuaccucaucagcaucuuccugcaccuggugaagauccccacgcaccgccacaucgucgggaagcccugccccaagccgcaccggcucaaccacaugggcaucugcuccugcgggcuguacaagcagcccggcgugcccgugcgcuggaagcggugaggacuaguuauaagacugacuagcccgaugggccucccaacgggcccuccuccccuccuugcaccgagauuaauaaaaaaaaaaaaaaaaaaaaaaaaaaaaaaaaaaaaaaaaaaaaaaaaaaaaaaaaaaaaaaaaaaaaaaaaaaaaaaaaaaaaaaaaaaaaaaaaaaaa

SEQ ID NO: 33033 - RNA, 1665 nt, Artificial Sequence
  mRNA product Design i-3 (A100) comprising derived and/or modified sequence from LASV(AV;Clade V)__CCA30314__GPCmut7 (opt1)
aggagaaagcuuaccaugggccagaucgugaccuucuuccaggaggucccccacgugaucgaggaggugaugaacaucguccugaucgcccucagcauccuggccgugcugaaggggcucuacaacaucgcgaccugcggccugaucgggcugaucacguuccuccugcugugcggccgcuccugcagcuccaaccucuacaaggggguguacgagcugcagagccuggaccucaacauggagacccugaacaugaccaugccgcuguccugcaccaagaacaacagccaccacuacauccgggucggcaacgacacgggccucgagcugacccugaccaacaccuccauccucaaccacaaguucugcaaccugagcgacgcccacaagaaggaccuguacgaccacgcccucauguccaucaucagcacguuccaccuguccauccccaacuucaaccaguacgaggccaugagcugcgacuucaacgggggcaagaucuccgugcaguacaaccugagccacuccuacgccaucgacgcggccaaccacugcgggaccguggccaacggcauccuccagaccuucaugcgcauggccuggggcgggagcuacaucgcgcuggacuccggccgggggaacugggacugcaucaugaccagcuaccaguaccugaucauccagaacacgaccugggagaaccacugccaguucucccgccccagccccaucggcuaccucgggcugcugagccagcggacccgcgacaucuacaucucccggcgccuccugggcaccuucacguggacccugagcgacuccgagggcaacgccacccccgggggcuacugccucacccgguggaugcugaucgaggccgagcugaagugcuucgggaacacggccgucgccaagugcaacgagaagcacgacgaggaguucugcgacaugcuccgccuguucgacuucaacaagcaggcgaucagccggcugaaguccccggcccagaugagcauccagcucaucaacaaggccgugaacgcccugaucaacgaccagcugaucaugaagaaccaccuccgcgacaucaugggcauccccuacugcaacuacuccaaguacugcuaccugaaccacaccaucaccgggaagaccagccugcccaagugcugccucguguccaacggcagcuaccugaacgagacgcacuucuccgacgacaucgagcagcaggccgacaacaugaucaccgagaugcugcagaaggaguacauggagcggcagggcaagaccccgcuggggcucgucgaccuguucguguucagcaccuccuucuaccugaucagcaucuuccuccgccuggugaagauccccacgcaccggcacaucgucggcaagcccugccccaagccgcaccgccugaaccacauggggaucugcuccugcggccucuacaagcagcccggggugcccgugcgguggaagcgcugaggacuaguuauaagacugacuagcccgaugggccucccaacgggcccuccuccccuccuugcaccgagauuaauaaaaaaaaaaaaaaaaaaaaaaaaaaaaaaaaaaaaaaaaaaaaaaaaaaaaaaaaaaaaaaaaaaaaaaaaaaaaaaaaaaaaaaaaaaaaaaaaaaaa

SEQ ID NO: 33034 - RNA, 1662 nt, Artificial Sequence
  mRNA product Design i-3 (A100) comprising derived and/or modified sequence from LASV(Togo/2016/7082;Clade VI)__AMR44577__GPCmut7 (opt1)
aggagaaagcuuaccaugggccagaucaucaccuucuuccaggaggugccccacgucaucgaggaggugaugaacaucgugcugaucgcccucagccugcuggccauccucaagggggucuacaacguggcgaccugcggcaucaucgggcuggugacguuccuguuccucugcggccgcuccugcagccugaucuacaagggguccuacgagcugcagacccucgagcugaacauggagacccugaacaugaccaugccgcucagcugcacgaagaacuccagccaccacuacauccgggucggcaacgagaccggccuggagcugacccucaccaacacguccaucaucaaccacaaguucugcaaccugagcgacgcccacaagcgcaaccuguacgaccacgcccucauguccauccugagcaccuuccaccuguccauccccaacuucaaccaguacgaggccaugagcugcgacuucaacgggggcaagaucuccgugcaguacaaccucagccacgccuacgcgguggacgccgccgagcacugcgggaccgucgccaacggcgugcugcagaccuucaugcggauggcguggggcggguccuacaucgcccuggacagcggccgcgggaacugggacugcaucaugacguccuaccaguaccucaucauccagaacaccaccugggaggaccacugccaguucagccggcccucccccaucggcuaccuggggcugcucagccagcgcacccgggacaucuacaucagccgccggcugcugggcacguucaccuggacccucuccgacagcgagggcaacgagacccccgggggcuacugccugacgcgcuggaugcugaucgaggccgagcucaagugcuucgggaacaccgccguggccaagugcaacgagaagcacgacgaggaguucugcgacaugcugcggcuguucgacuucaacaagcaggcgauccagcgccucaaguccccggcccagaugagcauccagcugaucaacaaggccgucaacgcccugaucaacgaccagcucaucaugaagaaccaccuccgggacaugaugggcauccccuacugcaacuacuccaaguacugcuaccugaaccacaccagcuccgggcgcaccagccugcccaagugcugccugguguccaacggcagcuaccugaacgagacgcacuucuccgacgacaucgagcagcaggccgacaacaugaucaccgagaugcuccagaaggaguacaucgaccggcagggcaagaccccgcuggggcugguggaccuguucgucuucagcaccuccuucuaccucaucagcaucuuccugcaccugaucaagauccccacgcaccgccacaucgugggcaagcccugccccaagccgcaccggcucaaccacauggggaucugcuccugcggccuguacaagcagcccggggugcccacccgcuggaagcggugaggacuaguuauaagacugacuagcccgaugggccucccaacgggcccuccuccccuccuugcaccgagauuaauaaaaaaaaaaaaaaaaaaaaaaaaaaaaaaaaaaaaaaaaaaaaaaaaaaaaaaaaaaaaaaaaaaaaaaaaaaaaaaaaaaaaaaaaaaaaaaaaaaaa

SEQ ID NO: 33035 - RNA, 1662 nt, Artificial Sequence
  mRNA product Design i-3 (A100) comprising derived and/or modified sequence from LASV(KAK-428;Clade n.d. (VII))__ANH09740__GPCmut7 (opt1)
aggagaaagcuuaccaugggccagaucgugaccuucuuccaggaggucccccacgugaucgaggaggugaugaacaucguccugaucgcccucagccugcuggccauccucaaggggcuguacaacuucgcgaccugcggcgugaucgggcugaucacguuccuccugcugugcggccgcuccugcagcgccaccuacaaggggcaguacgagcuccagacccuggagcugaacauggagucccucaacaugaccaugccgcugagcugcacgaagaacaacucccaccacuacauccgggccggcaacaacaccggccuggagcucacccugaccaacacgagcaucaucucccacaaguucugcaaccugagcgacgcccacaagaagaaccucuacgaccacacccugauguccaucaucaccaccuuccaccugagcauccccaacuucaaccaguacgaggccauguccugcgacuucaacgggggcaagaucagcauccaguacaaccucucccacagcuacgcgggggacgccgcccagcacugcggcacgguggccaacgggguccugcagaccuucaugcgcauggcguggggcggcuccuaccuggcccucgacagcgggcggcgcggcugggacugcaucaucuccagcuaccaguaccugaucauccagaacaccaccugggacgaccacugccaguucucccggcccagccccaucggguaccugggcuucgugagccagaagacgcgcgacaucuacaucucccggcgccuccugggcaccuucaccuggacccugagcgacuccgaggggcacgacaugccgggcggguacugccucacgcgguggaugcugaucgaggccgaccugaagugcuucggcaacaccgccguggccaagugcaacgagaagcacgacgaggaguucugcgacauguggcgccucuucgacuucaacaagcaggcgauccagcggcugaaggcccccgcccagaugaacauccagcugaucaacaaggccgucaacgcccucaucaacgaccagcugaugaugaagaaccaccuccgcgacaucauggggauccccuacugcaacuacagcaaguucugcuaccugaacaacaccaccacgggccggaccucccugccccgcugcugccugaucagcaacggcuccuaccucaacgagacccacuucagcgacgacaucgagcagcaggcggacaacaugaucaccgagaugcugcagaaggaguacauggaccggcaggggaagacgccgcugggccucguggaccuguucguguucuccaccagcuucuaccugaucaccaucuuccugcaccucgucaagauccccacccaccgccacaucguggggaagcccugccccaagccgcaccggcugaaccacaugggcaucugcuccugcgggcuguacaagcagcccggcgugcccguccgcuggaagcggugaggacuaguuauaagacugacuagcccgaugggccucccaacgggcccuccuccccuccuugcaccgagauuaauaaaaaaaaaaaaaaaaaaaaaaaaaaaaaaaaaaaaaaaaaaaaaaaaaaaaaaaaaaaaaaaaaaaaaaaaaaaaaaaaaaaaaaaaaaaaaaaaaaaa

SEQ ID NO: 33036 - RNA, 1662 nt, Artificial Sequence; identical to SEQ ID NO: 33030
  mRNA product Design i-3 (A100) comprising derived and/or modified sequence from LASV(Pinneo-NIG-1969;Clade I)__AIT17836__GPCmut7 (opt1)

SEQ ID NO: 33037 - RNA, 1662 nt, Artificial Sequence
  mRNA product Design i-3 (A100) comprising derived and/or modified sequence from LASV(ISTH0009-NIG-2011;Clade II)__AIT17404__GPCmut7 (opt1)
aggagaaagcuuaccaugggccagaucaucaccuucuuccaggaggugccccacgucaucgaggaggugaugaacaucgugcugaucgcccucagccugcuggccauccucaaggggaucuacaacgucgcgaccugcggccuguucgggcugguguccuuccuccugcugugcggccgcagcugcuccacgaccuacaaggggguguacgagcuccagacccuggagcuggacauggccagccucaacaugaccaugccgcuguccugcacgaagaacaacagccaccacuacaucauggucggcaacgagaccggccuggagcucacccugaccaacacguccaucaucaaccacaaguucugcaaccugagcgacgcccacaagaagaaccucuacgaccacgcccugauguccaucaucagcaccuuccaccuguccauccccaacuucaaccaguacgaggccaugagcugcgacuucaacgggggcaagaucuccgugcaguacaaccucagccacgcguacgccguggacgccgccaaccacugcgggaccaucgcgaacggcguccugcagaccuucaugcggauggccuggggcggguccuacaucgcccuggacagcggcaagggguccugggacugcaucaugacgagcuaccaguaccucaucauccagaacaccaccugggaggaccacugccaguucucccgccccagccccaucggcuaccuggggcugcucagccagcggacccgcgacaucuacaucucccggcgccugcugggcacguucaccuggacccucagcgacuccgagggcaacgagacccccgggggcuacugccugacgcgguggaugcugaucgaggccgagcucaagugcuucgggaacaccgccguggcgaagugcaacgagaagcacgacgaggaguucugcgacaugcugcgccuguucgacuucaacaagcaggccauccggcgccucaagaccccggcccagaugagcauccagcugaucaacaaggccgugaacgcccugaucaacgaccagcucaucaugaagaaccaccuccgggacaucaugggcauccccuacugcaacuacuccaaguacugcuaccugaaccacaccgucacggggaagaccagccugccccgcugcugccugguguccaacggcagcuaccugaacgagacccacuucuccgacgacaucgagcagcaggcggacaacaugaucaccgagcuccugcagaaggaguacauggaccggcagggcaagacgccgcuggggcugguggaccucuucgucuucagcaccuccuucuaccugaucagcaucuuccugcaccucaucaagauccccacccaccgccacaucaccggcaagcccugccccaagccgcaccggcugaaccacauggggaucugcuccugcggccuguacaagcaccccggggugcccgugaaguggaagcgcugaggacuaguuauaagacugacuagcccgaugggccucccaacgggcccuccuccccuccuugcaccgagauuaauaaaaaaaaaaaaaaaaaaaaaaaaaaaaaaaaaaaaaaaaaaaaaaaaaaaaaaaaaaaaaaaaaaaaaaaaaaaaaaaaaaaaaaaaaaaaaaaaaaaa

SEQ ID NO: 33038 - RNA, 1662 nt, Artificial Sequence
  mRNA product Design i-3 (A100) comprising derived and/or modified sequence from LASV(ISTH2010-NIG-2012;Clade II)__AIT17482__GPCmut7 (opt1)
aggagaaagcuuaccaugggccagaucaucaccuucuuccaggaggugccccacgucaucgaggaggugaugaacaucgugcugaucgcccucagccugcuggccauccucaaggggaucuacaacgucgcgaccugcggccuguucgggcugguguccuuccuccugcugugcggccgcagcugcuccacgaccuacaaggggguguacgagcuccagacccuggagcuggacauggccagccucaacaugaccaugccgcuguccugcacgaagaacaacagccaccacuacaucauggucggcaacgagaccggccuggagcucacccugaccaacacguccaucaucaaccacaaguucugcaaccugagcgacgcccacaagaagaaccucuacgaccacgcccugauguccaucaucagcaccuuccaccuguccauccccaacuucaaccaguacgaggccaugagcugcgacuucaacgggggcaagaucuccgugcaguacaaccucagccacgcguacgccguggacgccgccaaccacugcgggaccaucgcgaacggcguccugcagaccuucaugcggauggccuggggcggguccuacaucgcccuggacagcggcaagggguccugggacugcaucaugacgagcuaccaguaccucaucauccagaacaucaccugggaggaccacugccaguucucccgccccagccccaucggcuaccuggggcugcucagccagcggacccgcgacaucuacaucucccggcgccugcugggcaccuucacguggacccucagcgacuccgagggcaacgagacccccgggggcuacugccugacccgguggaugcugaucgaggccgagcucaagugcuucgggaacacggccguggcgaagugcaacgagaagcacgacgaggaguucugcgacaugcugcgccuguucgacuucaacaagcaggccauccggcgccucaagaccccggcccagaugagcauccagcugaucaacaaggccgugaacgcccugaucaacgaccagcucaucaugaagaaccaccuccgggacaucaugggcauccccuacugcaacuacuccaaguacugcuaccugaaccacaccgucaccgggaagacgagccugccccgcugcugccugguguccaacggcagcuaccugaacgagacccacuucuccgacgacaucgagcagcaggcggacaacaugaucaccgagcuccugcagaaggaguacaucgaccggcagggcaagaccccgcuggggcugguggaccucuucgucuucagcacguccuucuaccugaucagcaucuuccugcaccucgugaagauccccacccaccgccacguggucggcaagcccugccccaagccgcaccggcugaaccacauggggaucugcuccugcggccuguacaagcaccccggggugcccgugaaguggaagcgcugaggacuaguuauaagacugacuagcccgaugggccucccaacgggcccuccuccccuccuugcaccgagauuaauaaaaaaaaaaaaaaaaaaaaaaaaaaaaaaaaaaaaaaaaaaaaaaaaaaaaaaaaaaaaaaaaaaaaaaaaaaaaaaaaaaaaaaaaaaaaaaaaaaaa

SEQ ID NO: 33039 - RNA, 1662 nt, Artificial Sequence
  mRNA product Design i-3 (A100) comprising derived and/or modified sequence from LASV(Lassa virus/H.sapiens-wt/NGA/2015/ISTH_0543;Clade II)__AVO03639__GPCmut7 (opt1)
aggagaaagcuuaccaugggccagaucaucaccuucuuccaggaggugccccacgucaucgaggaggugaugaacaucgugcugaucgcccucagccugcuggccauccucaaggggaucuacaacgucgcgaccugcggccuguucgggcugguguccuuccuccugcugugcggccgcagcugcuccacgaccuacaaggggguguacgagcuccagacccuggagcuggacauggccaaccucaacaugaccaugccgcugagcugcacgaagaacaacucccaccacuacaucauggucggcaacgagaccggccuggagcucacccugaccaacacgagcaucaucaaccacaaguucugcaaccuguccgacgcccacaagaagaaccucuacgaccacgcccugaugagcaucaucuccaccuuccaccugagcauccccaacuucaaccaguacgaggccauguccugcgacuucaacgggggcaagaucagcgugcaguacaaccucucccacaccuacgcgguggacgccgccaaccacugcgggaccaucgccaacggcguccugcagacguucaugcggauggcguggggcgggagcuacaucgcccuggacuccggcaaggggagcugggacugcaucaugaccuccuaccaguaccucgugauccagaacaccaccugggaggaccacugccaguucagccgccccucccccaucggcuaccuggggcugcucagccagcggacgcgcgacaucuacaucagccggcgccugcugggcaccuucaccuggacccucuccgacagcgagggcaacgagacgcccgggggcuacugccugacccgguggaugcugaucgaggccgagcucaagugcuucgggaacaccgccguggccaagugcaacgagaagcacgacgaggaguucugcgacaugcugcgccuguucgacuucaacaagcaggcgauccggcgccucaagaccccggcccagauguccauccagcugaucaacaaggccgucaacgcccugaucaacgaccagcucaucaugaagaaccaccuccgggacaucaugggcauccccuacugcaacuacagcaaguacugcuaccugaaccacacggugaccgggaagaccucccugccccgcugcugccuggugagcaacggcuccuaccugaacgagacccacuucagcgacgacaucgagcagcaggccgacaacaugaucacggagcuccugcagaaggaguacaucgaccggcagggcaagaccccgcuggggcuggucgaccucuucguguucuccaccagcuucuaccugaucuccaucuuccugcaccucgugaagauccccacccaccgccacaucacgggcaagcccugccccaagccgcaccggcugaaccacauggggaucugcagcugcggccuguacaagcaccccgggguccccgugaaguggaagcgcugaggacuaguuauaagacugacuagcccgaugggccucccaacgggcccuccuccccuccuugcaccgagauuaauaaaaaaaaaaaaaaaaaaaaaaaaaaaaaaaaaaaaaaaaaaaaaaaaaaaaaaaaaaaaaaaaaaaaaaaaaaaaaaaaaaaaaaaaaaaaaaaaaaaa

SEQ ID NO: 33040 - RNA, 1662 nt, Artificial Sequence
  mRNA product Design i-3 (A100) comprising derived and/or modified sequence from LASV(Lassa virus/H.sapiens-wt/NGA/2016/ISTH_0009;Clade II)__AVO03571__GPCmut7 (opt1)
aggagaaagcuuaccaugggccagaucaucaccuucuuccaggaggugccccacgucaucgaggaggugaugaacaucgugcugaucgcccucagccugcuggccauccucaaggggaucuacaacgucgcgaccugcggccugcuggggcucguguccuuccugcugcucugcggccgcagcugcuccacgaccuacaaggggguguacgagcugcagacccuggagcucgacauggccagccugaacaugaccaugccgcuguccugcacgaagaacaacagccaccacuacaucauggucggcaacgagaccggccucgagcugacccugaccaacacguccaucaucaaccacaaguucugcaaccucagcgacgcccacaagaagaaccuguacgaccacgcccugauguccaucaucagcaccuuccaccucuccauccccaacuucaaccaguacgaggccaugagcugcgacuucaacgggggccggaucuccgugcaguacaaccugagccacuccuacgcgguggacgccgccaaccacugcgggaccaucgccaacggcguccugcagaccuucaugcgcauggcguggggcgggagcuacaucgcccucgacuccggcaaggggagcugggacugcaucaugacguccuaccaguaccugaucauccagaacaccaccugggaggaccacugccaguucagccggcccagccccaucggcuaccuggggcuccugucccagcgcacccgggacaucuacaucagccgccggcugcucggcacguucaccuggacccuguccgacagcgagggcaacgagacccccgggggcuacugccugacgcgcuggaugcucaucgaggccgagcugaagugcuucgggaacaccgccguggccaagugcaacgagaagcacgacgaggaguucugcgacaugcugcggcuguucgacuucaacaagcaggcgauccgccggcugaagaccccggcccagauguccauccagcugaucaacaaggccgugaacgcccucaucaacgaccagcugaucaugaagaaccaccuccgcgacaucaugggcauccccuacugcaacuacagcaaguacugcuaccucaaccacaccgucacggggaagaccucccugccccggugcugccuggugagcaacggcuccuaccucaacgagacccacuucagcgacgacaucgagcagcaggccgacaacaugaucaccgagcugcugcagaaggaguacaucgaccgccagggcaagacgccgcuggggcucguggaccuguucgucuucuccaccagcuucuaccugaucuccaucuuccuccaccuggugaagauccccacccaccggcacaucaccggcaagcccugccccaagccgcaccgccugaaccacauggggaucugcagcugcggccucuacaaccaccccggggugcccgucaaguggaagcggugaggacuaguuauaagacugacuagcccgaugggccucccaacgggcccuccuccccuccuugcaccgagauuaauaaaaaaaaaaaaaaaaaaaaaaaaaaaaaaaaaaaaaaaaaaaaaaaaaaaaaaaaaaaaaaaaaaaaaaaaaaaaaaaaaaaaaaaaaaaaaaaaaaaa

SEQ ID NO: 33041 - RNA, 1662 nt, Artificial Sequence
  mRNA product Design i-3 (A100) comprising derived and/or modified sequence from LASV(Lassa virus/H.sapiens-wt/NGA/2016/ISTH_0017;Clade II)__AVO03567__GPCmut7 (opt1)
aggagaaagcuuaccaugggccagaucaucaccuucuuccaggaggugccccacgucaucgaggaggugaugaacaucgugcugaucgcccucagccugcuggccauccucaaggggaucuacaacgucgcgaccugcggccuguucgggcugguguccuuccuccugcugugcggccgcagcugcuccacgaccuacaaggggguguacgagcuccagacccuggagcuggacauggccagccucaacaugaccaugccgcuguccugcacgaagaacaacagccaccacuacaucauggucggcaacgagaccggccuggagcucacccugaccaacacguccaucaucaaccacaaguucugcaaccugagcgacgcccacaagaagaaccucuacgaccacgcccugauguccaucaucagcaccuuccaccuguccauccccaacuucaaccaguacgaggccaugagcugcgacuucaacgggggcaagaucuccgugcaguacaaccucagccacaccuacgcgaucgacgccgccaaccacugcgggaccaucgccaacggcgugcugcagacguucaugcggauggcguggggcggguccuacaucgcccuggacagcggcaagggguccugggacugcaucaugaccagcuaccaguaccucaucauccagaacaccaccugggaggaccacugccaguucucccgccccagccccaucggcuaccuggggcugcucagccagcggacgcgcgacaucuacaucucccggcgccugcugggcaccuucaccuggacccucagcgacuccgagggcaacgagacgcccgggggcuacugccugacccgguggaugcugaucgaggccgagcucaagugcuucgggaacaccgccgucgccaagugcaacgagaagcacgacgaggaguucugcgacaugcugcgccuguucgacuucaacaagcaggcgauccggcgccucaagaccccggcccagaugagcauccagcugaucaacaaggccgugaacgcccugaucaacgaccagcucaucaugaagaaccaccuccgggacaucaugggcauccccuacugcaacuacuccaaguacugcuaccugaaccacacggugaccgggaagaccagccugccccgcugcugccuggucuccaacggcagcuaccugaacgagacccacuucuccgacgacaucgagcagcaggccgacaacaugaucacggagcuccugcagaaggaguacauggaccggcagggcaagaccccgcuggggcugguggaccucuucguguucagcaccuccuucuaccugaucagcaucuuccugcaccucguccgcauccccacccaccggcacgugaucggcaagcccugccccaagccgcaccgccugaaccacauggggaucugcuccugcggccuguacaagcaccccggggugcccgucaaguggaagcggugaggacuaguuauaagacugacuagcccgaugggccucccaacgggcccuccuccccuccuugcaccgagauuaauaaaaaaaaaaaaaaaaaaaaaaaaaaaaaaaaaaaaaaaaaaaaaaaaaaaaaaaaaaaaaaaaaaaaaaaaaaaaaaaaaaaaaaaaaaaaaaaaaaaa

SEQ ID NO: 33042 - RNA, 1662 nt, Artificial Sequence
  mRNA product Design i-3 (A100) comprising derived and/or modified sequence from LASV(Lassa virus/H.sapiens-wt/NGA/2018/ISTH_0959;Clade II)__AVV65099__GPCmut7 (opt1)
aggagaaagcuuaccaugggccagaucaucaccuucuuccaggaggugccccacgucaucgaggaggugaugaacaucgugcugaucgcccucagccugcuggccauccucaaggggaucuacaacgucgugaccugcggccuguucgggcugguguccuuccuccugcugugcggccgcagcugcuccacgaccuacaagggggucuacgagcuccagacccuggagcuggacauggcgagccucaacaugaccaugccgcuguccugcacgaagaacaacagccaccacuacaucauggugggcaacgagaccggccuggagcucacccugaccaacacguccaucaucaaccacaaguucugcaaccugagcgacgcccacaagaagaaccucuacgaccacgcccugauguccaucaucagcaccuuccaccuguccauccccaacuucaaccaguacgaggccaugagcugcgacuucaacgggggcaagaucuccgugcaguacaaccucagccacgccuacgcgaucgacgccgccaaccacugcgggaccaucgccaacggcguccugcagaccuucaugcggauggcguggggcggguccuacaucgcccuggacagcggcaagggguccugggacugcaucaugacgagcuaccaguaccucaucauccagaacaccaccugggaggaccacugccaguucucccgccccagccccaucggcuaccuggggcugcucagccagcggacccgcgacaucuacaucucccggcgccugcugggcacguucaccuggacccucagcgacuccgagggcaacgagacccccgggggcuacugccugacgcgguggaugcugaucgaggccgagcucaagugcuucgggaacaccgccguggccaagugcaacgagaagcacgacgaggaguucugcgacaugcugcgccuguucgacuucaacaagcaggcgauccggcgccucaagaccccggcccagaugagcauccagcugaucaacaaggccgugaacgcccugaucaacgaccagcucaucaugaagaaccaccuccgggacaucaugggcauccccuacugcaacuacuccaaguacugcuaccugaaccacaccgucacggggaagaccagccugccccgcugcugccugguguccaacggcagcuaccugaacgagacccacuucuccgacgacaucgagcagcaggccgacaacaugaucaccgagcuccugcagaaggaguacaucgaccggcagggcaagacgccgcuggggcugguggaccucuucgucuucagcaccuccuucuaccugaucagcaucuuccugcaccucgugaagauccccacccaccgccacgugaucggcaagcccugccccaagccgcaccggcugaaccacauggggaucugcuccugcggccuguacaagcaccccgggguccccgugaaguggaagcgcugaggacuaguuauaagacugacuagcccgaugggccucccaacgggcccuccuccccuccuugcaccgagauuaauaaaaaaaaaaaaaaaaaaaaaaaaaaaaaaaaaaaaaaaaaaaaaaaaaaaaaaaaaaaaaaaaaaaaaaaaaaaaaaaaaaaaaaaaaaaaaaaaaaaa

SEQ ID NO: 33043 - RNA, 1662 nt, Artificial Sequence
  mRNA product Design i-3 (A100) comprising derived and/or modified sequence from LASV(LASV003-NIG-2008;Clade II)__AIT17580__GPCmut7 (opt1)
aggagaaagcuuaccaugggccagaucaucaccuucuuccaggaggugccccacgucaucgaggaggugaugaacaucgugcugaucgcccucagccugcuggccauccucaaggggaucuacaacgucgcgaccugcggccuguucgggcugguguccuuccuccugcugugcggccgcagcugcuccacgaccuacaaggggguguacgagcuccagacccuggagcuggacauggccagccucaacaugaccaugccgcuguccugcacgaagaacaacagccaccacuacaucauggucggcaacgagaccggccuggagcucacccugaccaacacguccaucaucaaccacaaguucugcaaccugagcgacgcccacaagaagaaccucuacgaccacgcccugauguccaucaucagcaccuuccaccuguccauccccaacuucaaccaguacgaggccaugagcugcgacuucaacgggggcaagaucuccgugcaguacaaccucagccacaccuacgcgguggacgccgccaaccacugcgggaccaucgccaacggcguccugcagacguucaugcggauggcguggggcggguccuacaucgcccuggacagcggcaagggguccugggacugcaucaugaccagcuaccaguaccucaucauccagaacaccaccugggaggaccacugccaguucucccgccccagccccaucggcuaccuggggcugcucagccagcggacgcgcgacaucuacaucucccggcgccugcugggcaccuucaccuggacccucagcgacuccgagagcaacgagacgccgggcggguacugccugacccgguggaugcugaucgaggccgagcucaagugcuucggcaacaccgccguggccaagugcaacgagaagcacgacgaggaguucugcgacaugcugcgccuguucgacuucaacaagcaggcgauccggcgccucaaggcccccgcccagauguccauccagcugaucaacaaggccgugaacgcccugaucaacgaccagcucaucaugaagaaccaccuccgggacaucauggggauccccuacugcaacuacagcaaguacugcuaccugaaccacaccgucacgggccgcaccucccugccccggugcugccuggugagcaacggguccuaccugaacgagacccacuucagcgacgacaucgagcagcaggcggacaacaugaucaccgagcuccugcagaaggaguacauggaccgccagggcaagacgccgcugggccugguggaccucuucgucuucuccaccagcuucuaccugaucuccaucuuccugcaccucgugaagauccccacccaccggcacgugaucgggaagcccugccccaagccgcaccgccugaaccacaugggcaucugcagcugcgggcuguacaagcaccccggcguccccgugaaguggaagcggugaggacuaguuauaagacugacuagcccgaugggccucccaacgggcccuccuccccuccuugcaccgagauuaauaaaaaaaaaaaaaaaaaaaaaaaaaaaaaaaaaaaaaaaaaaaaaaaaaaaaaaaaaaaaaaaaaaaaaaaaaaaaaaaaaaaaaaaaaaaaaaaaaaaa

SEQ ID NO: 33044 - RNA, 1662 nt, Artificial Sequence
  mRNA product Design i-3 (A100) comprising derived and/or modified sequence from LASV(LASV035-NIG-2009;Clade II)__AIT17588__GPCmut7 (opt1)
aggagaaagcuuaccaugggccagaucaucaccuucuuccaggaggugccccacgucaucgaggaggugaugaacaucgugcugaucgcccucagccugcuggccauccucaaggggaucuacaacgucgcgaccugcggccuguucgggcugguguccuuccuccugcugugcggccgcagcugcuccacgaccuacaaggggguguacgagcuccagacccuggagcuggacauggccagccucaacaugaccaugccgcuguccugcacgaagaacaacagccaccacuacaucauggucggcaacgagaccggccuggagcucacccugaccaacacguccaucaucaaccacaaguucugcaaccugagcgacgcccacaagaagaaccucuacgaccacgcccugauguccaucaucagcaccuuccaccuguccauccccaacuucaaccaguacgaggccaugagcugcgacuucaacgggggcaagaucuccgugcaguacaaccucagccacgcguacgccguggacgccgccaaccacugcgggaccaucgcgaacggcguccugcagaccuucaugcggauggccuggggcggguccuacaucgcccuggacagcggcaagggguccugggacugcaucaugacgagcuaccaguaccucaucauccagaacaccaccugggaggaccacugccaguucucccgccccagccccaucggcuaccuggggcugcucagccagcggacccgcgacaucuacaucucccggcgccugcugggcacguucaccuggacccucagcgacuccgagggcaacgagacccccgggggcuacugccugacgcgguggaugcugaucgaggccgagcucaagugcuucgggaacaccgccguggcgaagugcaacgagaagcacgacgaggaguucugcgacaugcugcgccuguucgacuucaacaagcaggccauccggcgccucaaggccccggcccagaugagcauccagcugaucaacaaggccgugaacgcgcugaucaacgaccagcucaucaugaagaaccaccuccgggacaucaugggcauccccuacugcaacuacuccaaguacugcuaccugaaccacaccgucaccgggaagacgagccugccccgcugcugccugguguccaacggcagcuaccugaacgagacccacuucuccgacgacaucgagcagcaggccgacaacaugaucaccgagcuccugcagaaggaguacaucgaccggcagggcaagaccccgcuggggcugguggaccucuucgucuucagcacguccuucuaccugaucagcaucuuccugcaccucgugaagauccccacccaccgccacgugaucggcaagcccugccccaagccgcaccggcugaaccacauggggaucugcuccugcggccuguacaagcaccccgggguccccgugaaguggaagcgcugaggacuaguuauaagacugacuagcccgaugggccucccaacgggcccuccuccccuccuugcaccgagauuaauaaaaaaaaaaaaaaaaaaaaaaaaaaaaaaaaaaaaaaaaaaaaaaaaaaaaaaaaaaaaaaaaaaaaaaaaaaaaaaaaaaaaaaaaaaaaaaaaaaaa

SEQ ID NO: 33045 - RNA, 1662 nt, Artificial Sequence
  mRNA product Design i-3 (A100) comprising derived and/or modified sequence from LASV(LASV1000-NIG-2009;Clade II)__AIT17782__GPCmut7 (opt1)
aggagaaagcuuaccaugggccagaucaucaccuucuuccaggaggugccccacgucaucgaggaggugaugaacaucgugcugaucgcccucagccugcuggccauccucaaggggaucuacaacgucgcgaccugcggccuguucgggcugguguccuuccuccugcugugcggccgcagcugcuccacgaccuacaaggggguguacgagcuccagacccuggagcuggacauggccagccucaacaugaccaugccgcuguccugcacgaagaacaacagccaccacuacaucauggucggcaacgagaccggccuggagcucacccugaccaacacguccaucaucaaccacaaguucugcaaccugagcgacgcccacaagaagaaccucuacgaccacgcccugauguccaucaucagcaccuuccaccuguccauccccaacuucaaccaguacgaggccaugagcugcgacuucaacgggggcaagaucuccgugcaguacaaccucagccacaccuacgcgguggacgccgccaaccacugcgggaccaucgccaacggcguccugcagacguucaugcggauggcguggggcggguccuacaucgcccuggacagcggcaagggguccugggacugcaucaugaccagcuaccaguaccucaucauccagaacaccaccugggaggaccacugccaguucucccgccccagccccaucggcuaccuggggcugcucagccagcggacgcgcgacaucuacaucucccggcgccugcugggcaccuucaccuggacccucagcgacuccgagggcaacgagacgcccgggggcuacugccugacccgguggaugcugaucgaggccgagcucaagugcuucgggaacaccgccguggccaagugcaacgagaagcacgacgaggaguucugcgacaugcugcgccuguucgacuucaacaagcaggcgaucaagcggcucaagaccccggcccagaugagcauccagcugaucaacaaggccgugaacgcccugaucaacgaccagcucaucaugaagaaccaccuccgcgacaucaugggcauccccuacugcaacuacuccaaguacugcuaccugaaccacacggucaccgggaagaccagccugccccggugcugccugguguccaacggcagcuaccugaacgagacccacuucuccgacgacaucgagcagcaggccgacaacaugaucacggagcuccugcagaaggaguacaucgaccgccagggcaagaccccgcuggggcugguggaccucuucgucuucagcaccuccuucuaccugaucagcaucuuccugcaccucgugaagauccccacccaccggcacguggucggcaagcccugccccaagccgcaccgccugaaccacauggggaucugcuccugcggccuguacaagcaccccggggugcccgugaaguggaagcggugaggacuaguuauaagacugacuagcccgaugggccucccaacgggcccuccuccccuccuugcaccgagauuaauaaaaaaaaaaaaaaaaaaaaaaaaaaaaaaaaaaaaaaaaaaaaaaaaaaaaaaaaaaaaaaaaaaaaaaaaaaaaaaaaaaaaaaaaaaaaaaaaaaaa

SEQ ID NO: 33046 - RNA, 1662 nt, Artificial Sequence
  mRNA product Design i-3 (A100) comprising derived and/or modified sequence from LASV(LASV221-NIG-2010;Clade II)__AIT17624__GPCmut7 (opt1)
aggagaaagcuuaccaugggccagaucaucaccuucuuccaggaggugccccacgucaucgaggaggugaugaacaucgugcugaucgcccucagccugcuggccauccucaaggggaucuacaacgucgcgaccugcggccuguucgggcugguguccuuccuccugcugugcggccgcagcugcuccacgaccuacaaggggguguacgagcuccagacccuggagcuggacauggccagccucaacaugaccaugccgcuguccugcacgaagaacaacagccaccacuacaucauggucggcaacgagaccggccuggagcucacccugaccaacacguccaucaucaaccacaaguucugcaaccugagcgacgcccacaagaagaaccucuacgaccacgcccugauguccaucaucagcaccuuccaccuguccauccccaacuucaaccaguacgaggccaugagcugcgacuucaacgggggcaagaucuccgugcaguacaaccucagccacaccuacgcgaucgacgccgccaaccacugcgggaccaucgccaacggcgugcugcagacguucaugcggauggcguggggcggguccuacaucgcccuggacagcggcaagggguccugggacugcaucaugaccagcuaccaguaccucaucauccagaacaccaccugggaggaccacugccaguucucccgccccagccccaucggcuaccuggggcugcucagccagcggacgcgcgacaucuacaucucccggcgccugcugggcaccuucaccuggacccucagcgacuccgagggcaacgagacgcccgggggcuacugccugacccgguggaugcugaucgaggccgagcucaagugcuucgggaacaccgccgucgccaagugcaacgagaagcacgacgaggaguucugcgacaugcugcgccuguucgacuucaacaagcaggcgauccggcgccucaagaccccggcccagaugagcauccagcugaucaacaaggccgugaacgcccugaucaacgaccagcucaucaugaagaaccaccuccgggacaucaugggcauccccuacugcaacuacuccaaguacugcuaccugaaccacacggugaccgggaagaccagccugccccgcugcugccuggucuccaacggcagcuaccugaacgagacccacuucuccgacgacaucgagcagcaggccgacaacaugaucacggagaugcuccagaaggaguacauggaccggcagggcaagaccccgcuggggcugguggaccuguucguguucagcaccuccuucuaccucaucagcaucuuccugcaccuggucaagauccccacccaccgccacgugaucggcaagcccugccccaagccgcaccggcucaaccacauggggaucugcuccugcggccuguacaagcaccccggggugcccgucaaguggaagcgcugaggacuaguuauaagacugacuagcccgaugggccucccaacgggcccuccuccccuccuugcaccgagauuaauaaaaaaaaaaaaaaaaaaaaaaaaaaaaaaaaaaaaaaaaaaaaaaaaaaaaaaaaaaaaaaaaaaaaaaaaaaaaaaaaaaaaaaaaaaaaaaaaaaaa

SEQ ID NO: 33047 - RNA, 1662 nt, Artificial Sequence
  mRNA product Design i-3 (A100) comprising derived and/or modified sequence from LASV(LASV237-NIG-2010;Clade II)__AIT17638__GPCmut7 (opt1)
aggagaaagcuuaccaugggccagaucaucaccuucuuccaggaggugccccacgucaucgaggaggugaugaacaucgugcugaucgcccucagccugcuggccauccucaaggggaucuacaacgucgcgaccugcggccuguucgggcugguguccuuccuccugcugugcggccgcagcugcuccacgaccuacaaggggguguacgagcuccagacccuggagcuggacauggccagccucaacaugaccaugccgcuguccugcacgaagaacaacagccaccacuacaucauggucggcaacgagaccggccuggagcucacccugaccaacacguccaucaucaaccacaaguucugcaaccugagcgacgcccacaagaaggaccucuacgaccacgcccugauguccaucaucagcaccuuccaccuguccauccccaacuucaaccaguacgaggccaugagcugcgacuucaacgggggcaagaucuccgugcaguacaaccucagccacaccuacgcgguggacgccgccaaccacugcgggaccaucgccaacggcguccugcagacguucaugcggauggcguggggcggguccuacaucgcccuggacagcggcaagggguccugggacugcaucaugaccagcuaccaguaccucaucauccagaacaccaccugggaggaccacugccaguucucccgccccagccccaucggcuaccuggggcugcucagccagcggacgcgcgacaucuacaucucccggcgccugcugggcaccuucaccuggacccucagcgacuccgagggcaacgagacgcccgggggcuacugccugacccgguggaugcugaucgaggccgagcucaagugcuucgggaacaccgccguggccaagugcaacgagaagcacgacgaggaguucugcgacaugcugcgccuguucgacuucaacaagcaggcgauccggcgccucaagaccccggcccagaugagcauccagcugaucaacaaggccgugaacgcccugaucaacgaccagcucaucaugaagaaccaccuccgggacaucaugggcauccccuacugcaacuacuccaaguacugcuaccugaaccacacggucaccgggaagaccagccugccccgcugcugccugguguccaacggcagcuaccugaacgagacccacuucuccgacgacaucgagcagcaggccgacaacaugaucacggagcuccugcagaaggaguacauggaccggcagggcaagaccccgcuggggcugguggaccucuucgucuucagcaccuccuucuaccugaucagcaucuuccugcaccucaucaagauccccacccaccgccacaucacgggcaagcccugccccaagccgcaccggcugaaccacauggggaucugcuccugcggccuguacaagcaccccggggugcccgugaaguggaagcgcugaggacuaguuauaagacugacuagcccgaugggccucccaacgggcccuccuccccuccuugcaccgagauuaauaaaaaaaaaaaaaaaaaaaaaaaaaaaaaaaaaaaaaaaaaaaaaaaaaaaaaaaaaaaaaaaaaaaaaaaaaaaaaaaaaaaaaaaaaaaaaaaaaaaa

SEQ ID NO: 33048 - RNA, 1662 nt, Artificial Sequence
  mRNA product Design i-3 (A100) comprising derived and/or modified sequence from LASV(LASV253-NIG-2011;Clade II)__AIT17670__GPCmut7 (opt1)
aggagaaagcuuaccaugggccagaucaucaccuucuuccaggaggugccccacgucaucgaggaggugaugaacaucgugcugaucgcccucagccugcuggccauccucaaggggaucuacaacgucgcgaccugcggccuguucgggcugguguccuuccuccugcugugcggccgcagcugcuccacgaccuacaaggggguguacgagcuccagacccuggagcuggacauggccagccucaacaugaccaugccgcuguccugcacgaagaacaacagccaccacuacaucauggucggcaacgagaccggccuggagcucacccugaccaacacguccaucaucaaccacaaguucugcaaccugagcgacgcccacaagaagaaccucuacgaccacgcccugauguccaucaucagcaccuuccaccuguccauccccaacuucaaccaguacgaggccaugagcugcgacuucaacgggggcaagaucuccgugcaguacaaccucagccacaccuacgcgguggacgccgccaaccacugcgggaccaucgccaacggcguccugcagacguucaugcggauggcguggggcggguccuacaucgcccuggacagcggcaagggguccugggacugcaucaugaccagcuaccaguaccucaucauccagaacaccaccugggaggaccacugccaguucucccgccccagccccaucggcuaccuggggcugcucagccagcggacgcgcgacaucuacaucucccggcgccugcugggcaccuucaccuggacccucagcgacuccgagggcaacgagacgcccgggggcuacugccugacccgguggaugcugaucgaggccgagcucaagugcuucgggaacaccgccguggccaagugcaacgagaagcacgacgaggaguucugcgacaugcugcgccuguucgacuucaacaagcaggcgauccggcgccucaaggccccggcccagaugagcauccagcugaucaacaaggccgugaacgcccugaucaacgaccagcucaucaugaagaaccaccuccgggacaucaugggcauccccuacugcaacuacuccaaguacugcuaccugaaccacaccgucacggggcgcaccagccugccccggugcugccugguguccaacggcagcuaccugaacgagacccacuucuccgacgacaucgagcagcaggcggacaacaugaucaccgagcuccugcagaaggaguacaucgaccgccagggcaagacgccgcuggggcugguggaccucuucgucuucagcaccuccuucuaccugaucagcaucuuccugcaccucgugaagauccccacccaccggcacaucaucggcaagcccugccccaagccgcaccgccugaaccacauggggaucugcuccugcggccuguacaagcaccccggggugcccgucaaguggaagcggugaggacuaguuauaagacugacuagcccgaugggccucccaacgggcccuccuccccuccuugcaccgagauuaauaaaaaaaaaaaaaaaaaaaaaaaaaaaaaaaaaaaaaaaaaaaaaaaaaaaaaaaaaaaaaaaaaaaaaaaaaaaaaaaaaaaaaaaaaaaaaaaaaaaa

SEQ ID NO: 33049 - RNA, 1662 nt, Artificial Sequence
  mRNA product Design i-3 (A100) comprising derived and/or modified sequence from LASV(LASV254-NIG-2011;Clade II)__AIT17674__GPCmut7 (opt1)
aggagaaagcuuaccaugggccagaucaucaccuucuuccaggaggugccccacgucaucgaggaggugaugaacaucgugcugaucgcccucagccugcuggccauccucaaggggaucuacaacgucgcgaccugcggccuguucgggcugguguccuuccuccugcugugcggccgcagcugcuccacgaccuacaaggggguguacgagcuccagacccuggagcuggacaugaccaaccucaacaugacgaugccgcugagcugcaccaagaacaacucccaccacuacaucauggucggcaacgagaccggccuggagcucacccugacgaacaccagcaucaucaaccacaaguucugcaaccuguccgacgcccacaagaagaaccucuacaaccacgcccugaugagcaucaucuccaccuuccaccugagcauccccaacuucaaccaguacgaggccauguccugcgacuucaacgggggcaagaucagcgugcaguacaaccucucccacagcuacgccguggacgcggccaaccacugcgggaccaucgccaacggcguccugcagacguucaugcggauggccuggggcggguccuacaucgcgcuggacagcggcaaggggaacugggacugcaucaugaccuccuaccaguaccucaucauccagaacaccaccugggaggaccacugccaguucagccgccccucccccaucggcuaccuggggcugcucagccagcggacgcgcgacaucuacaucagccggcgccugcugggcaccuucaccuggacccucuccgacagcgagggcaacgagacgcccgggggcuacugccugacccgguggaugcugaucgaggccgagcucaagugcuucgggaacaccgccguggccaagugcaacgagaagcacgacgaggaguucugcgacaugcugcgccuguucgacuucaacaagcaggccauccggcgccucaagaccccggcgcaggccaacauccagcugaucaacaaggccgugaacgcccugaucaacgaccagcucaucaugaagaaccaccuccgggacaucaugggcauccccuacugcaacuacuccaaguacugcuaccugaaccacacggucaccgggaagaccagccugccccgcugcugccugguguccaacggcagcuaccugaacgagacccacuucuccgacgacaucgagcagcaggccgacaacaugaucacggagcuccugcagaaggaguacauggaccggcagggcaagaccccgcuggggcugguggaccucuucgucuucagcaccuccuucuaccugaucagcaucuuccugcaccucgugaagauccccacccaccgccacgugaucggcaagcccugccccaagccgcaccggcugaaccacauggggaucugcuccugcggccuguacaagcaccccgggguccccgugaaguggaagcgcugaggacuaguuauaagacugacuagcccgaugggccucccaacgggcccuccuccccuccuugcaccgagauuaauaaaaaaaaaaaaaaaaaaaaaaaaaaaaaaaaaaaaaaaaaaaaaaaaaaaaaaaaaaaaaaaaaaaaaaaaaaaaaaaaaaaaaaaaaaaaaaaaaaaa

SEQ ID NO: 33050 - RNA, 1662 nt, Artificial Sequence
  mRNA product Design i-3 (A100) comprising derived and/or modified sequence from LASV(Nig08-A19;Clade III)__ADU56618__GPCmut7 (opt1)
aggagaaagcuuaccaugggccagaucgugaccuucuuccaggaggucccccacgugaucgaggaggugaugaacaucguccugaucgcccucagcauccuggccauccugaaggggcucuacaacaucgcgaccugcggccugaucgggcuggugacguuccuccugcuguccggccgcagcugcuccaugaccuacaaggggguguacgagcuccagacccuggagcugaacaugaacacccucaacaugacgaugccgcugagcugcaccaagaacaacucccaccacuacaucauggucggcaacgagaccggccuggagcucacccugacgaacaccagccugcuccaccacaaguucugcaaccuguccgacgcccacaagaagaaccuguacgaccacacccucaugagcaucaucuccaccuuccaccugagcauccccaacuucaaccaguacgaggccauguccugcgacuucaacgggggcaagaucacggugcaguacaaccugagccacuccuacgccaucgacgccgcgaaccacugcgggaccguggccaacggcguccuccagaccuucaugcggauggccuggggcgggagcuacaucgcccuggacuccggccgcgggaagugggacugcaucaugaccagcuaccaguaccugaucauccagaacacgaccugggaggaccacugccaguucucccggcccagccccaucggcuaccucgggcugcugucccagcgcacccgggacaucuacaucagccgccggcuccugggcaccuucacguggacccugagcgacuccgagggcaacgagacccccgggggcuacugccucacccgcuggaugcugaucgaggcggagcugaagugcuucgggaacacggccguggccaagugcaacgagaagcacgacgaggaguucugcgacaugcuccggcuguucgacuucaacaagcaggccauccgccggcugaaggccccggcgcagaugagcauccagcucaucaacaaggccgugaacgcccugaucaacgaccagcugaucaugaagaaccaccuccgcgacaucaugggcauccccuacugcaacuacuccaaguacugcuaccugaaccacaccagcaccgggcggaccucccugccccgcugcugccucgucagcaacggcuccuaccugaacgagacgcacuucagcgacgacaucgagcagcaggccgacaacaugaucaccgagaugcugcagaaggaguaccuggaccggcagggcaagaccccgcucgggcugguggaccuguucguguucuccaccagcuucuaccucaucuccaucuuccugcaccuggucaagauccccacgcaccgccacaucgugggcaagcccugccccaagccgcaccggcucaaccacauggggaucugcagcugcggccuguacaagcagcccggggugcccguccgcuggaagcggugaggacuaguuauaagacugacuagcccgaugggccucccaacgggcccuccuccccuccuugcaccgagauuaauaaaaaaaaaaaaaaaaaaaaaaaaaaaaaaaaaaaaaaaaaaaaaaaaaaaaaaaaaaaaaaaaaaaaaaaaaaaaaaaaaaaaaaaaaaaaaaaaaaaa

SEQ ID NO: 33051 - RNA, 1665 nt, Artificial Sequence
  mRNA product Design i-3 (A100) comprising derived and/or modified sequence from LASV(G1180-SLE-2010;Clade IV)__AIT17168__GPCmut7 (opt1)
aggagaaagcuuaccaugggccagaucgugaccuucuuccaggaggucccccacgugaucgaggaggugaugaacaucguccugaucgcccucagcauccuggccgugcugaaggggcucuacaacuucgcgaccugcggccugguggggcugcucacguuccugcugcucugcggccgcuccugcaccgccagccgguacaagggggucuacgagcugcagacccuggagcucaacauggagacccugaacaugacgaugccgcuguccugcaccaagaacaacagccaccacuacaucauggugggcaacgagaccggccucgagcugacccugacgaacaccuccaucaucaaccacaaguucugcaaccucagcgacgcccacaagaagaaccuguacgaccacgcccugauguccaucaucagcaccuuccaccucuccauccccaacuucaaccaguacgaggccaugagcugcgacuucaacgggggcaagaucuccgugcaguacaaccugagccacuccuacgcgggggacgccgccaaccacugcggcaccgucgccaacggggugcugcagacguucaugcgcauggcguggggcggcagcuacaucgcccucgacuccgggcacggcagcugggacugcaucaugaccuccuaccaguaccugaucauccagaacaccaccugggaggaccacugccaguucagccggcccucccccaucggguaccugggccuccugagccagcgcacgcgggacaucuacaucagccgccggcugcucggcaccuucaccuggacccuguccgacagcgaggggaaggacacgccgggcggguacugccugacccgcuggaugcucaucgaggccgagcugaagugcuucggcaacaccgccguggccaagugcaacgagaagcacgacgaggaguucugcgacaugcugcggcuguucgacuucaacaagcaggcgauccagcgccugaaggcccccgcccagauguccauccagcugaucaacaaggccgucaacgcccucaucaacgaccagcugaucaugaagaaccaccuccgggacaucauggggauccccuacugcaacuacagcaaguacugcuaccucaaccacaccacgaccggcaagaccucccugcccaagugcugccuggugagcaacggcuccuaccucaacgagacccacuucagcgacgacaucgagcagcaggcggacaacaugaucacggagaugcugcagaaggaguacauggagcgccaggggaagaccccgcugggccugguggaccucuucgucuucuccaccagcuucuaccugaucuccaucuuccugcaccucgugaagauccccacccaccggcacaucgugggcaagagcugccccaagccccaccgccugaaccacauggggaucugcuccugcgggcuguacaagcagccgggcguccccgugaaguggaagcggugaggacuaguuauaagacugacuagcccgaugggccucccaacgggcccuccuccccuccuugcaccgagauuaauaaaaaaaaaaaaaaaaaaaaaaaaaaaaaaaaaaaaaaaaaaaaaaaaaaaaaaaaaaaaaaaaaaaaaaaaaaaaaaaaaaaaaaaaaaaaaaaaaaaa

SEQ ID NO: 33052 - RNA, 1665 nt, Artificial Sequence
  mRNA product Design i-3 (A100) comprising derived and/or modified sequence from LASV(G1442-SLE-2011;Clade IV)__AIT17180__GPCmut7 (opt1)
aggagaaagcuuaccaugggccagaucgugaccuucuuccaggaggucccccacgugaucgaggaggugaugaacaucguccugaucgcccucagcauccuggccgugcugaaggggcucuacaacguggcgaccugcggccugaucgggcuggucacguuccuccugcugugcggccgcuccugcaccaccacccucuacaaggggguguacgagcugcagacgcuggagcucaacauggagacccugaacaugaccaugccgcugagcugcaccaagaacaacucccaccacuacauccgggugggcaacgagacgggccucgagcugacccugaccaacaccagcaucaucaaccacaaguucugcaaccucuccgacgcccacaagaagaaccuguacgaccacgcccugaugagcaucaucuccacguuccaccucagcauccccaacuucaaccaguacgaggccauguccugcgacuucaacgggggcaagaucagcguccaguacaaccugucccacagcuacgccggggacgcggccaaccacugcggcaccguggccaacggggugcugcagaccuucaugcgcauggccuggggcggcuccuacaucgcgcucgacagcgggcggggcaacugggacugcaucaugaccuccuaccaguaccugaucauccagaacacgaccugggacgaccacugccaguucagccgccccucccccaucggguaccugggccuccugagccagcggacccgcgacgucuacaucucccggcgccugcucggcaccuucacguggacccugagcgacagcgaggggaaggacaccccgggcggguacugccugacccgguggaugcucaucgaggccgagcugaagugcuucggcaacacggccguggccaagugcaacgagaagcacgacgaggaguucugcgacaugcugcgccucuucgacuucaacaagcaggccauccagcggcugaaggcgcccgcccagauguccauccagcugaucaacaaggccgugaacgcccucaucaacgaccagcugaucaugaagaaccaccuccgcgacaucauggggauccccuacugcaacuacagcaaguacugcuaccugaacaacaccgccaccggcaagaccucccugcccaagugcugccugaucagcaacggcuccuaccucaacgagacgcacuucagcgacgacaucgagcaggaggcggacaacaugaucaccgagaugcugcagaaggaguacauggagcggcaggggaagaccccgcugggccuggucgaccucuucguguucuccaccagcuucuaccugaucuccaucuuccugcaccucgugaagauccccacgcaccgccacaucgucggcaagagcugccccaagccccaccggcugaaccacauggggaucugcuccugcgggcuguacaagcagccgggcgugcccgugcgcuggaagcggugaggacuaguuauaagacugacuagcccgaugggccucccaacgggcccuccuccccuccuugcaccgagauuaauaaaaaaaaaaaaaaaaaaaaaaaaaaaaaaaaaaaaaaaaaaaaaaaaaaaaaaaaaaaaaaaaaaaaaaaaaaaaaaaaaaaaaaaaaaaaaaaaaaaa

SEQ ID NO: 33053 - RNA, 1665 nt, Artificial Sequence
  mRNA product Design i-3 (A100) comprising derived and/or modified sequence from LASV(G3010-SLE-2013;Clade IV)__AIT17344__GPCmut7 (opt1)
aggagaaagcuuaccaugggccagaucgugaccuucuuccaggaggucccccacgugaucgaggaggugaugaacaucguccugaucgcccucagcauccuggccgugcugaaggggcucuacaacuucgcgaccugcggccugguggggcuggucacguuccuccugcugugcggccgcuccugcaccaccagccucuacaaggggguguacgagcugcagacccuggagcucaacauggagacgcugaacaugaccaugccgcuguccugcaccaagaacaacagccaccacuacaucauggugggcaacgagaccggccucgagcugacgcugaccaacaccuccaucaucaaccacaaguucugcaaccucagcgacgcccacaagaagaaccuguacaaccacgcccugauguccaucaucagcaccuuccaccucuccauccccaacuucaaccaguacgaggccaugagcugcgacuucaacgggggcaagaucuccguccaguacaaccugagccacuccuacgccggggacgcggccagccacugcggcacgguggccaacggggugcugcagaccuucaugcggauggccuggggcggcuccuacaucgcgcucgacagcggguacggcaagugggacugcaucaugaccuccuaccaguaccugaucauccagaacaccacgugggaggaccacugccaguucagccgccccucccccaucggguaccugggccuccugagccagcggacccgcgacaucuacaucagccggcgccugcucggcaccuucaccuggacgcuguccgacagcgaggggaaggacaccccgggcggguacugccugacccgguggaugcucaucgaggccgagcugaagugcuucggcaacaccgccgucgccaagugcaacgagaagcacgacgaggaguucugcgacaugcugcgccucuucgacuucaacaagcaggccauccagcggcugaagacgcccgcgcagauguccauccagcugaucaacaaggccgugaacgcccucaucaacgaccagcugaucaugaagaaccaccuccgcgacaucauggggauccccuacugcaacuacagcaaguacugcuaccugaaccacaccaccaccggcaagacgucccugcccaagugcugccuggugagcaacggcuccuaccucaacgagacccacuucagcgacgacaucgagcagcaggccgacaacaugaucaccgagaugcugcagaaggaguacauggagcggcaggggaagaccccgcugggccuggucgaccucuucguguucuccacgagcuucuaccugaucuccaucuuccugcaccucgugaagauccccacccaccgccacaucgucggcaagagcugccccaagccccaccggcugaaccacauggggaucugcuccugcgggcuguacaagcagccgggcgugcccgugcgcuggaagcggugaggacuaguuauaagacugacuagcccgaugggccucccaacgggcccuccuccccuccuugcaccgagauuaauaaaaaaaaaaaaaaaaaaaaaaaaaaaaaaaaaaaaaaaaaaaaaaaaaaaaaaaaaaaaaaaaaaaaaaaaaaaaaaaaaaaaaaaaaaaaaaaaaaaa

SEQ ID NO: 33054 - RNA, 1665 nt, Artificial Sequence
  mRNA product Design i-3 (A100) comprising derived and/or modified sequence from LASV(G502-SLE-2009;Clade IV)__AIT17126__GPCmut7 (opt1)
aggagaaagcuuaccaugggccagaucgugaccuucuuccaggaggucccccacgugaucgaggaggugaugaacaucguccugaucgcccucagcauccuggccgugcugaaggggcucuacaacuucgcgaccugcggccugguggggcugcucacguuccugcugcucugcggccgcuccugcaccaccgggcuguacaagggcgucuacgagcugcagacccucgagcugaacauggagacgcugaacaugaccaugccgcucagcugcaccaagaacaacucccaccacuacaucauggugggcaacgagaccgggcuggagcugacgcucaccaacaccagcaucaucaaccacaaguucugcaaccuguccgacgcccacaagaagaaccuguacgaccacgcccucaugagcaucaucuccaccuuccaccugagcauccccaacuucaaccaguacgaggccauguccugcgacuucaacggcgggaagaucagcgugcaguacaaccugucccacagcuacgccggcgacgcggccgaccacugcgggacggucgccaacggcgugcuccagaccuucaugcggauggccuggggcggguccuacaucgcgcuggacagcggccgcgggcggugggacugcaucaugaccuccuaccaguaccugaucauccagaacaccacgugggaggaccacugccaguucagccgccccucccccaucggcuaccucggccugcugagccagcggacccgcgacaucuacaucucccggcgccuccuggggaccuucaccuggacgcugagcgacagcgagggcaaggacacccccgggggcuacugccucacccgguggaugcugaucgaggccgagcugaagugcuucgggaacaccgccguggccaagugcaacgagaagcacgacgaggaguucugcgacaugcuccgccuguucgacuucaacaagcaggccauccagcggcugaaggcgccggcccagauguccauccagcucaucaacaaggccgucaacgcccugaucaacgaccagcuggugaugaagaaccaccuccgcgacaucaugggcauccccuacugcaacuacagccgguacugcuaccugaaccacacgaccaccggccgcaccucccugcccaagugcugccucgugagcaacggguccuaccugaacgagacgcacuucagcgacgacaucgagcagcaggccgacaacaugaucaccgagaugcugcagaaggaguacauggagcggcagggcaagaccccgcuggggcucgucgaccuguucguguucuccaccagcuucuaccugaucuccaucuuccuccaccuggugaagauccccacgcaccgccacaucgucggcaagagcugccccaagccccaccggcugaaccacauggggaucugcuccugcggccucuacaagcagccgggcgugcccgugaaguggaagcgcugaggacuaguuauaagacugacuagcccgaugggccucccaacgggcccuccuccccuccuugcaccgagauuaauaaaaaaaaaaaaaaaaaaaaaaaaaaaaaaaaaaaaaaaaaaaaaaaaaaaaaaaaaaaaaaaaaaaaaaaaaaaaaaaaaaaaaaaaaaaaaaaaaaaa

SEQ ID NO: 33055 - RNA, 1665 nt, Artificial Sequence
  mRNA product Design i-3 (A100) comprising derived and/or modified sequence from LASV(G733-SLE-2010;Clade IV)__AIT17154__GPCmut7 (opt1)
aggagaaagcuuaccaugggccagaucgugaccuucuuccaggaggucccccacgugaucgaggaggugaugaacaucguccugaucgcccucagcauccuggccgugcugaaggggcucuacaacuucgcgaccugcggcaucguggggcuggucuccuuccugcuccugugcggccgcagcugcacgaccucccuguacaaggggguguacgagcuccagacccuggagcugaacauggagacccucaacaugacgaugccgcugagcugcaccaagaacaacucccaccacuacaucauggugggcaacgagaccggccuggagcucacccugacgaacaccagcaucaucaaccacaaguucugcaaccuguccgacgcccacaagaagaaccucuacgaccacgcccugaugagcaucaucuccaccuuccaccugagcauccccaacuucaaccaguacgaggccauguccugcgacuucaacgggggcaagaucagcguccaguacaaccucucccacagcuacgccggggacgcggccaaccacugcggcaccaucgccaacggggugcugcagacguucaugcggauggccuggggcggcuccuacaucgcgcuggacagcgggcgcgaccggugggacugcaucaugaccuccuaccaguaccucaucauccagaacaccaccugggaggaccacugccaguucagccgccccucccccaucggcuaccuggggcugcucagccagcggacgcgcgacaucuacaucagccggcgccugcugggcaccuucaccuggacccucuccgacagcgagggcaaggacacgcccgggggcuacugccugacccgguggaugcugaucgaggccgagcucaagugcuucgggaacaccgccguggccaagugcaacgagaagcacgacgaggaguucugcgacaugcugcgccuguucgacuucaacaagcaggccauccagcggcucaaggcgccggcccagauguccauccagcugaucaacaaggccgucaacgcccugaucaacgaccagcucaucaugaagaaccaccuccgcgacaucaugggcauccccuacugcaacuacagcaaguacugcuaccugaaccacaccacgaccgggaagaccucccugcccaagugcugccuggugagcaacggcuccuaccugaacgagacccacuucagcgacgacaucgagcagcaggccgacaacaugaucacggagaugcuccagaaggaguacauggagcggcagggcaagaccccgcuggggcugguggaccuguucgucuucuccaccagcuucuaccucaucuccaucuuccugcaccuggugaagauccccacccaccgccacguggucggcaagagcugccccaagccccaccggcucaaccacauggggaucugcuccugcggccuguacgggcagccgggcgugcccgugaaguggaagcgcugaggacuaguuauaagacugacuagcccgaugggccucccaacgggcccuccuccccuccuugcaccgagauuaauaaaaaaaaaaaaaaaaaaaaaaaaaaaaaaaaaaaaaaaaaaaaaaaaaaaaaaaaaaaaaaaaaaaaaaaaaaaaaaaaaaaaaaaaaaaaaaaaaaaa

SEQ ID NO: 33056 - RNA, 1665 nt, Artificial Sequence
  mRNA product Design i-3 (A100) comprising derived and/or modified sequence from MOPV/LASV reassortant(IGS-1;Clade IV)__AFY05576__GPCmut7 (opt1)
aggagaaagcuuaccaugggccagaucgugaccuucuuccaggaggucccccacgugaucgaggaggugaugaacaucguccugaucgcccucagcgugcuggccgugcugaaggggcucuacaacuucgcgaccugcggccuggucgggcuggugacguuccuccugcugugcggccgcuccugcaccaccagccucuacaaggggguguacgagcugcagacccuggagcucaacauggagacgcugaacaugaccaugccgcuguccugcaccaagaacaacagccaccacuacaucauggucggcaacgagaccggccucgagcugacgcugaccaacaccuccaucaucaaccacaaguucugcaaccucagcgacgcccacaagaagaaccuguacgaccacgcccugauguccaucaucagcaccuuccaccucuccauccccaacuucaaccaguacgaggccaugagcugcgacuucaacgggggcaagaucuccgugcaguacaaccugagccacuccuacgccggggacgcggccaaccacugcggcacgguggccaacgggguccugcagaccuucaugcggauggccuggggcggcagcuacaucgcgcucgacuccgggcgcggcaacugggacugcaucaugaccagcuaccaguaccugaucauccagaacaccacgugggaggaccacugccaguucucccggcccagccccaucggguaccugggccuccugucccagcgcacccgggacaucuacaucagccgccggcugcucggcaccuucaccuggacgcugagcgacuccgagggggaggacaccccgggcggguacugccugacccgcuggaugcucaucgaggccgagcugaagugcuucggcaacaccgccguggccaagugcaacgagaagcacgacgaggaguucugcgacaugcugcggcuguucgacuucaacaagcaggccauccagcgccugaaggcgcccgcccagaugagcauccagcugaucaacaaggccgugaacgcccucaucaacgaccagcugaucaugaagaaccaccuccgggacaucauggggauccccuacugcaacuacuccaaguacugcuaccucaaccacacgaccaccggccgcaccagccugcccaagugcugccuggucuccaacggcagcuaccucaacgagacgcacuucuccgacgacaucgagcagcaggccgacaacaugaucaccgagaugcugcagaaggaguacauggagcggcaggggaagaccccgcugggccugguggaccucuucguguucagcaccuccuucuaccugaucagcaucuuccugcaccucgucaagauccccacgcaccgccacaucguggggaaguccugccccaagccccaccggcugaaccacaugggcaucugcagcugcgggcuguacaagcagccgggcgugcccgucaaguggaagcgcugaggacuaguuauaagacugacuagcccgaugggccucccaacgggcccuccuccccuccuugcaccgagauuaauaaaaaaaaaaaaaaaaaaaaaaaaaaaaaaaaaaaaaaaaaaaaaaaaaaaaaaaaaaaaaaaaaaaaaaaaaaaaaaaaaaaaaaaaaaaaaaaaaaaa

SEQ ID NO: 33057 - RNA, 1665 nt, Artificial Sequence
  mRNA product Design i-3 (A100) comprising derived and/or modified sequence from LASV(LM765-SLE-2012;Clade IV)__AIT17814__GPCmut7 (opt1)
aggagaaagcuuaccaugggccagaucgugaccuucuuccaggaggucccccacgugaucgaggaggugaugaacaucguccugaucgcccucagcauccuggccgugcugaaggggcucuacaacuucgcgaccugcggccugguggggcuggucacguuccuccugcugugcggccgcuccugcaccaccagccucuacaaggggguguacgagcugcagacccuggagcucaacauggagacgcugaacaugaccaugccgcuguccugcaccaagaacaacagccaccacuacaucauggugggcaacgagaccggccucgagcugacgcugaccaacaccuccaucaucgaccacaaguucugcaaccucagcgacgcccaccggaagaaccuguacgaccacgcccugauguccaucaucagcaccuuccaccucuccauccccaacuucaaccaguacgaggccaugagcugcgacuucaacgggggcaagaucuccguccaguacaaccugagccacuccuacgccaaggacgcggccgaccacugcgggacgguggccaacggcgugcugcagaccuucaugcgcauggccuggggcgggagcuacaucgcgcucgacuccggccgggggcgcugggacugcaucaugaccagcuaccaguaccugaucauccagaacaccacgugggaggaccacugccaguucucccggcccagccccaucggcuaccuggggcuccugucccagcgcacccgggacaucuacaucagccgccggcugcucggcaccuucaccuggacgcugagcgacuccgagggcaaggacacccccgggggcuacugccugacccgcuggaugcucaucgaggccgagcugaagugcuucgggaacaccgccgucgccaagugcaacgagaagcacgacgaggaguucugcgacaugcugcggcuguucgacuucaacaagcaggccauccagcgccugaaggcgccggcccagaugagcauccagcugaucaacaaggccgugaacgcccucaucaacgaccagcugaucaugaagaaccaccuccgggacaucaugggcauccccuacugcaacuacuccaaguacugcuaccucaaccacacgaccaccgggaagaccagccugcccaagugcugccugguguccaacggcagcuaccucaacgagacgcacuucuccgacgacaucgagcagcaggccgacaacaugaucaccgagaugcugcagaaggaguacauggagcgccagggcaagaccccgcuggggcuggucgaccucuucguguucagcaccuccuucuaccugaucagcaucuuccugcaccucgugaagauccccacgcaccggcacaucgucggcaagcccugccccaagccgcaccgccugaaccacauggggaucugcuccugcggccuguacaagcagcccggggugcccgugaaguggaagcggugaggacuaguuauaagacugacuagcccgaugggccucccaacgggcccuccuccccuccuugcaccgagauuaauaaaaaaaaaaaaaaaaaaaaaaaaaaaaaaaaaaaaaaaaaaaaaaaaaaaaaaaaaaaaaaaaaaaaaaaaaaaaaaaaaaaaaaaaaaaaaaaaaaaa

SEQ ID NO: 33058 - RNA, 1665 nt, Artificial Sequence
  mRNA product Design i-3 (A100) comprising derived and/or modified sequence from LASV(LM776-SLE-2012;Clade IV)__AIT17824__GPCmut7 (opt1)
aggagaaagcuuaccaugggccagaucgugaccuucuuccaggaggucccccacgugaucgaggaggugaugaacaucguccugaucgcccucagcauccuggccgugcugaaggggcucuacaacuucgcgaccugcggccugguggggcuggucacguuccuccugcugugcggccgcuccugcaccaccagcguguacaaggggguguacgagcuccagacccuggagcugaacauggagacgcucaacaugaccaugccgcuguccugcaccaagaacaacagccaccacuacaucauggucggcaacgagaccggccuggagcucacgcugaccaacaccuccaucaucaaccacaaguucugcaaccugagcgacgcccacaagaagaaccucuacgaccacgcccugauguccaucaucagcaccuuccaccuguccauccccaacuucaaccaguacgaggccaugagcugcgacuucaacgggggcaagaucuccgugcaguacaaccucagccacuccuacgccggggacgcggccaaccacugcggcacgguggccaacgggguccugcagaccuucaugcggauggccuggggcggcagcuacaucgcgcuggacuccgggcacggcaagugggacugcaucaugaccagcuaccaguaccucaucauccagaacaccacgugggaggaccacugccaguucucccgccccagccccaucggguaccugggccugcucucccagcggacccgcgacaucuacaucagccggcgccugcugggcaccuucaccuggacgcucagcgacuccgaggggaaggacaccccgggcggguacugccugacccgguggaugcugaucgaggccgagcucaagugcuucggcaacaccgccguggccaagugcaacgagaagcacgacgaggaguucugcgacaugcugcgccuguucgacuucaacaagcaggccauccagcggcucaaggcgcccgcccagaugagcauccagcugaucaacaaggccgugaacgcccugaucaacgaccagcucaucaugaagaaccaccuccgcgacaucauggggauccccuacugcaacuacuccaaguacugcuaccugaaccacacgaccaccggcaagaccagccugcccaagugcugccuggucuccaacggcagcuaccugaacgagacgcacuucuccgacgacaucgagcagcaggccgacaacaugaucaccgagaugcuccagaaggaguacauggagcggcaggggaagaccccgcugggccugguggaccuguucguguucagcaccuccuucuaccucaucagcaucuuccugcaccuggucaagauccccacgcaccgccacaucguggggaaguccugccccaagccccaccggcucaaccacaugggcaucugcagcugcgggcuguacaagcagccgggcgugcccguccgcuggaagcggugaggacuaguuauaagacugacuagcccgaugggccucccaacgggcccuccuccccuccuugcaccgagauuaauaaaaaaaaaaaaaaaaaaaaaaaaaaaaaaaaaaaaaaaaaaaaaaaaaaaaaaaaaaaaaaaaaaaaaaaaaaaaaaaaaaaaaaaaaaaaaaaaaaaa

SEQ ID NO: 33059 - RNA, 1665 nt, Artificial Sequence
  mRNA product Design i-3 (A100) comprising derived and/or modified sequence from LASV(Mad39;Clade IV)__ANH09722__GPCmut7 (opt1)
aggagaaagcuuaccaugggccagaucgugaccuucuuccaggaggucccccacgugaucgaggaggugaugaacaucguccugaucgcccucagcauccuggccgugcugaaggggcucuacaacguggcgaccugcggccugaucgggcuggucacguuccuccugcugugcggccgcuccugcaccaccacccucuacaaggggguguacgagcugcaggcccuggagcucaacauggagacgcugaacaugaccaugccgcugagcugcaccaagaacaacucccaccacuacauccgggugggcaacgagaccggccucgagcugacgcugaccaacaccagccucaucaaccacaaguucugcaaccuguccgacgcccacaagaagaaccuguacgaccacgcccucaugagcaucaucuccaccuuccaccugagcauccccaacuucaaccaguacgaggccauguccugcgacuucaacgacgggaagaucagcguccaguacaaccugucccacacguacgcgggcgacaccgccaaccacugcgggaccguggccaacggcgugcuccagaccuucaugcgcauggccuggggcgggagcuacaucgcgcuggacuccggccgcgggggcugggacugcaucaugacgagcuaccaguaccugaucauccagaacaccaccugggaggaccacugccaguucucccggcccagccccaucggguaccucggccugcugucccagcggacccgcgacaucuacaucagccggcgccuccugggcacguucaccuggacccuguccgacagcgaggggaaggacaccccgggcggguacugccucacgcgguggaugcugaucgaggccgagcugaagugcuucggcaacaccgccgucgccaagugcaacgagaagcacgacgaggaguucugcgacaugcuccgccuguucgacuucaacaagcaggccauccagcggcugaaggcgcccgcccagaugagcauccagcucaucaacaaggccgugaacgcccugaucaacgaccagcugaucaugaagaaccaccuccgcgacaucauggggauccccuacugcaacuacuccaaguacugcuaccugaaccacaccgugaccggcaagacgagccugcccaagugcugccucgucuccaacggcagcuaccugaacgagacccacuucuccgacgacaucgagcagcaggccgacaacaugaucaccgagaugcugcagaaggaguacauggagcggcaggggaagaccccgcugggccucguggaccuguucguguucagcacguccuucuaccugaucagcaucuuccuccaccuggucaagauccccacccaccgccacgugguggggaagcccugccccaagccgcaccggcugaaccacaugggcaucugcuccugcggguucuacaagcagcccggcguccccgugcgcuggaagcggugaggacuaguuauaagacugacuagcccgaugggccucccaacgggcccuccuccccuccuugcaccgagauuaauaaaaaaaaaaaaaaaaaaaaaaaaaaaaaaaaaaaaaaaaaaaaaaaaaaaaaaaaaaaaaaaaaaaaaaaaaaaaaaaaaaaaaaaaaaaaaaaaaaaa

SEQ ID NO: 33060 - RNA, 1665 nt, Artificial Sequence
  mRNA product Design i-3 (A100) comprising derived and/or modified sequence from LASV(Z0947-SLE-2011;Clade IV)__AIT17840__GPCmut7 (opt1)
aggagaaagcuuaccaugggccagaucgugaccuucuuccaggaggucccccacgugaucgaggaggugaugaacaucguccugaucgcccucagcauccuggccgugcugaaggggcucuacaacuucgcgaccugcggccugguggggcuggucacguuccuccugcugugcggccgcuccugcaccaucagccucuacaaggggguguacgagcugcagacccuggagcucaacauggagacccugaacaugacgaugccgcuguccugcaccaagaacaacagccaccacuacaucauggugggcaacgagaccggccucgagcugacccugacgaacaccuccaucaucaaccacaaguucugcaaccucagcgacgcccacaagaagaaccuguacgaccacgcccugauguccaucaucagcaccuuccaccucuccauccccaacuucaaccaguacgaggccaugagcugcgacuucaacgggggcaagaucuccguccaguacaaccugagccacuccuacgccggggacgcggccaaccacugcggcaccguggccaacggggugcugcagacguucaugcggauggccuggggcggcagcuacaucgcgcucgacuccgggcgcgaccggugggacugcaucaugaccagcuaccaguaccugaucauccagaacaccaccugggaggaccacugccaguucucccgccccagccccaucggcuaccuggggcuccugucccagcggacgcgcgacaucuacaucagccggcgccugcucggcaccuucaccuggacccugagcgacuccgagggcaaggacacgcccgggggcuacugccugacccgguggaugcucaucgaggccgagcugaagugcuucgggaacaccgccgucgccaagugcaacgagaagcacgacgaggaguucugcgacaugcugcgccucuucgacuucaacaagcaggccauccagcggcugaaggcgccggcccagaugagcauccagcugaucaacaaggccgugaacgcccucaucaacgaccagcugaucaugaagaaccaccuccgcgacaucaugggcauccccuacugcaacuacuccaaguacugcuaccugaaccacaccacgaccgggaagaccagccugcccaagugcugccugguguccaacggcagcuaccucaacgagacccacuucuccgacgacaucgagcagcaggccgacaacaugaucacggagaugcugcagaaggaguacauggagcggcagggcaagaccccgcuggggcuggucgaccucuucguguucagcaccuccuucuaccugaucagcaucuuccugcaccucgugaagauccccacccaccgccacaucgucggcaagcccugccccaagccgcaccggcugaaccacauggggaucugcuccugcggccuguacaagcagcccggggugcccgugaaguggaagcgcugaggacuaguuauaagacugacuagcccgaugggccucccaacgggcccuccuccccuccuugcaccgagauuaauaaaaaaaaaaaaaaaaaaaaaaaaaaaaaaaaaaaaaaaaaaaaaaaaaaaaaaaaaaaaaaaaaaaaaaaaaaaaaaaaaaaaaaaaaaaaaaaaaaaa

SEQ ID NO: 33061 - RNA, 1665 nt, Artificial Sequence
  mRNA product Design i-3 (A100) comprising derived and/or modified sequence from LASV(Josiah;Clade IV)__NP_694870__GPCmut7 (opt4)
aggagaaagcuuaccaugggccagaucgugaccuucuuccaggaggugccccacgugaucgaggaggugaugaacaucgugcugaucgcccugagcgugcuggccgugcugaagggccuguacaacuucgccaccugcggccuggugggccuggugaccuuccugcugcugugcggcagaagcugcaccaccagccuguacaagggcguguacgagcugcagacccuggagcugaacauggagacccugaacaugaccaugccccugagcugcaccaagaacaacagccaccacuacaucauggugggcaacgagaccggccuggagcugacccugaccaacaccagcaucaucaaccacaaguucugcaaccugagcgacgcccacaagaagaaccuguacgaccacgcccugaugagcaucaucagcaccuuccaccugagcauccccaacuucaaccaguacgaggccaugagcugcgacuucaacggcggcaagaucagcgugcaguacaaccugagccacagcuacgccggcgacgccgccaaccacugcggcaccguggccaacggcgugcugcagaccuucaugagaauggccuggggcggcagcuacaucgcccuggacagcggcagaggcaacugggacugcaucaugaccagcuaccaguaccugaucauccagaacaccaccugggaggaccacugccaguucagcagacccagccccaucggcuaccugggccugcugagccagagaaccagagacaucuacaucagcagaagacugcugggcaccuucaccuggacccugagcgacagcgagggcaaggacacccccggcggcuacugccugaccagauggaugcugaucgaggccgagcugaagugcuucggcaacaccgccguggccaagugcaacgagaagcacgacgaggaguucugcgacaugcugagacuguucgacuucaacaagcaggccauccagagacugaaggcccccgcccagaugagcauccagcugaucaacaaggccgugaacgcccugaucaacgaccagcugaucaugaagaaccaccugagagacaucaugggcauccccuacugcaacuacagcaaguacugcuaccugaaccacaccaccaccggcagaaccagccugcccaagugcugccuggugagcaacggcagcuaccugaacgagacccacuucagcgacgacaucgagcagcaggccgacaacaugaucaccgagaugcugcagaaggaguacauggagagacagggcaagaccccccugggccugguggaccuguucguguucagcaccagcuucuaccugaucagcaucuuccugcaccuggugaagauccccacccacagacacaucgugggcaagagcugccccaagccccacagacugaaccacaugggcaucugcagcugcggccuguacaagcagcccggcgugcccgugaaguggaagagaugaggacuaguuauaagacugacuagcccgaugggccucccaacgggcccuccuccccuccuugcaccgagauuaauaaaaaaaaaaaaaaaaaaaaaaaaaaaaaaaaaaaaaaaaaaaaaaaaaaaaaaaaaaaaaaaaaaaaaaaaaaaaaaaaaaaaaaaaaaaaaaaaaaaa

SEQ ID NO: 33062 - RNA, 1662 nt, Artificial Sequence
  mRNA product Design i-3 (A100) comprising derived and/or modified sequence from LASV(LP;Clade I)__AAF86701__GPCmut7 (opt4)
aggagaaagcuuaccaugggccagaucaucaccuucuuccaggaggugccccacgugaucgaggaggugaugaacaucgugcugaucgcccugagccugcuggccauccugaagggccuguacaacaucgccaccugcggcaucaucggccugguggccuuccuguuccugugcggcaagagcugcagccugacccugaagggcggcuacgagcugcagacccuggagcugaacauggagacccugaacaugaccaugccccugagcugcaccaagaacagcagccaccacuacaucagagugggcaacgagaccggccuggagcugacccugaccaacaccagcaucaucaaccacaaguucugcaaccugagcgacgcccacaagaagaaccuguacgaccacgcccugaugagcaucaucagcaccuuccaccugagcauccccaacuucaaccaguacgaggccaugagcugcgacuucaacggcggcaagaucagcgugcaguacaaccugagccacagcuacgccggcgacgccgccgagcacugcggcaccguggccaacggcgugcugcagaccuucaugagaauggccuggggcggcagauacaucgcccuggacagcggcaagggcaacugggacugcaucaugaccagcuaccaguaccugaucauccagaacaccaccugggaggaccacugccaguucagcagacccagccccaucggcuaccugggccugcugagccagagaaccagagacaucuacaucagcagaagacugcugggcaccuucaccuggacccugagcgacagcgagggcaacgagacccccggcggcuacugccugaccagauggaugcugaucgaggccgagcugaagugcuucggcaacaccgccguggccaagugcaacgagaagcacgacgaggaguucugcgacaugcugagacuguucgacuucaacaagcaggccaucagaagacugaaggcccccgcccagaugagcauccagcugaucaacaaggccgugaacgcccugaucaacgaccagcugaucaugaagaaccaccugagagacaucaugggcauccccuacugcaacuacagcaaguacugcuaccugaaccacaccagcagcggcagaaccagccugcccaagugcugccugaucagcaacggcagcuaccugaacgagacccaguucagcgacgacaucgagcagcaggccgacaacaugaucaccgagaugcugcagaaggaguacaucgagagacagggcaagaccccccugggccugguggacaucuucaucuucagcaccagcuucuaccugaucagcaucuuccugcaccugaucaagauccccacccacagacacaucgugggcaagcccugccccaagccccacagacugaaccacaugggcgugugcagcugcggccuguacaagcaccccggcgugcccaccaaguggaagagaugaggacuaguuauaagacugacuagcccgaugggccucccaacgggcccuccuccccuccuugcaccgagauuaauaaaaaaaaaaaaaaaaaaaaaaaaaaaaaaaaaaaaaaaaaaaaaaaaaaaaaaaaaaaaaaaaaaaaaaaaaaaaaaaaaaaaaaaaaaaaaaaaaaaa

SEQ ID NO: 33063 - RNA, 1662 nt, Artificial Sequence
  mRNA product Design i-3 (A100) comprising derived and/or modified sequence from LASV(803213;Clade II)__AAF86703__GPCmut7 (opt4)
aggagaaagcuuaccaugggccagaucaucaccuucuuccaggaggugccccacgugaucgaggaggugaugaacaucgugcugaucgcccugagccugcuggccauccugaagggcaucuacaacguggccaccugcggccuguucggccugaucagcuuccugcugcugugcggcagaagcugcagcgugaccuacaagggcguguacgagcugcagacccuggagcugaacauggccaaccugaacaugaccaugccccugagcugcaccaagaacaacagccaccacuacaucauggugggcaacgagaccggccuggagcugacccugaccaacaccagcaucaucaaccacaaguucugcaaccugagcgacgcccacaagaagaaccuguacgaccacgcccugaugagcaucaucagcaccuuccaccugagcauccccaacuucaaccaguacgaggccaugagcugcgacuucaacggcggcaagaucagcgugcaguacaaccugagccacagcuucgccguggacgccgccaaccacugcggcaccaucgccaacggcgugcugcagaccuucaugagaauggccuggggcggcagcuacaucgcccuggacagcggcaagggcaacugggacugcaucaugaccagcuaccaguaccugaucauccagaacaccaccugggaggaccacugccaguucagcagacccagccccaucggcuaccugggccugcugagccagagaaccagagacaucuacaucagcagaagacugcugggcaccuucaccuggacccugagcgacagcgagggcaacgaggcccccggcggcuacugccugaccagauggaugcugaucgaggccgagcugaagugcuucggcaacaccgccguggccaagugcaacgagaagcacgacgaggaguucugcgacaugcugagacuguucgacuucaacaagcaggccaucaagagacugaagacccccgcccagaugagcauccagcugaucaacaaggccgugaacgcccugaucaacgaccagcugaucaugaagaaccaccugagagacaucaugggcauccccuacugcaacuacagcagauacugcuaccugaaccacaccgugaccggcaagaccagccugcccagaugcugccuggugagcaacggcagcuaccugaacgagacccacuucagcgacgacaucgagcagcaggccgacaacaugaucaccgagaugcugcagaaggaguacauggacagacagggcaagaccccccugggccugguggaccuguucguguucagcaccagcuucuaccugaucagcaucuuccugcaccuggugaagauccccacccacagacacaucgugggcaagcccugccccaagccccacagacugaaccacaugggcaucugcagcugcggccuguacaagcaccccggcgugcccgugaaguggaagagaugaggacuaguuauaagacugacuagcccgaugggccucccaacgggcccuccuccccuccuugcaccgagauuaauaaaaaaaaaaaaaaaaaaaaaaaaaaaaaaaaaaaaaaaaaaaaaaaaaaaaaaaaaaaaaaaaaaaaaaaaaaaaaaaaaaaaaaaaaaaaaaaaaaaa

SEQ ID NO: 33064 - RNA, 1662 nt, Artificial Sequence
  mRNA product Design i-3 (A100) comprising derived and/or modified sequence from LASV(GA391;Clade III)__CAA36645__GPCmut7 (opt4)
aggagaaagcuuaccaugggccagaucgugaccuucuuccaggaggugccccacgugaucgaggaggugaugaacaucgugcugaucgcccugagcauccuggccauccugaagggccuguacaacguggccaccugcggccugaucggccuggugaccuuccugcugcugagcggcagaagcugcagccugaucuacaagggcaccuacgagcugcagacccuggagcugaacauggagacccugaacaugaccaugccccugagcugcaccaagaacaacagccaccacuacaucagagugggcaacgagaccggccuggagcugacccugaccaacaccagcauccugaaccacaaguucugcaaccugagcgacgcccacaagagaaaccuguacgaccacagccugaugagcaucaucagcaccuuccaccugagcauccccaacuucaaccaguacgaggccaugagcugcgacuucaacggcggcaagaucaccgugcaguacaaccugagccacagcuucgccguggacgccgccggccacugcggcacccuggccaacggcgugcugcagaccuucaugagaauggccuggggcggcagcuacaucgcccuggacagcggcagaggcaacugggacugcaucaugaccagcuaccaguaccugaucauccagaacaccaccugggacgaccacugccaguucagcagacccagccccaucggcuaccugggccugcugagccagagaaccagagacaucuacaucagcagaagacugcugggcaccuucaccuggacccugagcgacagcgagggcaacgagacccccggcggcuacugccugaccagauggaugcugaucgaggccgagcugaagugcuucggcaacaccgccguggccaagugcaacgagaagcacgacgaggaguucugcgacaugcugagacuguucgacuucaacaagcaggccaucagaagacugaagacccccgcccagaugagcauccagcugaucaacaaggccgugaacgcccugaucaacgaccagcugaucaugaagaaccaccugagagacaucaugggcauccccuacugcaacuacagcagauacugcuaccugaaccacaccagcaccggcaagaccagccugcccagaugcugccugaucagcaacggcagcuaccugaacgagaccaaguucagcgacgacaucgagcagcaggccgacaacaugaucaccgagaugcugcagaaggaguacaucgacagacagggcaagaccccccugggccugguggaccuguucguguucagcaccagcuucuaccugaucagcaucuuccugcaccuggugaagauccccacccacagacacaucgugggcaagcccugccccaagccccacagacugaaccacaugggcaucugcagcugcggccuguacaagcagcccggcgugcccgugagauggaagagaugaggacuaguuauaagacugacuagcccgaugggccucccaacgggcccuccuccccuccuugcaccgagauuaauaaaaaaaaaaaaaaaaaaaaaaaaaaaaaaaaaaaaaaaaaaaaaaaaaaaaaaaaaaaaaaaaaaaaaaaaaaaaaaaaaaaaaaaaaaaaaaaaaaaa

SEQ ID NO: 33065 - RNA, 1665 nt, Artificial Sequence
  mRNA product Design i-3 (A100) comprising derived and/or modified sequence from LASV(AV;Clade V)__CCA30314__GPCmut7 (opt4)
aggagaaagcuuaccaugggccagaucgugaccuucuuccaggaggugccccacgugaucgaggaggugaugaacaucgugcugaucgcccugagcauccuggccgugcugaagggccuguacaacaucgccaccugcggccugaucggccugaucaccuuccugcugcugugcggcagaagcugcagcagcaaccuguacaagggcguguacgagcugcagagccuggaccugaacauggagacccugaacaugaccaugccccugagcugcaccaagaacaacagccaccacuacaucagagugggcaacgacaccggccuggagcugacccugaccaacaccagcauccugaaccacaaguucugcaaccugagcgacgcccacaagaaggaccuguacgaccacgcccugaugagcaucaucagcaccuuccaccugagcauccccaacuucaaccaguacgaggccaugagcugcgacuucaacggcggcaagaucagcgugcaguacaaccugagccacagcuacgccaucgacgccgccaaccacugcggcaccguggccaacggcauccugcagaccuucaugagaauggccuggggcggcagcuacaucgcccuggacagcggcagaggcaacugggacugcaucaugaccagcuaccaguaccugaucauccagaacaccaccugggagaaccacugccaguucagcagacccagccccaucggcuaccugggccugcugagccagagaaccagagacaucuacaucagcagaagacugcugggcaccuucaccuggacccugagcgacagcgagggcaacgccacccccggcggcuacugccugaccagauggaugcugaucgaggccgagcugaagugcuucggcaacaccgccguggccaagugcaacgagaagcacgacgaggaguucugcgacaugcugagacuguucgacuucaacaagcaggccaucagcagacugaagagccccgcccagaugagcauccagcugaucaacaaggccgugaacgcccugaucaacgaccagcugaucaugaagaaccaccugagagacaucaugggcauccccuacugcaacuacagcaaguacugcuaccugaaccacaccaucaccggcaagaccagccugcccaagugcugccuggugagcaacggcagcuaccugaacgagacccacuucagcgacgacaucgagcagcaggccgacaacaugaucaccgagaugcugcagaaggaguacauggagagacagggcaagaccccccugggccugguggaccuguucguguucagcaccagcuucuaccugaucagcaucuuccugagacuggugaagauccccacccacagacacaucgugggcaagcccugccccaagccccacagacugaaccacaugggcaucugcagcugcggccuguacaagcagcccggcgugcccgugagauggaagagaugaggacuaguuauaagacugacuagcccgaugggccucccaacgggcccuccuccccuccuugcaccgagauuaauaaaaaaaaaaaaaaaaaaaaaaaaaaaaaaaaaaaaaaaaaaaaaaaaaaaaaaaaaaaaaaaaaaaaaaaaaaaaaaaaaaaaaaaaaaaaaaaaaaaa

SEQ ID NO: 33066 - RNA, 1662 nt, Artificial Sequence
  mRNA product Design i-3 (A100) comprising derived and/or modified sequence from LASV(Togo/2016/7082;Clade VI)__AMR44577__GPCmut7 (opt4)
aggagaaagcuuaccaugggccagaucaucaccuucuuccaggaggugccccacgugaucgaggaggugaugaacaucgugcugaucgcccugagccugcuggccauccugaagggcguguacaacguggccaccugcggcaucaucggccuggugaccuuccuguuccugugcggcagaagcugcagccugaucuacaagggcagcuacgagcugcagacccuggagcugaacauggagacccugaacaugaccaugccccugagcugcaccaagaacagcagccaccacuacaucagagugggcaacgagaccggccuggagcugacccugaccaacaccagcaucaucaaccacaaguucugcaaccugagcgacgcccacaagagaaaccuguacgaccacgcccugaugagcauccugagcaccuuccaccugagcauccccaacuucaaccaguacgaggccaugagcugcgacuucaacggcggcaagaucagcgugcaguacaaccugagccacgccuacgccguggacgccgccgagcacugcggcaccguggccaacggcgugcugcagaccuucaugagaauggccuggggcggcagcuacaucgcccuggacagcggcagaggcaacugggacugcaucaugaccagcuaccaguaccugaucauccagaacaccaccugggaggaccacugccaguucagcagacccagccccaucggcuaccugggccugcugagccagagaaccagagacaucuacaucagcagaagacugcugggcaccuucaccuggacccugagcgacagcgagggcaacgagacccccggcggcuacugccugaccagauggaugcugaucgaggccgagcugaagugcuucggcaacaccgccguggccaagugcaacgagaagcacgacgaggaguucugcgacaugcugagacuguucgacuucaacaagcaggccauccagagacugaagagccccgcccagaugagcauccagcugaucaacaaggccgugaacgcccugaucaacgaccagcugaucaugaagaaccaccugagagacaugaugggcauccccuacugcaacuacagcaaguacugcuaccugaaccacaccagcagcggcagaaccagccugcccaagugcugccuggugagcaacggcagcuaccugaacgagacccacuucagcgacgacaucgagcagcaggccgacaacaugaucaccgagaugcugcagaaggaguacaucgacagacagggcaagaccccccugggccugguggaccuguucguguucagcaccagcuucuaccugaucagcaucuuccugcaccugaucaagauccccacccacagacacaucgugggcaagcccugccccaagccccacagacugaaccacaugggcaucugcagcugcggccuguacaagcagcccggcgugcccaccagauggaagagaugaggacuaguuauaagacugacuagcccgaugggccucccaacgggcccuccuccccuccuugcaccgagauuaauaaaaaaaaaaaaaaaaaaaaaaaaaaaaaaaaaaaaaaaaaaaaaaaaaaaaaaaaaaaaaaaaaaaaaaaaaaaaaaaaaaaaaaaaaaaaaaaaaaaa

SEQ ID NO: 33067 - RNA, 1662 nt, Artificial Sequence
  mRNA product Design i-3 (A100) comprising derived and/or modified sequence from LASV(KAK-428;Clade n.d. (VII))__ANH09740__GPCmut7 (opt4)
aggagaaagcuuaccaugggccagaucgugaccuucuuccaggaggugccccacgugaucgaggaggugaugaacaucgugcugaucgcccugagccugcuggccauccugaagggccuguacaacuucgccaccugcggcgugaucggccugaucaccuuccugcugcugugcggcagaagcugcagcgccaccuacaagggccaguacgagcugcagacccuggagcugaacauggagagccugaacaugaccaugccccugagcugcaccaagaacaacagccaccacuacaucagagccggcaacaacaccggccuggagcugacccugaccaacaccagcaucaucagccacaaguucugcaaccugagcgacgcccacaagaagaaccuguacgaccacacccugaugagcaucaucaccaccuuccaccugagcauccccaacuucaaccaguacgaggccaugagcugcgacuucaacggcggcaagaucagcauccaguacaaccugagccacagcuacgccggcgacgccgcccagcacugcggcaccguggccaacggcgugcugcagaccuucaugagaauggccuggggcggcagcuaccuggcccuggacagcggcagaagaggcugggacugcaucaucagcagcuaccaguaccugaucauccagaacaccaccugggacgaccacugccaguucagcagacccagccccaucggcuaccugggcuucgugagccagaagaccagagacaucuacaucagcagaagacugcugggcaccuucaccuggacccugagcgacagcgagggccacgacaugcccggcggcuacugccugaccagauggaugcugaucgaggccgaccugaagugcuucggcaacaccgccguggccaagugcaacgagaagcacgacgaggaguucugcgacauguggagacuguucgacuucaacaagcaggccauccagagacugaaggcccccgcccagaugaacauccagcugaucaacaaggccgugaacgcccugaucaacgaccagcugaugaugaagaaccaccugagagacaucaugggcauccccuacugcaacuacagcaaguucugcuaccugaacaacaccaccaccggcagaaccagccugcccagaugcugccugaucagcaacggcagcuaccugaacgagacccacuucagcgacgacaucgagcagcaggccgacaacaugaucaccgagaugcugcagaaggaguacauggacagacagggcaagaccccccugggccugguggaccuguucguguucagcaccagcuucuaccugaucaccaucuuccugcaccuggugaagauccccacccacagacacaucgugggcaagcccugccccaagccccacagacugaaccacaugggcaucugcagcugcggccuguacaagcagcccggcgugcccgugagauggaagagaugaggacuaguuauaagacugacuagcccgaugggccucccaacgggcccuccuccccuccuugcaccgagauuaauaaaaaaaaaaaaaaaaaaaaaaaaaaaaaaaaaaaaaaaaaaaaaaaaaaaaaaaaaaaaaaaaaaaaaaaaaaaaaaaaaaaaaaaaaaaaaaaaaaaa

SEQ ID NO: 33068 - RNA, 1662 nt, Artificial Sequence; identical to SEQ ID NO: 33062
  mRNA product Design i-3 (A100) comprising derived and/or modified sequence from LASV(Pinneo-NIG-1969;Clade I)__AIT17836__GPCmut7 (opt4)

SEQ ID NO: 33069 - RNA, 1662 nt, Artificial Sequence
  mRNA product Design i-3 (A100) comprising derived and/or modified sequence from LASV(ISTH0009-NIG-2011;Clade II)__AIT17404__GPCmut7 (opt4)
aggagaaagcuuaccaugggccagaucaucaccuucuuccaggaggugccccacgugaucgaggaggugaugaacaucgugcugaucgcccugagccugcuggccauccugaagggcaucuacaacguggccaccugcggccuguucggccuggugagcuuccugcugcugugcggcagaagcugcagcaccaccuacaagggcguguacgagcugcagacccuggagcuggacauggccagccugaacaugaccaugccccugagcugcaccaagaacaacagccaccacuacaucauggugggcaacgagaccggccuggagcugacccugaccaacaccagcaucaucaaccacaaguucugcaaccugagcgacgcccacaagaagaaccuguacgaccacgcccugaugagcaucaucagcaccuuccaccugagcauccccaacuucaaccaguacgaggccaugagcugcgacuucaacggcggcaagaucagcgugcaguacaaccugagccacgccuacgccguggacgccgccaaccacugcggcaccaucgccaacggcgugcugcagaccuucaugagaauggccuggggcggcagcuacaucgcccuggacagcggcaagggcagcugggacugcaucaugaccagcuaccaguaccugaucauccagaacaccaccugggaggaccacugccaguucagcagacccagccccaucggcuaccugggccugcugagccagagaaccagagacaucuacaucagcagaagacugcugggcaccuucaccuggacccugagcgacagcgagggcaacgagacccccggcggcuacugccugaccagauggaugcugaucgaggccgagcugaagugcuucggcaacaccgccguggccaagugcaacgagaagcacgacgaggaguucugcgacaugcugagacuguucgacuucaacaagcaggccaucagaagacugaagacccccgcccagaugagcauccagcugaucaacaaggccgugaacgcccugaucaacgaccagcugaucaugaagaaccaccugagagacaucaugggcauccccuacugcaacuacagcaaguacugcuaccugaaccacaccgugaccggcaagaccagccugcccagaugcugccuggugagcaacggcagcuaccugaacgagacccacuucagcgacgacaucgagcagcaggccgacaacaugaucaccgagcugcugcagaaggaguacauggacagacagggcaagaccccccugggccugguggaccuguucguguucagcaccagcuucuaccugaucagcaucuuccugcaccugaucaagauccccacccacagacacaucaccggcaagcccugccccaagccccacagacugaaccacaugggcaucugcagcugcggccuguacaagcaccccggcgugcccgugaaguggaagagaugaggacuaguuauaagacugacuagcccgaugggccucccaacgggcccuccuccccuccuugcaccgagauuaauaaaaaaaaaaaaaaaaaaaaaaaaaaaaaaaaaaaaaaaaaaaaaaaaaaaaaaaaaaaaaaaaaaaaaaaaaaaaaaaaaaaaaaaaaaaaaaaaaaaa

SEQ ID NO: 33070 - RNA, 1662 nt, Artificial Sequence
  mRNA product Design i-3 (A100) comprising derived and/or modified sequence from LASV(ISTH2010-NIG-2012;Clade II)__AIT17482__GPCmut7 (opt4)
aggagaaagcuuaccaugggccagaucaucaccuucuuccaggaggugccccacgugaucgaggaggugaugaacaucgugcugaucgcccugagccugcuggccauccugaagggcaucuacaacguggccaccugcggccuguucggccuggugagcuuccugcugcugugcggcagaagcugcagcaccaccuacaagggcguguacgagcugcagacccuggagcuggacauggccagccugaacaugaccaugccccugagcugcaccaagaacaacagccaccacuacaucauggugggcaacgagaccggccuggagcugacccugaccaacaccagcaucaucaaccacaaguucugcaaccugagcgacgcccacaagaagaaccuguacgaccacgcccugaugagcaucaucagcaccuuccaccugagcauccccaacuucaaccaguacgaggccaugagcugcgacuucaacggcggcaagaucagcgugcaguacaaccugagccacgccuacgccguggacgccgccaaccacugcggcaccaucgccaacggcgugcugcagaccuucaugagaauggccuggggcggcagcuacaucgcccuggacagcggcaagggcagcugggacugcaucaugaccagcuaccaguaccugaucauccagaacaucaccugggaggaccacugccaguucagcagacccagccccaucggcuaccugggccugcugagccagagaaccagagacaucuacaucagcagaagacugcugggcaccuucaccuggacccugagcgacagcgagggcaacgagacccccggcggcuacugccugaccagauggaugcugaucgaggccgagcugaagugcuucggcaacaccgccguggccaagugcaacgagaagcacgacgaggaguucugcgacaugcugagacuguucgacuucaacaagcaggccaucagaagacugaagacccccgcccagaugagcauccagcugaucaacaaggccgugaacgcccugaucaacgaccagcugaucaugaagaaccaccugagagacaucaugggcauccccuacugcaacuacagcaaguacugcuaccugaaccacaccgugaccggcaagaccagccugcccagaugcugccuggugagcaacggcagcuaccugaacgagacccacuucagcgacgacaucgagcagcaggccgacaacaugaucaccgagcugcugcagaaggaguacaucgacagacagggcaagaccccccugggccugguggaccuguucguguucagcaccagcuucuaccugaucagcaucuuccugcaccuggugaagauccccacccacagacacguggugggcaagcccugccccaagccccacagacugaaccacaugggcaucugcagcugcggccuguacaagcaccccggcgugcccgugaaguggaagagaugaggacuaguuauaagacugacuagcccgaugggccucccaacgggcccuccuccccuccuugcaccgagauuaauaaaaaaaaaaaaaaaaaaaaaaaaaaaaaaaaaaaaaaaaaaaaaaaaaaaaaaaaaaaaaaaaaaaaaaaaaaaaaaaaaaaaaaaaaaaaaaaaaaaa

SEQ ID NO: 33071 - RNA, 1662 nt, Artificial Sequence
  mRNA product Design i-3 (A100) comprising derived and/or modified sequence from LASV(Lassa virus/H.sapiens-wt/NGA/2015/ISTH_0543;Clade II)__AVO03639__GPCmut7 (opt4)
aggagaaagcuuaccaugggccagaucaucaccuucuuccaggaggugccccacgugaucgaggaggugaugaacaucgugcugaucgcccugagccugcuggccauccugaagggcaucuacaacguggccaccugcggccuguucggccuggugagcuuccugcugcugugcggcagaagcugcagcaccaccuacaagggcguguacgagcugcagacccuggagcuggacauggccaaccugaacaugaccaugccccugagcugcaccaagaacaacagccaccacuacaucauggugggcaacgagaccggccuggagcugacccugaccaacaccagcaucaucaaccacaaguucugcaaccugagcgacgcccacaagaagaaccuguacgaccacgcccugaugagcaucaucagcaccuuccaccugagcauccccaacuucaaccaguacgaggccaugagcugcgacuucaacggcggcaagaucagcgugcaguacaaccugagccacaccuacgccguggacgccgccaaccacugcggcaccaucgccaacggcgugcugcagaccuucaugagaauggccuggggcggcagcuacaucgcccuggacagcggcaagggcagcugggacugcaucaugaccagcuaccaguaccuggugauccagaacaccaccugggaggaccacugccaguucagcagacccagccccaucggcuaccugggccugcugagccagagaaccagagacaucuacaucagcagaagacugcugggcaccuucaccuggacccugagcgacagcgagggcaacgagacccccggcggcuacugccugaccagauggaugcugaucgaggccgagcugaagugcuucggcaacaccgccguggccaagugcaacgagaagcacgacgaggaguucugcgacaugcugagacuguucgacuucaacaagcaggccaucagaagacugaagacccccgcccagaugagcauccagcugaucaacaaggccgugaacgcccugaucaacgaccagcugaucaugaagaaccaccugagagacaucaugggcauccccuacugcaacuacagcaaguacugcuaccugaaccacaccgugaccggcaagaccagccugcccagaugcugccuggugagcaacggcagcuaccugaacgagacccacuucagcgacgacaucgagcagcaggccgacaacaugaucaccgagcugcugcagaaggaguacaucgacagacagggcaagaccccccugggccugguggaccuguucguguucagcaccagcuucuaccugaucagcaucuuccugcaccuggugaagauccccacccacagacacaucaccggcaagcccugccccaagccccacagacugaaccacaugggcaucugcagcugcggccuguacaagcaccccggcgugcccgugaaguggaagagaugaggacuaguuauaagacugacuagcccgaugggccucccaacgggcccuccuccccuccuugcaccgagauuaauaaaaaaaaaaaaaaaaaaaaaaaaaaaaaaaaaaaaaaaaaaaaaaaaaaaaaaaaaaaaaaaaaaaaaaaaaaaaaaaaaaaaaaaaaaaaaaaaaaaa

SEQ ID NO: 33072 - RNA, 1662 nt, Artificial Sequence
  mRNA product Design i-3 (A100) comprising derived and/or modified sequence from LASV(Lassa virus/H.sapiens-wt/NGA/2016/ISTH_0009;Clade II)__AVO03571__GPCmut7 (opt4)
aggagaaagcuuaccaugggccagaucaucaccuucuuccaggaggugccccacgugaucgaggaggugaugaacaucgugcugaucgcccugagccugcuggccauccugaagggcaucuacaacguggccaccugcggccugcugggccuggugagcuuccugcugcugugcggcagaagcugcagcaccaccuacaagggcguguacgagcugcagacccuggagcuggacauggccagccugaacaugaccaugccccugagcugcaccaagaacaacagccaccacuacaucauggugggcaacgagaccggccuggagcugacccugaccaacaccagcaucaucaaccacaaguucugcaaccugagcgacgcccacaagaagaaccuguacgaccacgcccugaugagcaucaucagcaccuuccaccugagcauccccaacuucaaccaguacgaggccaugagcugcgacuucaacggcggcagaaucagcgugcaguacaaccugagccacagcuacgccguggacgccgccaaccacugcggcaccaucgccaacggcgugcugcagaccuucaugagaauggccuggggcggcagcuacaucgcccuggacagcggcaagggcagcugggacugcaucaugaccagcuaccaguaccugaucauccagaacaccaccugggaggaccacugccaguucagcagacccagccccaucggcuaccugggccugcugagccagagaaccagagacaucuacaucagcagaagacugcugggcaccuucaccuggacccugagcgacagcgagggcaacgagacccccggcggcuacugccugaccagauggaugcugaucgaggccgagcugaagugcuucggcaacaccgccguggccaagugcaacgagaagcacgacgaggaguucugcgacaugcugagacuguucgacuucaacaagcaggccaucagaagacugaagacccccgcccagaugagcauccagcugaucaacaaggccgugaacgcccugaucaacgaccagcugaucaugaagaaccaccugagagacaucaugggcauccccuacugcaacuacagcaaguacugcuaccugaaccacaccgugaccggcaagaccagccugcccagaugcugccuggugagcaacggcagcuaccugaacgagacccacuucagcgacgacaucgagcagcaggccgacaacaugaucaccgagcugcugcagaaggaguacaucgacagacagggcaagaccccccugggccugguggaccuguucguguucagcaccagcuucuaccugaucagcaucuuccugcaccuggugaagauccccacccacagacacaucaccggcaagcccugccccaagccccacagacugaaccacaugggcaucugcagcugcggccuguacaaccaccccggcgugcccgugaaguggaagagaugaggacuaguuauaagacugacuagcccgaugggccucccaacgggcccuccuccccuccuugcaccgagauuaauaaaaaaaaaaaaaaaaaaaaaaaaaaaaaaaaaaaaaaaaaaaaaaaaaaaaaaaaaaaaaaaaaaaaaaaaaaaaaaaaaaaaaaaaaaaaaaaaaaaa

SEQ ID NO: 33073 - RNA, 1662 nt, Artificial Sequence
  mRNA product Design i-3 (A100) comprising derived and/or modified sequence from LASV(Lassa virus/H.sapiens-wt/NGA/2016/ISTH_0017;Clade II)__AVO03567__GPCmut7 (opt4)
aggagaaagcuuaccaugggccagaucaucaccuucuuccaggaggugccccacgugaucgaggaggugaugaacaucgugcugaucgcccugagccugcuggccauccugaagggcaucuacaacguggccaccugcggccuguucggccuggugagcuuccugcugcugugcggcagaagcugcagcaccaccuacaagggcguguacgagcugcagacccuggagcuggacauggccagccugaacaugaccaugccccugagcugcaccaagaacaacagccaccacuacaucauggugggcaacgagaccggccuggagcugacccugaccaacaccagcaucaucaaccacaaguucugcaaccugagcgacgcccacaagaagaaccuguacgaccacgcccugaugagcaucaucagcaccuuccaccugagcauccccaacuucaaccaguacgaggccaugagcugcgacuucaacggcggcaagaucagcgugcaguacaaccugagccacaccuacgccaucgacgccgccaaccacugcggcaccaucgccaacggcgugcugcagaccuucaugagaauggccuggggcggcagcuacaucgcccuggacagcggcaagggcagcugggacugcaucaugaccagcuaccaguaccugaucauccagaacaccaccugggaggaccacugccaguucagcagacccagccccaucggcuaccugggccugcugagccagagaaccagagacaucuacaucagcagaagacugcugggcaccuucaccuggacccugagcgacagcgagggcaacgagacccccggcggcuacugccugaccagauggaugcugaucgaggccgagcugaagugcuucggcaacaccgccguggccaagugcaacgagaagcacgacgaggaguucugcgacaugcugagacuguucgacuucaacaagcaggccaucagaagacugaagacccccgcccagaugagcauccagcugaucaacaaggccgugaacgcccugaucaacgaccagcugaucaugaagaaccaccugagagacaucaugggcauccccuacugcaacuacagcaaguacugcuaccugaaccacaccgugaccggcaagaccagccugcccagaugcugccuggugagcaacggcagcuaccugaacgagacccacuucagcgacgacaucgagcagcaggccgacaacaugaucaccgagcugcugcagaaggaguacauggacagacagggcaagaccccccugggccugguggaccuguucguguucagcaccagcuucuaccugaucagcaucuuccugcaccuggugagaauccccacccacagacacgugaucggcaagcccugccccaagccccacagacugaaccacaugggcaucugcagcugcggccuguacaagcaccccggcgugcccgugaaguggaagagaugaggacuaguuauaagacugacuagcccgaugggccucccaacgggcccuccuccccuccuugcaccgagauuaauaaaaaaaaaaaaaaaaaaaaaaaaaaaaaaaaaaaaaaaaaaaaaaaaaaaaaaaaaaaaaaaaaaaaaaaaaaaaaaaaaaaaaaaaaaaaaaaaaaaa

SEQ ID NO: 33074 - RNA, 1662 nt, Artificial Sequence
  mRNA product Design i-3 (A100) comprising derived and/or modified sequence from LASV(Lassa virus/H.sapiens-wt/NGA/2018/ISTH_0959;Clade II)__AVV65099__GPCmut7 (opt4)
aggagaaagcuuaccaugggccagaucaucaccuucuuccaggaggugccccacgugaucgaggaggugaugaacaucgugcugaucgcccugagccugcuggccauccugaagggcaucuacaacguggugaccugcggccuguucggccuggugagcuuccugcugcugugcggcagaagcugcagcaccaccuacaagggcguguacgagcugcagacccuggagcuggacauggccagccugaacaugaccaugccccugagcugcaccaagaacaacagccaccacuacaucauggugggcaacgagaccggccuggagcugacccugaccaacaccagcaucaucaaccacaaguucugcaaccugagcgacgcccacaagaagaaccuguacgaccacgcccugaugagcaucaucagcaccuuccaccugagcauccccaacuucaaccaguacgaggccaugagcugcgacuucaacggcggcaagaucagcgugcaguacaaccugagccacgccuacgccaucgacgccgccaaccacugcggcaccaucgccaacggcgugcugcagaccuucaugagaauggccuggggcggcagcuacaucgcccuggacagcggcaagggcagcugggacugcaucaugaccagcuaccaguaccugaucauccagaacaccaccugggaggaccacugccaguucagcagacccagccccaucggcuaccugggccugcugagccagagaaccagagacaucuacaucagcagaagacugcugggcaccuucaccuggacccugagcgacagcgagggcaacgagacccccggcggcuacugccugaccagauggaugcugaucgaggccgagcugaagugcuucggcaacaccgccguggccaagugcaacgagaagcacgacgaggaguucugcgacaugcugagacuguucgacuucaacaagcaggccaucagaagacugaagacccccgcccagaugagcauccagcugaucaacaaggccgugaacgcccugaucaacgaccagcugaucaugaagaaccaccugagagacaucaugggcauccccuacugcaacuacagcaaguacugcuaccugaaccacaccgugaccggcaagaccagccugcccagaugcugccuggugagcaacggcagcuaccugaacgagacccacuucagcgacgacaucgagcagcaggccgacaacaugaucaccgagcugcugcagaaggaguacaucgacagacagggcaagaccccccugggccugguggaccuguucguguucagcaccagcuucuaccugaucagcaucuuccugcaccuggugaagauccccacccacagacacgugaucggcaagcccugccccaagccccacagacugaaccacaugggcaucugcagcugcggccuguacaagcaccccggcgugcccgugaaguggaagagaugaggacuaguuauaagacugacuagcccgaugggccucccaacgggcccuccuccccuccuugcaccgagauuaauaaaaaaaaaaaaaaaaaaaaaaaaaaaaaaaaaaaaaaaaaaaaaaaaaaaaaaaaaaaaaaaaaaaaaaaaaaaaaaaaaaaaaaaaaaaaaaaaaaaa

SEQ ID NO: 33075 - RNA, 1662 nt, Artificial Sequence
  mRNA product Design i-3 (A100) comprising derived and/or modified sequence from LASV(LASV003-NIG-2008;Clade II)__AIT17580__GPCmut7 (opt4)
aggagaaagcuuaccaugggccagaucaucaccuucuuccaggaggugccccacgugaucgaggaggugaugaacaucgugcugaucgcccugagccugcuggccauccugaagggcaucuacaacguggccaccugcggccuguucggccuggugagcuuccugcugcugugcggcagaagcugcagcaccaccuacaagggcguguacgagcugcagacccuggagcuggacauggccagccugaacaugaccaugccccugagcugcaccaagaacaacagccaccacuacaucauggugggcaacgagaccggccuggagcugacccugaccaacaccagcaucaucaaccacaaguucugcaaccugagcgacgcccacaagaagaaccuguacgaccacgcccugaugagcaucaucagcaccuuccaccugagcauccccaacuucaaccaguacgaggccaugagcugcgacuucaacggcggcaagaucagcgugcaguacaaccugagccacaccuacgccguggacgccgccaaccacugcggcaccaucgccaacggcgugcugcagaccuucaugagaauggccuggggcggcagcuacaucgcccuggacagcggcaagggcagcugggacugcaucaugaccagcuaccaguaccugaucauccagaacaccaccugggaggaccacugccaguucagcagacccagccccaucggcuaccugggccugcugagccagagaaccagagacaucuacaucagcagaagacugcugggcaccuucaccuggacccugagcgacagcgagagcaacgagacccccggcggcuacugccugaccagauggaugcugaucgaggccgagcugaagugcuucggcaacaccgccguggccaagugcaacgagaagcacgacgaggaguucugcgacaugcugagacuguucgacuucaacaagcaggccaucagaagacugaaggcccccgcccagaugagcauccagcugaucaacaaggccgugaacgcccugaucaacgaccagcugaucaugaagaaccaccugagagacaucaugggcauccccuacugcaacuacagcaaguacugcuaccugaaccacaccgugaccggcagaaccagccugcccagaugcugccuggugagcaacggcagcuaccugaacgagacccacuucagcgacgacaucgagcagcaggccgacaacaugaucaccgagcugcugcagaaggaguacauggacagacagggcaagaccccccugggccugguggaccuguucguguucagcaccagcuucuaccugaucagcaucuuccugcaccuggugaagauccccacccacagacacgugaucggcaagcccugccccaagccccacagacugaaccacaugggcaucugcagcugcggccuguacaagcaccccggcgugcccgugaaguggaagagaugaggacuaguuauaagacugacuagcccgaugggccucccaacgggcccuccuccccuccuugcaccgagauuaauaaaaaaaaaaaaaaaaaaaaaaaaaaaaaaaaaaaaaaaaaaaaaaaaaaaaaaaaaaaaaaaaaaaaaaaaaaaaaaaaaaaaaaaaaaaaaaaaaaaa

SEQ ID NO: 33076 - RNA, 1662 nt, Artificial Sequence
  mRNA product Design i-3 (A100) comprising derived and/or modified sequence from LASV(LASV035-NIG-2009;Clade II)__AIT17588__GPCmut7 (opt4)
aggagaaagcuuaccaugggccagaucaucaccuucuuccaggaggugccccacgugaucgaggaggugaugaacaucgugcugaucgcccugagccugcuggccauccugaagggcaucuacaacguggccaccugcggccuguucggccuggugagcuuccugcugcugugcggcagaagcugcagcaccaccuacaagggcguguacgagcugcagacccuggagcuggacauggccagccugaacaugaccaugccccugagcugcaccaagaacaacagccaccacuacaucauggugggcaacgagaccggccuggagcugacccugaccaacaccagcaucaucaaccacaaguucugcaaccugagcgacgcccacaagaagaaccuguacgaccacgcccugaugagcaucaucagcaccuuccaccugagcauccccaacuucaaccaguacgaggccaugagcugcgacuucaacggcggcaagaucagcgugcaguacaaccugagccacgccuacgccguggacgccgccaaccacugcggcaccaucgccaacggcgugcugcagaccuucaugagaauggccuggggcggcagcuacaucgcccuggacagcggcaagggcagcugggacugcaucaugaccagcuaccaguaccugaucauccagaacaccaccugggaggaccacugccaguucagcagacccagccccaucggcuaccugggccugcugagccagagaaccagagacaucuacaucagcagaagacugcugggcaccuucaccuggacccugagcgacagcgagggcaacgagacccccggcggcuacugccugaccagauggaugcugaucgaggccgagcugaagugcuucggcaacaccgccguggccaagugcaacgagaagcacgacgaggaguucugcgacaugcugagacuguucgacuucaacaagcaggccaucagaagacugaaggcccccgcccagaugagcauccagcugaucaacaaggccgugaacgcccugaucaacgaccagcugaucaugaagaaccaccugagagacaucaugggcauccccuacugcaacuacagcaaguacugcuaccugaaccacaccgugaccggcaagaccagccugcccagaugcugccuggugagcaacggcagcuaccugaacgagacccacuucagcgacgacaucgagcagcaggccgacaacaugaucaccgagcugcugcagaaggaguacaucgacagacagggcaagaccccccugggccugguggaccuguucguguucagcaccagcuucuaccugaucagcaucuuccugcaccuggugaagauccccacccacagacacgugaucggcaagcccugccccaagccccacagacugaaccacaugggcaucugcagcugcggccuguacaagcaccccggcgugcccgugaaguggaagagaugaggacuaguuauaagacugacuagcccgaugggccucccaacgggcccuccuccccuccuugcaccgagauuaauaaaaaaaaaaaaaaaaaaaaaaaaaaaaaaaaaaaaaaaaaaaaaaaaaaaaaaaaaaaaaaaaaaaaaaaaaaaaaaaaaaaaaaaaaaaaaaaaaaaa

SEQ ID NO: 33077 - RNA, 1662 nt, Artificial Sequence
  mRNA product Design i-3 (A100) comprising derived and/or modified sequence from LASV(LASV1000-NIG-2009;Clade II)__AIT17782__GPCmut7 (opt4)
aggagaaagcuuaccaugggccagaucaucaccuucuuccaggaggugccccacgugaucgaggaggugaugaacaucgugcugaucgcccugagccugcuggccauccugaagggcaucuacaacguggccaccugcggccuguucggccuggugagcuuccugcugcugugcggcagaagcugcagcaccaccuacaagggcguguacgagcugcagacccuggagcuggacauggccagccugaacaugaccaugccccugagcugcaccaagaacaacagccaccacuacaucauggugggcaacgagaccggccuggagcugacccugaccaacaccagcaucaucaaccacaaguucugcaaccugagcgacgcccacaagaagaaccuguacgaccacgcccugaugagcaucaucagcaccuuccaccugagcauccccaacuucaaccaguacgaggccaugagcugcgacuucaacggcggcaagaucagcgugcaguacaaccugagccacaccuacgccguggacgccgccaaccacugcggcaccaucgccaacggcgugcugcagaccuucaugagaauggccuggggcggcagcuacaucgcccuggacagcggcaagggcagcugggacugcaucaugaccagcuaccaguaccugaucauccagaacaccaccugggaggaccacugccaguucagcagacccagccccaucggcuaccugggccugcugagccagagaaccagagacaucuacaucagcagaagacugcugggcaccuucaccuggacccugagcgacagcgagggcaacgagacccccggcggcuacugccugaccagauggaugcugaucgaggccgagcugaagugcuucggcaacaccgccguggccaagugcaacgagaagcacgacgaggaguucugcgacaugcugagacuguucgacuucaacaagcaggccaucaagagacugaagacccccgcccagaugagcauccagcugaucaacaaggccgugaacgcccugaucaacgaccagcugaucaugaagaaccaccugagagacaucaugggcauccccuacugcaacuacagcaaguacugcuaccugaaccacaccgugaccggcaagaccagccugcccagaugcugccuggugagcaacggcagcuaccugaacgagacccacuucagcgacgacaucgagcagcaggccgacaacaugaucaccgagcugcugcagaaggaguacaucgacagacagggcaagaccccccugggccugguggaccuguucguguucagcaccagcuucuaccugaucagcaucuuccugcaccuggugaagauccccacccacagacacguggugggcaagcccugccccaagccccacagacugaaccacaugggcaucugcagcugcggccuguacaagcaccccggcgugcccgugaaguggaagagaugaggacuaguuauaagacugacuagcccgaugggccucccaacgggcccuccuccccuccuugcaccgagauuaauaaaaaaaaaaaaaaaaaaaaaaaaaaaaaaaaaaaaaaaaaaaaaaaaaaaaaaaaaaaaaaaaaaaaaaaaaaaaaaaaaaaaaaaaaaaaaaaaaaaa

SEQ ID NO: 33078 - RNA, 1662 nt, Artificial Sequence
  mRNA product Design i-3 (A100) comprising derived and/or modified sequence from LASV(LASV221-NIG-2010;Clade II)__AIT17624__GPCmut7 (opt4)
aggagaaagcuuaccaugggccagaucaucaccuucuuccaggaggugccccacgugaucgaggaggugaugaacaucgugcugaucgcccugagccugcuggccauccugaagggcaucuacaacguggccaccugcggccuguucggccuggugagcuuccugcugcugugcggcagaagcugcagcaccaccuacaagggcguguacgagcugcagacccuggagcuggacauggccagccugaacaugaccaugccccugagcugcaccaagaacaacagccaccacuacaucauggugggcaacgagaccggccuggagcugacccugaccaacaccagcaucaucaaccacaaguucugcaaccugagcgacgcccacaagaagaaccuguacgaccacgcccugaugagcaucaucagcaccuuccaccugagcauccccaacuucaaccaguacgaggccaugagcugcgacuucaacggcggcaagaucagcgugcaguacaaccugagccacaccuacgccaucgacgccgccaaccacugcggcaccaucgccaacggcgugcugcagaccuucaugagaauggccuggggcggcagcuacaucgcccuggacagcggcaagggcagcugggacugcaucaugaccagcuaccaguaccugaucauccagaacaccaccugggaggaccacugccaguucagcagacccagccccaucggcuaccugggccugcugagccagagaaccagagacaucuacaucagcagaagacugcugggcaccuucaccuggacccugagcgacagcgagggcaacgagacccccggcggcuacugccugaccagauggaugcugaucgaggccgagcugaagugcuucggcaacaccgccguggccaagugcaacgagaagcacgacgaggaguucugcgacaugcugagacuguucgacuucaacaagcaggccaucagaagacugaagacccccgcccagaugagcauccagcugaucaacaaggccgugaacgcccugaucaacgaccagcugaucaugaagaaccaccugagagacaucaugggcauccccuacugcaacuacagcaaguacugcuaccugaaccacaccgugaccggcaagaccagccugcccagaugcugccuggugagcaacggcagcuaccugaacgagacccacuucagcgacgacaucgagcagcaggccgacaacaugaucaccgagaugcugcagaaggaguacauggacagacagggcaagaccccccugggccugguggaccuguucguguucagcaccagcuucuaccugaucagcaucuuccugcaccuggugaagauccccacccacagacacgugaucggcaagcccugccccaagccccacagacugaaccacaugggcaucugcagcugcggccuguacaagcaccccggcgugcccgugaaguggaagagaugaggacuaguuauaagacugacuagcccgaugggccucccaacgggcccuccuccccuccuugcaccgagauuaauaaaaaaaaaaaaaaaaaaaaaaaaaaaaaaaaaaaaaaaaaaaaaaaaaaaaaaaaaaaaaaaaaaaaaaaaaaaaaaaaaaaaaaaaaaaaaaaaaaaa

SEQ ID NO: 33079 - RNA, 1662 nt, Artificial Sequence
  mRNA product Design i-3 (A100) comprising derived and/or modified sequence from LASV(LASV237-NIG-2010;Clade II)__AIT17638__GPCmut7 (opt4)
aggagaaagcuuaccaugggccagaucaucaccuucuuccaggaggugccccacgugaucgaggaggugaugaacaucgugcugaucgcccugagccugcuggccauccugaagggcaucuacaacguggccaccugcggccuguucggccuggugagcuuccugcugcugugcggcagaagcugcagcaccaccuacaagggcguguacgagcugcagacccuggagcuggacauggccagccugaacaugaccaugccccugagcugcaccaagaacaacagccaccacuacaucauggugggcaacgagaccggccuggagcugacccugaccaacaccagcaucaucaaccacaaguucugcaaccugagcgacgcccacaagaaggaccuguacgaccacgcccugaugagcaucaucagcaccuuccaccugagcauccccaacuucaaccaguacgaggccaugagcugcgacuucaacggcggcaagaucagcgugcaguacaaccugagccacaccuacgccguggacgccgccaaccacugcggcaccaucgccaacggcgugcugcagaccuucaugagaauggccuggggcggcagcuacaucgcccuggacagcggcaagggcagcugggacugcaucaugaccagcuaccaguaccugaucauccagaacaccaccugggaggaccacugccaguucagcagacccagccccaucggcuaccugggccugcugagccagagaaccagagacaucuacaucagcagaagacugcugggcaccuucaccuggacccugagcgacagcgagggcaacgagacccccggcggcuacugccugaccagauggaugcugaucgaggccgagcugaagugcuucggcaacaccgccguggccaagugcaacgagaagcacgacgaggaguucugcgacaugcugagacuguucgacuucaacaagcaggccaucagaagacugaagacccccgcccagaugagcauccagcugaucaacaaggccgugaacgcccugaucaacgaccagcugaucaugaagaaccaccugagagacaucaugggcauccccuacugcaacuacagcaaguacugcuaccugaaccacaccgugaccggcaagaccagccugcccagaugcugccuggugagcaacggcagcuaccugaacgagacccacuucagcgacgacaucgagcagcaggccgacaacaugaucaccgagcugcugcagaaggaguacauggacagacagggcaagaccccccugggccugguggaccuguucguguucagcaccagcuucuaccugaucagcaucuuccugcaccugaucaagauccccacccacagacacaucaccggcaagcccugccccaagccccacagacugaaccacaugggcaucugcagcugcggccuguacaagcaccccggcgugcccgugaaguggaagagaugaggacuaguuauaagacugacuagcccgaugggccucccaacgggcccuccuccccuccuugcaccgagauuaauaaaaaaaaaaaaaaaaaaaaaaaaaaaaaaaaaaaaaaaaaaaaaaaaaaaaaaaaaaaaaaaaaaaaaaaaaaaaaaaaaaaaaaaaaaaaaaaaaaaa

SEQ ID NO: 33080 - RNA, 1662 nt, Artificial Sequence
  mRNA product Design i-3 (A100) comprising derived and/or modified sequence from LASV(LASV253-NIG-2011;Clade II)__AIT17670__GPCmut7 (opt4)
aggagaaagcuuaccaugggccagaucaucaccuucuuccaggaggugccccacgugaucgaggaggugaugaacaucgugcugaucgcccugagccugcuggccauccugaagggcaucuacaacguggccaccugcggccuguucggccuggugagcuuccugcugcugugcggcagaagcugcagcaccaccuacaagggcguguacgagcugcagacccuggagcuggacauggccagccugaacaugaccaugccccugagcugcaccaagaacaacagccaccacuacaucauggugggcaacgagaccggccuggagcugacccugaccaacaccagcaucaucaaccacaaguucugcaaccugagcgacgcccacaagaagaaccuguacgaccacgcccugaugagcaucaucagcaccuuccaccugagcauccccaacuucaaccaguacgaggccaugagcugcgacuucaacggcggcaagaucagcgugcaguacaaccugagccacaccuacgccguggacgccgccaaccacugcggcaccaucgccaacggcgugcugcagaccuucaugagaauggccuggggcggcagcuacaucgcccuggacagcggcaagggcagcugggacugcaucaugaccagcuaccaguaccugaucauccagaacaccaccugggaggaccacugccaguucagcagacccagccccaucggcuaccugggccugcugagccagagaaccagagacaucuacaucagcagaagacugcugggcaccuucaccuggacccugagcgacagcgagggcaacgagacccccggcggcuacugccugaccagauggaugcugaucgaggccgagcugaagugcuucggcaacaccgccguggccaagugcaacgagaagcacgacgaggaguucugcgacaugcugagacuguucgacuucaacaagcaggccaucagaagacugaaggcccccgcccagaugagcauccagcugaucaacaaggccgugaacgcccugaucaacgaccagcugaucaugaagaaccaccugagagacaucaugggcauccccuacugcaacuacagcaaguacugcuaccugaaccacaccgugaccggcagaaccagccugcccagaugcugccuggugagcaacggcagcuaccugaacgagacccacuucagcgacgacaucgagcagcaggccgacaacaugaucaccgagcugcugcagaaggaguacaucgacagacagggcaagaccccccugggccugguggaccuguucguguucagcaccagcuucuaccugaucagcaucuuccugcaccuggugaagauccccacccacagacacaucaucggcaagcccugccccaagccccacagacugaaccacaugggcaucugcagcugcggccuguacaagcaccccggcgugcccgugaaguggaagagaugaggacuaguuauaagacugacuagcccgaugggccucccaacgggcccuccuccccuccuugcaccgagauuaauaaaaaaaaaaaaaaaaaaaaaaaaaaaaaaaaaaaaaaaaaaaaaaaaaaaaaaaaaaaaaaaaaaaaaaaaaaaaaaaaaaaaaaaaaaaaaaaaaaaa

SEQ ID NO: 33081 - RNA, 1662 nt, Artificial Sequence
  mRNA product Design i-3 (A100) comprising derived and/or modified sequence from LASV(LASV254-NIG-2011;Clade II)__AIT17674__GPCmut7 (opt4)
aggagaaagcuuaccaugggccagaucaucaccuucuuccaggaggugccccacgugaucgaggaggugaugaacaucgugcugaucgcccugagccugcuggccauccugaagggcaucuacaacguggccaccugcggccuguucggccuggugagcuuccugcugcugugcggcagaagcugcagcaccaccuacaagggcguguacgagcugcagacccuggagcuggacaugaccaaccugaacaugaccaugccccugagcugcaccaagaacaacagccaccacuacaucauggugggcaacgagaccggccuggagcugacccugaccaacaccagcaucaucaaccacaaguucugcaaccugagcgacgcccacaagaagaaccuguacaaccacgcccugaugagcaucaucagcaccuuccaccugagcauccccaacuucaaccaguacgaggccaugagcugcgacuucaacggcggcaagaucagcgugcaguacaaccugagccacagcuacgccguggacgccgccaaccacugcggcaccaucgccaacggcgugcugcagaccuucaugagaauggccuggggcggcagcuacaucgcccuggacagcggcaagggcaacugggacugcaucaugaccagcuaccaguaccugaucauccagaacaccaccugggaggaccacugccaguucagcagacccagccccaucggcuaccugggccugcugagccagagaaccagagacaucuacaucagcagaagacugcugggcaccuucaccuggacccugagcgacagcgagggcaacgagacccccggcggcuacugccugaccagauggaugcugaucgaggccgagcugaagugcuucggcaacaccgccguggccaagugcaacgagaagcacgacgaggaguucugcgacaugcugagacuguucgacuucaacaagcaggccaucagaagacugaagacccccgcccaggccaacauccagcugaucaacaaggccgugaacgcccugaucaacgaccagcugaucaugaagaaccaccugagagacaucaugggcauccccuacugcaacuacagcaaguacugcuaccugaaccacaccgugaccggcaagaccagccugcccagaugcugccuggugagcaacggcagcuaccugaacgagacccacuucagcgacgacaucgagcagcaggccgacaacaugaucaccgagcugcugcagaaggaguacauggacagacagggcaagaccccccugggccugguggaccuguucguguucagcaccagcuucuaccugaucagcaucuuccugcaccuggugaagauccccacccacagacacgugaucggcaagcccugccccaagccccacagacugaaccacaugggcaucugcagcugcggccuguacaagcaccccggcgugcccgugaaguggaagagaugaggacuaguuauaagacugacuagcccgaugggccucccaacgggcccuccuccccuccuugcaccgagauuaauaaaaaaaaaaaaaaaaaaaaaaaaaaaaaaaaaaaaaaaaaaaaaaaaaaaaaaaaaaaaaaaaaaaaaaaaaaaaaaaaaaaaaaaaaaaaaaaaaaaa

SEQ ID NO: 33082 - RNA, 1662 nt, Artificial Sequence
  mRNA product Design i-3 (A100) comprising derived and/or modified sequence from LASV(Nig08-A19;Clade III)__ADU56618__GPCmut7 (opt4)
aggagaaagcuuaccaugggccagaucgugaccuucuuccaggaggugccccacgugaucgaggaggugaugaacaucgugcugaucgcccugagcauccuggccauccugaagggccuguacaacaucgccaccugcggccugaucggccuggugaccuuccugcugcugagcggcagaagcugcagcaugaccuacaagggcguguacgagcugcagacccuggagcugaacaugaacacccugaacaugaccaugccccugagcugcaccaagaacaacagccaccacuacaucauggugggcaacgagaccggccuggagcugacccugaccaacaccagccugcugcaccacaaguucugcaaccugagcgacgcccacaagaagaaccuguacgaccacacccugaugagcaucaucagcaccuuccaccugagcauccccaacuucaaccaguacgaggccaugagcugcgacuucaacggcggcaagaucaccgugcaguacaaccugagccacagcuacgccaucgacgccgccaaccacugcggcaccguggccaacggcgugcugcagaccuucaugagaauggccuggggcggcagcuacaucgcccuggacagcggcagaggcaagugggacugcaucaugaccagcuaccaguaccugaucauccagaacaccaccugggaggaccacugccaguucagcagacccagccccaucggcuaccugggccugcugagccagagaaccagagacaucuacaucagcagaagacugcugggcaccuucaccuggacccugagcgacagcgagggcaacgagacccccggcggcuacugccugaccagauggaugcugaucgaggccgagcugaagugcuucggcaacaccgccguggccaagugcaacgagaagcacgacgaggaguucugcgacaugcugagacuguucgacuucaacaagcaggccaucagaagacugaaggcccccgcccagaugagcauccagcugaucaacaaggccgugaacgcccugaucaacgaccagcugaucaugaagaaccaccugagagacaucaugggcauccccuacugcaacuacagcaaguacugcuaccugaaccacaccagcaccggcagaaccagccugcccagaugcugccuggugagcaacggcagcuaccugaacgagacccacuucagcgacgacaucgagcagcaggccgacaacaugaucaccgagaugcugcagaaggaguaccuggacagacagggcaagaccccccugggccugguggaccuguucguguucagcaccagcuucuaccugaucagcaucuuccugcaccuggugaagauccccacccacagacacaucgugggcaagcccugccccaagccccacagacugaaccacaugggcaucugcagcugcggccuguacaagcagcccggcgugcccgugagauggaagagaugaggacuaguuauaagacugacuagcccgaugggccucccaacgggcccuccuccccuccuugcaccgagauuaauaaaaaaaaaaaaaaaaaaaaaaaaaaaaaaaaaaaaaaaaaaaaaaaaaaaaaaaaaaaaaaaaaaaaaaaaaaaaaaaaaaaaaaaaaaaaaaaaaaaa

SEQ ID NO: 33083 - RNA, 1665 nt, Artificial Sequence
  mRNA product Design i-3 (A100) comprising derived and/or modified sequence from LASV(G1180-SLE-2010;Clade IV)__AIT17168__GPCmut7 (opt4)
aggagaaagcuuaccaugggccagaucgugaccuucuuccaggaggugccccacgugaucgaggaggugaugaacaucgugcugaucgcccugagcauccuggccgugcugaagggccuguacaacuucgccaccugcggccuggugggccugcugaccuuccugcugcugugcggcagaagcugcaccgccagcagauacaagggcguguacgagcugcagacccuggagcugaacauggagacccugaacaugaccaugccccugagcugcaccaagaacaacagccaccacuacaucauggugggcaacgagaccggccuggagcugacccugaccaacaccagcaucaucaaccacaaguucugcaaccugagcgacgcccacaagaagaaccuguacgaccacgcccugaugagcaucaucagcaccuuccaccugagcauccccaacuucaaccaguacgaggccaugagcugcgacuucaacggcggcaagaucagcgugcaguacaaccugagccacagcuacgccggcgacgccgccaaccacugcggcaccguggccaacggcgugcugcagaccuucaugagaauggccuggggcggcagcuacaucgcccuggacagcggccacggcagcugggacugcaucaugaccagcuaccaguaccugaucauccagaacaccaccugggaggaccacugccaguucagcagacccagccccaucggcuaccugggccugcugagccagagaaccagagacaucuacaucagcagaagacugcugggcaccuucaccuggacccugagcgacagcgagggcaaggacacccccggcggcuacugccugaccagauggaugcugaucgaggccgagcugaagugcuucggcaacaccgccguggccaagugcaacgagaagcacgacgaggaguucugcgacaugcugagacuguucgacuucaacaagcaggccauccagagacugaaggcccccgcccagaugagcauccagcugaucaacaaggccgugaacgcccugaucaacgaccagcugaucaugaagaaccaccugagagacaucaugggcauccccuacugcaacuacagcaaguacugcuaccugaaccacaccaccaccggcaagaccagccugcccaagugcugccuggugagcaacggcagcuaccugaacgagacccacuucagcgacgacaucgagcagcaggccgacaacaugaucaccgagaugcugcagaaggaguacauggagagacagggcaagaccccccugggccugguggaccuguucguguucagcaccagcuucuaccugaucagcaucuuccugcaccuggugaagauccccacccacagacacaucgugggcaagagcugccccaagccccacagacugaaccacaugggcaucugcagcugcggccuguacaagcagcccggcgugcccgugaaguggaagagaugaggacuaguuauaagacugacuagcccgaugggccucccaacgggcccuccuccccuccuugcaccgagauuaauaaaaaaaaaaaaaaaaaaaaaaaaaaaaaaaaaaaaaaaaaaaaaaaaaaaaaaaaaaaaaaaaaaaaaaaaaaaaaaaaaaaaaaaaaaaaaaaaaaaa

SEQ ID NO: 33084 - RNA, 1665 nt, Artificial Sequence
  mRNA product Design i-3 (A100) comprising derived and/or modified sequence from LASV(G1442-SLE-2011;Clade IV)__AIT17180__GPCmut7 (opt4)
aggagaaagcuuaccaugggccagaucgugaccuucuuccaggaggugccccacgugaucgaggaggugaugaacaucgugcugaucgcccugagcauccuggccgugcugaagggccuguacaacguggccaccugcggccugaucggccuggugaccuuccugcugcugugcggcagaagcugcaccaccacccuguacaagggcguguacgagcugcagacccuggagcugaacauggagacccugaacaugaccaugccccugagcugcaccaagaacaacagccaccacuacaucagagugggcaacgagaccggccuggagcugacccugaccaacaccagcaucaucaaccacaaguucugcaaccugagcgacgcccacaagaagaaccuguacgaccacgcccugaugagcaucaucagcaccuuccaccugagcauccccaacuucaaccaguacgaggccaugagcugcgacuucaacggcggcaagaucagcgugcaguacaaccugagccacagcuacgccggcgacgccgccaaccacugcggcaccguggccaacggcgugcugcagaccuucaugagaauggccuggggcggcagcuacaucgcccuggacagcggcagaggcaacugggacugcaucaugaccagcuaccaguaccugaucauccagaacaccaccugggacgaccacugccaguucagcagacccagccccaucggcuaccugggccugcugagccagagaaccagagacguguacaucagcagaagacugcugggcaccuucaccuggacccugagcgacagcgagggcaaggacacccccggcggcuacugccugaccagauggaugcugaucgaggccgagcugaagugcuucggcaacaccgccguggccaagugcaacgagaagcacgacgaggaguucugcgacaugcugagacuguucgacuucaacaagcaggccauccagagacugaaggcccccgcccagaugagcauccagcugaucaacaaggccgugaacgcccugaucaacgaccagcugaucaugaagaaccaccugagagacaucaugggcauccccuacugcaacuacagcaaguacugcuaccugaacaacaccgccaccggcaagaccagccugcccaagugcugccugaucagcaacggcagcuaccugaacgagacccacuucagcgacgacaucgagcaggaggccgacaacaugaucaccgagaugcugcagaaggaguacauggagagacagggcaagaccccccugggccugguggaccuguucguguucagcaccagcuucuaccugaucagcaucuuccugcaccuggugaagauccccacccacagacacaucgugggcaagagcugccccaagccccacagacugaaccacaugggcaucugcagcugcggccuguacaagcagcccggcgugcccgugagauggaagagaugaggacuaguuauaagacugacuagcccgaugggccucccaacgggcccuccuccccuccuugcaccgagauuaauaaaaaaaaaaaaaaaaaaaaaaaaaaaaaaaaaaaaaaaaaaaaaaaaaaaaaaaaaaaaaaaaaaaaaaaaaaaaaaaaaaaaaaaaaaaaaaaaaaaa

SEQ ID NO: 33085 - RNA, 1665 nt, Artificial Sequence
  mRNA product Design i-3 (A100) comprising derived and/or modified sequence from LASV(G3010-SLE-2013;Clade IV)__AIT17344__GPCmut7 (opt4)
aggagaaagcuuaccaugggccagaucgugaccuucuuccaggaggugccccacgugaucgaggaggugaugaacaucgugcugaucgcccugagcauccuggccgugcugaagggccuguacaacuucgccaccugcggccuggugggccuggugaccuuccugcugcugugcggcagaagcugcaccaccagccuguacaagggcguguacgagcugcagacccuggagcugaacauggagacccugaacaugaccaugccccugagcugcaccaagaacaacagccaccacuacaucauggugggcaacgagaccggccuggagcugacccugaccaacaccagcaucaucaaccacaaguucugcaaccugagcgacgcccacaagaagaaccuguacaaccacgcccugaugagcaucaucagcaccuuccaccugagcauccccaacuucaaccaguacgaggccaugagcugcgacuucaacggcggcaagaucagcgugcaguacaaccugagccacagcuacgccggcgacgccgccagccacugcggcaccguggccaacggcgugcugcagaccuucaugagaauggccuggggcggcagcuacaucgcccuggacagcggcuacggcaagugggacugcaucaugaccagcuaccaguaccugaucauccagaacaccaccugggaggaccacugccaguucagcagacccagccccaucggcuaccugggccugcugagccagagaaccagagacaucuacaucagcagaagacugcugggcaccuucaccuggacccugagcgacagcgagggcaaggacacccccggcggcuacugccugaccagauggaugcugaucgaggccgagcugaagugcuucggcaacaccgccguggccaagugcaacgagaagcacgacgaggaguucugcgacaugcugagacuguucgacuucaacaagcaggccauccagagacugaagacccccgcccagaugagcauccagcugaucaacaaggccgugaacgcccugaucaacgaccagcugaucaugaagaaccaccugagagacaucaugggcauccccuacugcaacuacagcaaguacugcuaccugaaccacaccaccaccggcaagaccagccugcccaagugcugccuggugagcaacggcagcuaccugaacgagacccacuucagcgacgacaucgagcagcaggccgacaacaugaucaccgagaugcugcagaaggaguacauggagagacagggcaagaccccccugggccugguggaccuguucguguucagcaccagcuucuaccugaucagcaucuuccugcaccuggugaagauccccacccacagacacaucgugggcaagagcugccccaagccccacagacugaaccacaugggcaucugcagcugcggccuguacaagcagcccggcgugcccgugagauggaagagaugaggacuaguuauaagacugacuagcccgaugggccucccaacgggcccuccuccccuccuugcaccgagauuaauaaaaaaaaaaaaaaaaaaaaaaaaaaaaaaaaaaaaaaaaaaaaaaaaaaaaaaaaaaaaaaaaaaaaaaaaaaaaaaaaaaaaaaaaaaaaaaaaaaaa

SEQ ID NO: 33086 - RNA, 1665 nt, Artificial Sequence
  mRNA product Design i-3 (A100) comprising derived and/or modified sequence from LASV(G502-SLE-2009;Clade IV)__AIT17126__GPCmut7 (opt4)
aggagaaagcuuaccaugggccagaucgugaccuucuuccaggaggugccccacgugaucgaggaggugaugaacaucgugcugaucgcccugagcauccuggccgugcugaagggccuguacaacuucgccaccugcggccuggugggccugcugaccuuccugcugcugugcggcagaagcugcaccaccggccuguacaagggcguguacgagcugcagacccuggagcugaacauggagacccugaacaugaccaugccccugagcugcaccaagaacaacagccaccacuacaucauggugggcaacgagaccggccuggagcugacccugaccaacaccagcaucaucaaccacaaguucugcaaccugagcgacgcccacaagaagaaccuguacgaccacgcccugaugagcaucaucagcaccuuccaccugagcauccccaacuucaaccaguacgaggccaugagcugcgacuucaacggcggcaagaucagcgugcaguacaaccugagccacagcuacgccggcgacgccgccgaccacugcggcaccguggccaacggcgugcugcagaccuucaugagaauggccuggggcggcagcuacaucgcccuggacagcggcagaggcagaugggacugcaucaugaccagcuaccaguaccugaucauccagaacaccaccugggaggaccacugccaguucagcagacccagccccaucggcuaccugggccugcugagccagagaaccagagacaucuacaucagcagaagacugcugggcaccuucaccuggacccugagcgacagcgagggcaaggacacccccggcggcuacugccugaccagauggaugcugaucgaggccgagcugaagugcuucggcaacaccgccguggccaagugcaacgagaagcacgacgaggaguucugcgacaugcugagacuguucgacuucaacaagcaggccauccagagacugaaggcccccgcccagaugagcauccagcugaucaacaaggccgugaacgcccugaucaacgaccagcuggugaugaagaaccaccugagagacaucaugggcauccccuacugcaacuacagcagauacugcuaccugaaccacaccaccaccggcagaaccagccugcccaagugcugccuggugagcaacggcagcuaccugaacgagacccacuucagcgacgacaucgagcagcaggccgacaacaugaucaccgagaugcugcagaaggaguacauggagagacagggcaagaccccccugggccugguggaccuguucguguucagcaccagcuucuaccugaucagcaucuuccugcaccuggugaagauccccacccacagacacaucgugggcaagagcugccccaagccccacagacugaaccacaugggcaucugcagcugcggccuguacaagcagcccggcgugcccgugaaguggaagagaugaggacuaguuauaagacugacuagcccgaugggccucccaacgggcccuccuccccuccuugcaccgagauuaauaaaaaaaaaaaaaaaaaaaaaaaaaaaaaaaaaaaaaaaaaaaaaaaaaaaaaaaaaaaaaaaaaaaaaaaaaaaaaaaaaaaaaaaaaaaaaaaaaaaa

SEQ ID NO: 33087 - RNA, 1665 nt, Artificial Sequence
  mRNA product Design i-3 (A100) comprising derived and/or modified sequence from LASV(G733-SLE-2010;Clade IV)__AIT17154__GPCmut7 (opt4)
aggagaaagcuuaccaugggccagaucgugaccuucuuccaggaggugccccacgugaucgaggaggugaugaacaucgugcugaucgcccugagcauccuggccgugcugaagggccuguacaacuucgccaccugcggcaucgugggccuggugagcuuccugcugcugugcggcagaagcugcaccaccagccuguacaagggcguguacgagcugcagacccuggagcugaacauggagacccugaacaugaccaugccccugagcugcaccaagaacaacagccaccacuacaucauggugggcaacgagaccggccuggagcugacccugaccaacaccagcaucaucaaccacaaguucugcaaccugagcgacgcccacaagaagaaccuguacgaccacgcccugaugagcaucaucagcaccuuccaccugagcauccccaacuucaaccaguacgaggccaugagcugcgacuucaacggcggcaagaucagcgugcaguacaaccugagccacagcuacgccggcgacgccgccaaccacugcggcaccaucgccaacggcgugcugcagaccuucaugagaauggccuggggcggcagcuacaucgcccuggacagcggcagagacagaugggacugcaucaugaccagcuaccaguaccugaucauccagaacaccaccugggaggaccacugccaguucagcagacccagccccaucggcuaccugggccugcugagccagagaaccagagacaucuacaucagcagaagacugcugggcaccuucaccuggacccugagcgacagcgagggcaaggacacccccggcggcuacugccugaccagauggaugcugaucgaggccgagcugaagugcuucggcaacaccgccguggccaagugcaacgagaagcacgacgaggaguucugcgacaugcugagacuguucgacuucaacaagcaggccauccagagacugaaggcccccgcccagaugagcauccagcugaucaacaaggccgugaacgcccugaucaacgaccagcugaucaugaagaaccaccugagagacaucaugggcauccccuacugcaacuacagcaaguacugcuaccugaaccacaccaccaccggcaagaccagccugcccaagugcugccuggugagcaacggcagcuaccugaacgagacccacuucagcgacgacaucgagcagcaggccgacaacaugaucaccgagaugcugcagaaggaguacauggagagacagggcaagaccccccugggccugguggaccuguucguguucagcaccagcuucuaccugaucagcaucuuccugcaccuggugaagauccccacccacagacacguggugggcaagagcugccccaagccccacagacugaaccacaugggcaucugcagcugcggccuguacggccagcccggcgugcccgugaaguggaagagaugaggacuaguuauaagacugacuagcccgaugggccucccaacgggcccuccuccccuccuugcaccgagauuaauaaaaaaaaaaaaaaaaaaaaaaaaaaaaaaaaaaaaaaaaaaaaaaaaaaaaaaaaaaaaaaaaaaaaaaaaaaaaaaaaaaaaaaaaaaaaaaaaaaaa

SEQ ID NO: 33088 - RNA, 1665 nt, Artificial Sequence
  mRNA product Design i-3 (A100) comprising derived and/or modified sequence from MOPV/LASV reassortant(IGS-1;Clade IV)__AFY05576__GPCmut7 (opt4)
aggagaaagcuuaccaugggccagaucgugaccuucuuccaggaggugccccacgugaucgaggaggugaugaacaucgugcugaucgcccugagcgugcuggccgugcugaagggccuguacaacuucgccaccugcggccuggugggccuggugaccuuccugcugcugugcggcagaagcugcaccaccagccuguacaagggcguguacgagcugcagacccuggagcugaacauggagacccugaacaugaccaugccccugagcugcaccaagaacaacagccaccacuacaucauggugggcaacgagaccggccuggagcugacccugaccaacaccagcaucaucaaccacaaguucugcaaccugagcgacgcccacaagaagaaccuguacgaccacgcccugaugagcaucaucagcaccuuccaccugagcauccccaacuucaaccaguacgaggccaugagcugcgacuucaacggcggcaagaucagcgugcaguacaaccugagccacagcuacgccggcgacgccgccaaccacugcggcaccguggccaacggcgugcugcagaccuucaugagaauggccuggggcggcagcuacaucgcccuggacagcggcagaggcaacugggacugcaucaugaccagcuaccaguaccugaucauccagaacaccaccugggaggaccacugccaguucagcagacccagccccaucggcuaccugggccugcugagccagagaaccagagacaucuacaucagcagaagacugcugggcaccuucaccuggacccugagcgacagcgagggcgaggacacccccggcggcuacugccugaccagauggaugcugaucgaggccgagcugaagugcuucggcaacaccgccguggccaagugcaacgagaagcacgacgaggaguucugcgacaugcugagacuguucgacuucaacaagcaggccauccagagacugaaggcccccgcccagaugagcauccagcugaucaacaaggccgugaacgcccugaucaacgaccagcugaucaugaagaaccaccugagagacaucaugggcauccccuacugcaacuacagcaaguacugcuaccugaaccacaccaccaccggcagaaccagccugcccaagugcugccuggugagcaacggcagcuaccugaacgagacccacuucagcgacgacaucgagcagcaggccgacaacaugaucaccgagaugcugcagaaggaguacauggagagacagggcaagaccccccugggccugguggaccuguucguguucagcaccagcuucuaccugaucagcaucuuccugcaccuggugaagauccccacccacagacacaucgugggcaagagcugccccaagccccacagacugaaccacaugggcaucugcagcugcggccuguacaagcagcccggcgugcccgugaaguggaagagaugaggacuaguuauaagacugacuagcccgaugggccucccaacgggcccuccuccccuccuugcaccgagauuaauaaaaaaaaaaaaaaaaaaaaaaaaaaaaaaaaaaaaaaaaaaaaaaaaaaaaaaaaaaaaaaaaaaaaaaaaaaaaaaaaaaaaaaaaaaaaaaaaaaaa

SEQ ID NO: 33089 - RNA, 1665 nt, Artificial Sequence
  mRNA product Design i-3 (A100) comprising derived and/or modified sequence from LASV(LM765-SLE-2012;Clade IV)__AIT17814__GPCmut7 (opt4)
aggagaaagcuuaccaugggccagaucgugaccuucuuccaggaggugccccacgugaucgaggaggugaugaacaucgugcugaucgcccugagcauccuggccgugcugaagggccuguacaacuucgccaccugcggccuggugggccuggugaccuuccugcugcugugcggcagaagcugcaccaccagccuguacaagggcguguacgagcugcagacccuggagcugaacauggagacccugaacaugaccaugccccugagcugcaccaagaacaacagccaccacuacaucauggugggcaacgagaccggccuggagcugacccugaccaacaccagcaucaucgaccacaaguucugcaaccugagcgacgcccacagaaagaaccuguacgaccacgcccugaugagcaucaucagcaccuuccaccugagcauccccaacuucaaccaguacgaggccaugagcugcgacuucaacggcggcaagaucagcgugcaguacaaccugagccacagcuacgccaaggacgccgccgaccacugcggcaccguggccaacggcgugcugcagaccuucaugagaauggccuggggcggcagcuacaucgcccuggacagcggcagaggcagaugggacugcaucaugaccagcuaccaguaccugaucauccagaacaccaccugggaggaccacugccaguucagcagacccagccccaucggcuaccugggccugcugagccagagaaccagagacaucuacaucagcagaagacugcugggcaccuucaccuggacccugagcgacagcgagggcaaggacacccccggcggcuacugccugaccagauggaugcugaucgaggccgagcugaagugcuucggcaacaccgccguggccaagugcaacgagaagcacgacgaggaguucugcgacaugcugagacuguucgacuucaacaagcaggccauccagagacugaaggcccccgcccagaugagcauccagcugaucaacaaggccgugaacgcccugaucaacgaccagcugaucaugaagaaccaccugagagacaucaugggcauccccuacugcaacuacagcaaguacugcuaccugaaccacaccaccaccggcaagaccagccugcccaagugcugccuggugagcaacggcagcuaccugaacgagacccacuucagcgacgacaucgagcagcaggccgacaacaugaucaccgagaugcugcagaaggaguacauggagagacagggcaagaccccccugggccugguggaccuguucguguucagcaccagcuucuaccugaucagcaucuuccugcaccuggugaagauccccacccacagacacaucgugggcaagcccugccccaagccccacagacugaaccacaugggcaucugcagcugcggccuguacaagcagcccggcgugcccgugaaguggaagagaugaggacuaguuauaagacugacuagcccgaugggccucccaacgggcccuccuccccuccuugcaccgagauuaauaaaaaaaaaaaaaaaaaaaaaaaaaaaaaaaaaaaaaaaaaaaaaaaaaaaaaaaaaaaaaaaaaaaaaaaaaaaaaaaaaaaaaaaaaaaaaaaaaaaa

SEQ ID NO: 33090 - RNA, 1665 nt, Artificial Sequence
  mRNA product Design i-3 (A100) comprising derived and/or modified sequence from LASV(LM776-SLE-2012;Clade IV)__AIT17824__GPCmut7 (opt4)
aggagaaagcuuaccaugggccagaucgugaccuucuuccaggaggugccccacgugaucgaggaggugaugaacaucgugcugaucgcccugagcauccuggccgugcugaagggccuguacaacuucgccaccugcggccuggugggccuggugaccuuccugcugcugugcggcagaagcugcaccaccagcguguacaagggcguguacgagcugcagacccuggagcugaacauggagacccugaacaugaccaugccccugagcugcaccaagaacaacagccaccacuacaucauggugggcaacgagaccggccuggagcugacccugaccaacaccagcaucaucaaccacaaguucugcaaccugagcgacgcccacaagaagaaccuguacgaccacgcccugaugagcaucaucagcaccuuccaccugagcauccccaacuucaaccaguacgaggccaugagcugcgacuucaacggcggcaagaucagcgugcaguacaaccugagccacagcuacgccggcgacgccgccaaccacugcggcaccguggccaacggcgugcugcagaccuucaugagaauggccuggggcggcagcuacaucgcccuggacagcggccacggcaagugggacugcaucaugaccagcuaccaguaccugaucauccagaacaccaccugggaggaccacugccaguucagcagacccagccccaucggcuaccugggccugcugagccagagaaccagagacaucuacaucagcagaagacugcugggcaccuucaccuggacccugagcgacagcgagggcaaggacacccccggcggcuacugccugaccagauggaugcugaucgaggccgagcugaagugcuucggcaacaccgccguggccaagugcaacgagaagcacgacgaggaguucugcgacaugcugagacuguucgacuucaacaagcaggccauccagagacugaaggcccccgcccagaugagcauccagcugaucaacaaggccgugaacgcccugaucaacgaccagcugaucaugaagaaccaccugagagacaucaugggcauccccuacugcaacuacagcaaguacugcuaccugaaccacaccaccaccggcaagaccagccugcccaagugcugccuggugagcaacggcagcuaccugaacgagacccacuucagcgacgacaucgagcagcaggccgacaacaugaucaccgagaugcugcagaaggaguacauggagagacagggcaagaccccccugggccugguggaccuguucguguucagcaccagcuucuaccugaucagcaucuuccugcaccuggugaagauccccacccacagacacaucgugggcaagagcugccccaagccccacagacugaaccacaugggcaucugcagcugcggccuguacaagcagcccggcgugcccgugagauggaagagaugaggacuaguuauaagacugacuagcccgaugggccucccaacgggcccuccuccccuccuugcaccgagauuaauaaaaaaaaaaaaaaaaaaaaaaaaaaaaaaaaaaaaaaaaaaaaaaaaaaaaaaaaaaaaaaaaaaaaaaaaaaaaaaaaaaaaaaaaaaaaaaaaaaaa

SEQ ID NO: 33091 - RNA, 1665 nt, Artificial Sequence
  mRNA product Design i-3 (A100) comprising derived and/or modified sequence from LASV(Mad39;Clade IV)__ANH09722__GPCmut7 (opt4)
aggagaaagcuuaccaugggccagaucgugaccuucuuccaggaggugccccacgugaucgaggaggugaugaacaucgugcugaucgcccugagcauccuggccgugcugaagggccuguacaacguggccaccugcggccugaucggccuggugaccuuccugcugcugugcggcagaagcugcaccaccacccuguacaagggcguguacgagcugcaggcccuggagcugaacauggagacccugaacaugaccaugccccugagcugcaccaagaacaacagccaccacuacaucagagugggcaacgagaccggccuggagcugacccugaccaacaccagccugaucaaccacaaguucugcaaccugagcgacgcccacaagaagaaccuguacgaccacgcccugaugagcaucaucagcaccuuccaccugagcauccccaacuucaaccaguacgaggccaugagcugcgacuucaacgacggcaagaucagcgugcaguacaaccugagccacaccuacgccggcgacaccgccaaccacugcggcaccguggccaacggcgugcugcagaccuucaugagaauggccuggggcggcagcuacaucgcccuggacagcggcagaggcggcugggacugcaucaugaccagcuaccaguaccugaucauccagaacaccaccugggaggaccacugccaguucagcagacccagccccaucggcuaccugggccugcugagccagagaaccagagacaucuacaucagcagaagacugcugggcaccuucaccuggacccugagcgacagcgagggcaaggacacccccggcggcuacugccugaccagauggaugcugaucgaggccgagcugaagugcuucggcaacaccgccguggccaagugcaacgagaagcacgacgaggaguucugcgacaugcugagacuguucgacuucaacaagcaggccauccagagacugaaggcccccgcccagaugagcauccagcugaucaacaaggccgugaacgcccugaucaacgaccagcugaucaugaagaaccaccugagagacaucaugggcauccccuacugcaacuacagcaaguacugcuaccugaaccacaccgugaccggcaagaccagccugcccaagugcugccuggugagcaacggcagcuaccugaacgagacccacuucagcgacgacaucgagcagcaggccgacaacaugaucaccgagaugcugcagaaggaguacauggagagacagggcaagaccccccugggccugguggaccuguucguguucagcaccagcuucuaccugaucagcaucuuccugcaccuggugaagauccccacccacagacacguggugggcaagcccugccccaagccccacagacugaaccacaugggcaucugcagcugcggcuucuacaagcagcccggcgugcccgugagauggaagagaugaggacuaguuauaagacugacuagcccgaugggccucccaacgggcccuccuccccuccuugcaccgagauuaauaaaaaaaaaaaaaaaaaaaaaaaaaaaaaaaaaaaaaaaaaaaaaaaaaaaaaaaaaaaaaaaaaaaaaaaaaaaaaaaaaaaaaaaaaaaaaaaaaaaa

SEQ ID NO: 33092 - RNA, 1665 nt, Artificial Sequence
  mRNA product Design i-3 (A100) comprising derived and/or modified sequence from LASV(Z0947-SLE-2011;Clade IV)__AIT17840__GPCmut7 (opt4)
aggagaaagcuuaccaugggccagaucgugaccuucuuccaggaggugccccacgugaucgaggaggugaugaacaucgugcugaucgcccugagcauccuggccgugcugaagggccuguacaacuucgccaccugcggccuggugggccuggugaccuuccugcugcugugcggcagaagcugcaccaucagccuguacaagggcguguacgagcugcagacccuggagcugaacauggagacccugaacaugaccaugccccugagcugcaccaagaacaacagccaccacuacaucauggugggcaacgagaccggccuggagcugacccugaccaacaccagcaucaucaaccacaaguucugcaaccugagcgacgcccacaagaagaaccuguacgaccacgcccugaugagcaucaucagcaccuuccaccugagcauccccaacuucaaccaguacgaggccaugagcugcgacuucaacggcggcaagaucagcgugcaguacaaccugagccacagcuacgccggcgacgccgccaaccacugcggcaccguggccaacggcgugcugcagaccuucaugagaauggccuggggcggcagcuacaucgcccuggacagcggcagagacagaugggacugcaucaugaccagcuaccaguaccugaucauccagaacaccaccugggaggaccacugccaguucagcagacccagccccaucggcuaccugggccugcugagccagagaaccagagacaucuacaucagcagaagacugcugggcaccuucaccuggacccugagcgacagcgagggcaaggacacccccggcggcuacugccugaccagauggaugcugaucgaggccgagcugaagugcuucggcaacaccgccguggccaagugcaacgagaagcacgacgaggaguucugcgacaugcugagacuguucgacuucaacaagcaggccauccagagacugaaggcccccgcccagaugagcauccagcugaucaacaaggccgugaacgcccugaucaacgaccagcugaucaugaagaaccaccugagagacaucaugggcauccccuacugcaacuacagcaaguacugcuaccugaaccacaccaccaccggcaagaccagccugcccaagugcugccuggugagcaacggcagcuaccugaacgagacccacuucagcgacgacaucgagcagcaggccgacaacaugaucaccgagaugcugcagaaggaguacauggagagacagggcaagaccccccugggccugguggaccuguucguguucagcaccagcuucuaccugaucagcaucuuccugcaccuggugaagauccccacccacagacacaucgugggcaagcccugccccaagccccacagacugaaccacaugggcaucugcagcugcggccuguacaagcagcccggcgugcccgugaaguggaagagaugaggacuaguuauaagacugacuagcccgaugggccucccaacgggcccuccuccccuccuugcaccgagauuaauaaaaaaaaaaaaaaaaaaaaaaaaaaaaaaaaaaaaaaaaaaaaaaaaaaaaaaaaaaaaaaaaaaaaaaaaaaaaaaaaaaaaaaaaaaaaaaaaaaaa

SEQ ID NO: 33093 - RNA, 1665 nt, Artificial Sequence
  mRNA product Design i-3 (A100) comprising derived and/or modified sequence from LASV(Josiah;Clade IV)__NP_694870__GPCmut7 (opt5)
aggagaaagcuuaccaugggccagaucgugaccuucuuucaagaggucccccacguuauugaagaggugaugaacaucgugcugauugcccucagcguccuggcugugcuuaaggggcuguacaauuucgccacaugcggacucguuggccuggugacguuucuucugcucugugggagauccugcaccacaucucuguauaaaggagucuacgaacugcagacccucgagcugaacauggaaacacuuaauaugaccaugccucugagcuguacaaagaacaauucccaucacuauaucauggugggcaacgagaccgggcucgagcugacgcuuaccaauacaucuauuaucaaccauaaauucugcaaucugagcgacgcgcacaagaaaaaccucuacgaucaugcucugauguccaucauuucuaccuuucaccugagcaucccgaauuucaaccaguaugaagccauguccugugacuuuaauggaggcaagauuagcguucaguacaaccucucucacuccuaugccggcgaugcugccaaucauugcgggacaguggcuaacggaguccugcaaaccuucaugcggauggccuggggcgggagcuacaucgcgcuugacucuggacgcggcaacugggauuguauuaugacguccuaccaguaucugaucauucagaauacaaccugggaggaccacugccaguuuagcagacccucuccuaucggguaccucggacugcuuucccaacggacacgcgauaucuauauuagcagacggcugcucggcaccuucaccuggacacuguccgacucugaaggcaaggauacgcccgggggauacugucugacccgcuggaugcucaucgaggccgagcugaaaugcuuuggcaacacagcuguggccaaguguaaugaaaaacaugacgaggaguucugcgauaugcuuagacuguuugacuucaacaagcaggcuauucagcggcucaaagccccugcgcagaugagcauccaacugauuaauaaggccgugaacgcucuuaucaaugaucagcugaucaugaagaaccaccuccgcgacauuauggggauccccuauugcaauuacuccaaauauuguuaccugaaccacaccacaaccggaagaacgagccugccuaagugcugucucgucucuaauggcuccuaccugaacgaaacacauuucagcgacgauauugaacagcaagccgacaauaugaucaccgagaugcuucagaaagaguauauggaacggcaggggaagaccccgcugggacucguugaucuguuuguguucucuaccagcuuuuaccugauuuccaucuuccuucaccucgugaaaauccccacacaucgccacauugucggcaagucuugcccuaaaccccauagacugaaccacaugggcaucuguagcugcgggcuguauaagcagccuggagugcccguuaaguggaaacggugaggacuaguuauaagacugacuagcccgaugggccucccaacgggcccuccuccccuccuugcaccgagauuaauaaaaaaaaaaaaaaaaaaaaaaaaaaaaaaaaaaaaaaaaaaaaaaaaaaaaaaaaaaaaaaaaaaaaaaaaaaaaaaaaaaaaaaaaaaaaaaaaaaaa

SEQ ID NO: 33094 - RNA, 1662 nt, Artificial Sequence
  mRNA product Design i-3 (A100) comprising derived and/or modified sequence from LASV(LP;Clade I)__AAF86701__GPCmut7 (opt5)
aggagaaagcuuaccaugggccagaucauuaccuucuuucaagaggugccccacgucaucgaagagguuaugaacauugugcugaucgcccucagccugcuugcuauucugaaggggcucuacaauaucgccacaugcggaaucauuggccugguggcguuccuuuuucugugugggaaauccugcucucucacgcugaagggaggcuaugaacugcagacccucgagcugaacauggaaacacuuaauaugaccaugccucugagcuguaccaaaaacuccucucaucacuacaucagagucgggaaugagacaggacucgagcugacacuuaccaacacgagcauuaucaaucauaaguucugcaaccuguccgacgcucacaaaaagaaucucuaugaucaugcccugaugucuauuaucagcaccuuucaccuguccauuccgaacuucaaucaguacgaagccaugagcugugacuuuaacggcggcaagaucucugugcaguauaaucucucccacagcuacgcuggggaugccgcugagcauugcggaacaguugccaacggcgugcugcaaaccuucaugcggauggcguggggagggcgcuauaucgcccuugacucuggcaaagggaauugggauuguauuaugacauccuaccaguaccugaucauucagaacaccacgugggaagaccacugccaguuuagcagacccucuccuaucggauaucucggccugcuuucccaacggacacgcgauauuuacaucagcagacggcugcucggcaccuucacauggacccuguccgacucugaggggaacgagacccccggaggcuauugucugacacgcuggaugcucaucgaagcugagcugaagugcuuugggaauacggccgucgcuaaauguaacgaaaagcaugaugaggaguucugcgacaugcuuagacuguuugauuucaauaaacaggccauucggcgccucaaggcgccugcccagaugagcauccagcugauuaacaaggcugugaaugcccuuaucaacgaccaacugauuaugaaaaaucaccucagagauaucaugggaauccccuacugcaacuauuccaaguacuguuaucugaaucacaccagcucuggccggacaucccugccuaaaugcugucucauuagcaacgggucuuaccugaaugaaacccaguucagcgacgacaucgagcagcaagcugauaacaugauuacagaaaugcuucagaaggaguacaucgaacgccagggaaaaaccccgcugggccucguugacauuuuuaucuucuccacgucuuuuuaucugauuagcaucuuccugcaucuuaucaagauucccacacacagacauaucgugggcaaaccuugccccaagccucaccggcucaaucauaugggggucuguuccugcggacuguacaagcaccccggcgugccgaccaaauggaagcgcugaggacuaguuauaagacugacuagcccgaugggccucccaacgggcccuccuccccuccuugcaccgagauuaauaaaaaaaaaaaaaaaaaaaaaaaaaaaaaaaaaaaaaaaaaaaaaaaaaaaaaaaaaaaaaaaaaaaaaaaaaaaaaaaaaaaaaaaaaaaaaaaaaaaa

SEQ ID NO: 33095 - RNA, 1662 nt, Artificial Sequence
  mRNA product Design i-3 (A100) comprising derived and/or modified sequence from LASV(803213;Clade II)__AAF86703__GPCmut7 (opt5)
aggagaaagcuuaccaugggccagaucauuaccuucuuucaagaggugccccacgucaucgaagagguuaugaacauugugcugaucgcccucagccugcuugcuauucugaaggggaucuacaauguggccacaugcggacucuucggccugaucuccuuucuucugcucugugggagaucuugcagcgucacguauaaaggaguguacgaacugcagacccuggagcucaacauggcgaaucugaacaugacaaugccucuuuccuguaccaagaauaacucucaucacuauauuaugguuggcaaugaaacagggcuggagcucacccugacaaacaccagcaucauuaaucauaaauucugcaaccuuuccgacgcucacaagaaaaaucuguacgaucaugcccucaugucuaucauuagcacguuucaccuguccaucccgaacuucaaucaguaugaggccaugagcugugacuuuaacggaggcaagauuucugugcaguacaaucugucccacagcuucgcugucgaugccgcuaaccauugcggcaccaucgccaacggggugcuccaaacauuuaugcggauggcguggggaggcucuuauaucgcccuggacuccgggaagggaaauugggauuguauuaugaccagcuaccaguaccuuaucauucagaacacaaccugggaagaccacugccaguucucucgccccuccccuaucggcuaucuggggcuccugagccaaagaacgcgggauauuuacaucucccgcagacuucugggaacauuuaccuggacacucucugacagcgagggcaaugaagcucccggcggguauugucugacccgguggaugcugaucgaggccgagcucaaaugcuucggaaacaccgcuguugccaaguguaaugaaaaacaugaugaggaauuuugcgacaugcugcgccuuuucgauuucaacaagcaggcgauuaaaagacugaagacgccugcccagauguccauccagcucauuaauaaggcugugaacgcccugaucaaugaccaacuuauuaugaaaaaccaucugcgggauaucaugggcauccccuacugcaauuauagccgcuacuguuaucucaaccacacagucaccgggaagacaucucugccuagaugcugucugguguccaauggaagcuaccucaacgagacccacuuuucugacgacauugaacagcaggcugauaauaugaucacagagaugcugcaaaaagaguacauggaccggcagggcaagaccccgcuugggcugguggaucucuucgucuuuagcacguccuucuaucugauuucuaucuuucugcaccuuguuaaaauucccacacaucgccacaucgugggaaagccuugccccaaaccucauagacucaaccacaugggcauuuguagcugcggccuguacaagcaccccggggugccggucaaguggaaacggugaggacuaguuauaagacugacuagcccgaugggccucccaacgggcccuccuccccuccuugcaccgagauuaauaaaaaaaaaaaaaaaaaaaaaaaaaaaaaaaaaaaaaaaaaaaaaaaaaaaaaaaaaaaaaaaaaaaaaaaaaaaaaaaaaaaaaaaaaaaaaaaaaaaa

SEQ ID NO: 33096 - RNA, 1662 nt, Artificial Sequence
  mRNA product Design i-3 (A100) comprising derived and/or modified sequence from LASV(GA391;Clade III)__CAA36645__GPCmut7 (opt5)
aggagaaagcuuaccaugggccagaucgugaccuucuuucaagaggucccccacguuauugaagaggugaugaacaucgugcugauugcccucagcauccuggcuauucuuaaggggcuguacaaugucgccacaugcggacucaucggccuggugacguuccuucugcucuccgggagaucuuguagccugaucuauaaaggaaccuacgaacugcagacacucgagcugaacauggaaacccuuaauaugacaaugccucuguccugcaccaagaacaauucucaucacuauauucggguuggcaacgagacagggcucgagcugacccuuacgaauaccagcauccugaaccauaaauuuuguaaucucuccgacgcgcacaagcgcaaccuguacgaucauucucugaugagcauuaucuccacauuccaccucagcauuccgaauuuuaaccaguaugaagcuaugucuugcgacuucaauggaggcaaaaucaccgugcaguacaaccugucccacagcuuugccgucgaugccgcuggccauugugggacacuugccaauggagugcugcaaaccuucaugagaauggcuuggggcgggucuuauauugcccucgacuccggacggggcaacugggauugcaucaugacgagcuaccaguaccugaucauucagaacacaaccugggacgaucacugucaguuuucucgccccuccccuaucggguaucuuggacugcucagccaaagaacacgggacauuuacaucucccgcagacugcugggcaccuucaccuggacacucucugauagcgagggcaaugaaacgcccgggggauauugccugacccgguggaugcuuauugaggcggagcugaaguguuuuggcaacacagccguugcuaagugcaaugaaaaacaugacgaggaguucugugauaugcuccgccuguuugacuucaacaagcaggccaucagacggcuuaaaaccccugcucagauguccauccagcugauuaauaaggccgugaacgcgcucaucaaugaucaacugauuaugaaaaaccaucugcgcgacaucauggggauucccuacugcaauuauagcagauacugcuaucucaaccacacaucuaccggaaagacgucccugccucgguguugccuuaucagcaauggcucuuaccugaacgaaacaaaguucagcgacgauaucgaacagcaggccgacaauaugauuaccgagaugcuccaaaaagaguacaucgaucgccaggggaagaccccgcugggacuggucgaccuuuuuguguucuccacaucuuuuuaucucauuagcaucuuccugcaccuggugaaaauucccacccacagacauaucgucggcaagccuugucccaaaccucaccggcucaaccauaugggcauuugcuccugugggcuguacaagcagcccggaguuccggugagauggaaacgcugaggacuaguuauaagacugacuagcccgaugggccucccaacgggcccuccuccccuccuugcaccgagauuaauaaaaaaaaaaaaaaaaaaaaaaaaaaaaaaaaaaaaaaaaaaaaaaaaaaaaaaaaaaaaaaaaaaaaaaaaaaaaaaaaaaaaaaaaaaaaaaaaaaaa

SEQ ID NO: 33097 - RNA, 1665 nt, Artificial Sequence
  mRNA product Design i-3 (A100) comprising derived and/or modified sequence from LASV(AV;Clade V)__CCA30314__GPCmut7 (opt5)
aggagaaagcuuaccaugggccagaucgugaccuucuuucaagaggucccccacguuauugaagaggugaugaacaucgugcugauugcccucagcauccuggcuguccuuaaggggcuguacaauauugccacaugcggacucaucggccugaucacguuccuucugcucugugggagauccugcucuagcaaccuguauaaaggaguguacgaacugcagucccucgaccugaauauggagacccuuaacaugacaaugccucugucuuguaccaagaauaacagccaucacuauauucggguuggcaaugauacagggcucgaacugacccuuacaaacaccuccauccugaaucauaaauuuugcaaccucucugacgcgcacaagaaagaucuguacgaccaugcucugaugagcauuaucuccacguuccaccucagcauuccgaauuuuaaccaguaugaggccaugucuugugauuucaauggaggcaagaucuccgugcaguacaaccugagccacucuuaugccauugacgcugccaaucauugcggcaccgucgcuaacgggauccuucaaacauuuaugcgcauggccuggggaggcuccuacaucgcgcuggauagcgggagaggaaacugggacuguauuaugaccucuuaccaguaucucaucauucagaauacaaccugggagaaccacugccaguucucccggcccagcccuaucggcuaccuggggcuucugucccaacgcacgagagauauuuauaucucucggcgccuccugggaacauuuaccuggacacugagcgacuccgaaggcaaugccacccccggcggguacugucucaccagauggaugcugaucgaggcugaacuuaagugcuucggaaacacagccguggcuaaauguaaugagaagcaugaugaggaauuuugcgacaugcugcgccucuucgauuuuaacaaacaggccauuagccggcugaagucuccugcgcagauguccauccagcuuauuaauaaagccguuaacgcucugaucaaugaccaacucauuaugaagaaccaccugagagacaucaugggcauccccuauugcaauuacagcaaguauuguuaccugaaccacacgauuaccgggaaaacaucucucccuaagugcugucuggugagcaauggauccuaccuuaacgagacccauuucucugaugacaucgaacagcaggccgauaauaugauuacagagaugcugcaaaaagaauauauggagcggcagggcaagaccccgcucgggcuggucgaccuguucguguuuagcacguccuucuaccuuaucagcauuuuucuccgccuggugaaaauccccacacacagacauauugucggaaagccuugccccaaaccucaccggcugaaccauaugggcaucuguucuugcggccucuauaagcagcccgggguuccggugcgcuggaagagaugaggacuaguuauaagacugacuagcccgaugggccucccaacgggcccuccuccccuccuugcaccgagauuaauaaaaaaaaaaaaaaaaaaaaaaaaaaaaaaaaaaaaaaaaaaaaaaaaaaaaaaaaaaaaaaaaaaaaaaaaaaaaaaaaaaaaaaaaaaaaaaaaaaaa

SEQ ID NO: 33098 - RNA, 1662 nt, Artificial Sequence
  mRNA product Design i-3 (A100) comprising derived and/or modified sequence from LASV(Togo/2016/7082;Clade VI)__AMR44577__GPCmut7 (opt5)
aggagaaagcuuaccaugggccagaucauuaccuucuuucaagaggugccccacgucaucgaagagguuaugaacauugugcugaucgcccucagccugcuugcuauucugaaggggguguacaaugucgccacaugcggaaucaucggccucgugacguuccuguuucuuugugggagauccugcucucugauuuauaaaggaagcuacgaacuccagacccuggagcugaacauggaaacacucaauaugaccaugccucuguccuguacaaagaacucuagccaucacuauauccggguuggcaaugagaccgggcuugagcugacacucaccaacacguccauuaucaaucauaaauucugcaaccugucugacgcgcacaagcgcaaucuuuacgaucaugcucugaugagcauucucuccaccuuucaccugagcaucccgaacuucaaucaguaugaagccaugucuugugacuuuaacggaggcaaaauuuccgugcaguacaaucugagccacgccuaugcugucgaugccgcugagcauugcggcacaguggccaacgggguucuccaaaccuucaugagaauggcguggggaggcucuuacaucgcccuggacuccgggcggggaaauugggauuguaucaugacaagcuaccaguaucuuauuauccagaacaccacgugggaagaccacugccaguuuucucgccccuccccuauuggcuaccuggggcuccugagccaaagaacacgggauaucuauauuucccgcagacuucugggaaccuucacauggacccucucugacagcgagggcaacgagacccccggcggguacugucugacacgguggaugcugaucgaagcugagcucaagugcuuuggaaauacggccguggcuaaguguaacgaaaaacaugaugaggaguucugcgacaugcugcgccuuuuugauuucaauaagcaggccauccagagacugaaauccccugcgcagaugagcauucaacucaucaacaaggccgucaaugcucugauuaacgaccagcuuaucaugaaaaaucaucugcgggauaugaugggcauucccuauugcaacuacucuaaguauuguuaccucaaucacaccuccagcgggcgcacaucucugccuaagugcugucuggugagcaacggauccuaccucaaugaaacccacuucucugacgacaucgagcagcaagccgauaacaugaucacagaaaugcugcagaaagaguauauugacagacagggcaagaccccgcuugggcugguggaucucuuugucuucagcacguccuuuuaccugaucagcauuuuccugcaccuuaucaaaauucccacacaucggcacaucguuggaaagccuugccccaaaccucaucgccucaaucacaugggcauuuguucuugcggccuguauaagcagcccggggugccgaccagauggaaacggugaggacuaguuauaagacugacuagcccgaugggccucccaacgggcccuccuccccuccuugcaccgagauuaauaaaaaaaaaaaaaaaaaaaaaaaaaaaaaaaaaaaaaaaaaaaaaaaaaaaaaaaaaaaaaaaaaaaaaaaaaaaaaaaaaaaaaaaaaaaaaaaaaaaa

SEQ ID NO: 33099 - RNA, 1662 nt, Artificial Sequence
  mRNA product Design i-3 (A100) comprising derived and/or modified sequence from LASV(KAK-428;Clade n.d. (VII))__ANH09740__GPCmut7 (opt5)
aggagaaagcuuaccaugggccagaucgugaccuucuuucaagaggucccccacguuauugaagaggugaugaacaucgugcugauugcccucagccugcuugcuauccugaaggggcucuacaauuucgccacaugcggagucauuggccugaucacguuucuucugcucugugggagauccugcucugcgaccuauaaaggacaguacgaacugcagacacuggagcucaacauggaaagccugaauaugaccaugccucuuuccuguacaaagaacaauucucaucacuauauccgggcuggcaacaauaccgggcuggagcucacacugaccaacacgagcauuaucucccauaaauucugcaaucuuucugacgcccacaagaaaaaccuguacgaucauacccucaugagcauuaucacaaccuuucaccuguccauuccgaauuucaaccaguaugaggccaugagcugugacuuuaauggaggcaagaucucuauucaauacaaccugucccacagcuaugcuggcgaugccgcucagcauugcgggacaguggccaauggaguucuccagaccuucaugcgcauggcguggggcgggucuuaccuggcccuugacuccggaagacggggcugggauuguaucaucagcucuuaccaguaucugauuauccaaaacacgacaugggacgaucacugccaguuuucccgccccagcccuauuggguaccucggauucgugucccagaagaccagagacaucuauauuucucggcgccugcuuggcacauuuaccuggacccugagcgauuccgaaggccaugacaugcccgggggauacugucucacaagauggaugcugaucgaggcugaucugaaaugcuucggcaacacggccgucgcuaaguguaaugaaaaacacgacgaggaguuuugcgauauguggcgccucuucgacuucaacaagcaggccauccaacggcugaaagcgccugcccagaugaauauucagcuuaucaacaaggcugugaaugcccugauuaacgaccaacucaugaugaagaaucaccugagagauaucauggggauucccuauugcaacuacagcaaauuuuguuaucuuaauaacaccacaaccggacggacaucucugccucgcugcugucucaucuccaauggcagcuaccugaacgaaacccauuucucugacgauaucgagcagcaggcugacaauaugauuacggaaaugcugcagaaggaguacauggauagacaagggaaaacaccgcucggacugguugaccuuuuuguguucagcaccuccuuuuaucugaucaccauuuuccuccaccuggucaagauccccacacaucggcacauugugggcaaaccuugccccaagccucaucgccugaaccacaugggcaucuguucuugcgggcuuuacaaacagcccggagugccggucagauggaagcggugaggacuaguuauaagacugacuagcccgaugggccucccaacgggcccuccuccccuccuugcaccgagauuaauaaaaaaaaaaaaaaaaaaaaaaaaaaaaaaaaaaaaaaaaaaaaaaaaaaaaaaaaaaaaaaaaaaaaaaaaaaaaaaaaaaaaaaaaaaaaaaaaaaaa

SEQ ID NO: 33100 - RNA, 1662 nt, Artificial Sequence; identical to SEQ ID NO: 33094
  mRNA product Design i-3 (A100) comprising derived and/or modified sequence from LASV(Pinneo-NIG-1969;Clade I)__AIT17836__GPCmut7 (opt5)

SEQ ID NO: 33101 - RNA, 1662 nt, Artificial Sequence
  mRNA product Design i-3 (A100) comprising derived and/or modified sequence from LASV(ISTH0009-NIG-2011;Clade II)__AIT17404__GPCmut7 (opt5)
aggagaaagcuuaccaugggccagaucauuaccuucuuucaagaggugccccacgucaucgaagagguuaugaacauugugcugaucgcccucagccugcuugcuauucugaaggggaucuacaauguggccacaugcggacucuucggccuggucuccuuucuucugcucugugggagaucuugcagcacgaccuauaaaggaguguacgaacugcagacacuggagcucgacauggcgucccugaacaugaccaugccucuuucuuguacaaagaauaacagccaucacuauaucaugguuggcaaugaaaccgggcuggagcucacacugaccaacacguccauuaucaaucauaaauucugcaaccuuucugaugcucacaagaaaaaucuguacgaccaugcccucaugagcauuaucuccaccuuucaccugagcauuccgaacuucaaucaguaugaggccaugucuugugauuuuaacggaggcaagaucuccgugcaguacaaucugagccacgcuuaugccgucgacgcugccaaccauugcggcacaauugcgaauggggugcuccaaaccuucaugcggauggccuggggaggcucuuacaucgcucuggauuccgggaagggaagcugggacuguaucaugacaucuuaccaguaucuuauuauccagaacaccacgugggaagaucacugccaguuuucccgccccagcccuauuggcuaccuggggcuccugucccaaagaacacgggacaucuauauuucucgcagacuucugggaaccuucacauggacccucagcgauuccgagggcaacgaaacccccggcggguacugucugacacgguggaugcugaucgaggccgagcucaaaugcuuuggaaauacggcuguugccaaguguaacgaaaaacaugacgaggaguucugcgauaugcugcgccuuuuugacuucaauaagcaggcgaucagacggcugaaaaccccugcccagaugagcauucagcucaucaacaaggcugugaaugcccugauuaacgaucaacuuaucaugaagaaucaucugcgcgacauuaugggcauccccuauugcaacuacucuaaauauuguuaccucaaucacacagucaccgggaagacaucccugccuagaugcugucuggugagcaacggaucuuaccucaaugaaacccacuucagcgacgauaucgaacagcaggcugacaacaugauuacggagcugcuucaaaaagaguauauggaucggcagggcaagacaccgcuggggcucguggaccuguuugucuucuccaccucuuuuuaccugaucagcauuuuccuucaccucaucaaaauucccacccaucgccacaucacaggaaagccuugccccaaaccucauagacugaaucacaugggcauuuguuccugcggccuguauaagcaccccgggguuccggugaaguggaaacggugaggacuaguuauaagacugacuagcccgaugggccucccaacgggcccuccuccccuccuugcaccgagauuaauaaaaaaaaaaaaaaaaaaaaaaaaaaaaaaaaaaaaaaaaaaaaaaaaaaaaaaaaaaaaaaaaaaaaaaaaaaaaaaaaaaaaaaaaaaaaaaaaaaaa

SEQ ID NO: 33102 - RNA, 1662 nt, Artificial Sequence
  mRNA product Design i-3 (A100) comprising derived and/or modified sequence from LASV(ISTH2010-NIG-2012;Clade II)__AIT17482__GPCmut7 (opt5)
aggagaaagcuuaccaugggccagaucauuaccuucuuucaagaggugccccacgucaucgaagagguuaugaacauugugcugaucgcccucagccugcuugcuauucugaaggggaucuacaauguggccacaugcggacucuucggccuggucuccuuucuucugcucugugggagaucuugcagcacgaccuauaaaggaguguacgaacugcagacacuggagcucgacauggcgucccugaacaugaccaugccucuuucuuguacaaagaauaacagccaucacuauaucaugguuggcaaugaaaccgggcuggagcucacacugaccaacacguccauuaucaaucauaaauucugcaaccuuucugaugcucacaagaaaaaucuguacgaccaugcccucaugagcauuaucuccaccuuucaccugagcauuccgaacuucaaucaguaugaggccaugucuugugauuuuaacggaggcaagaucuccgugcaguacaaucugagccacgcuuaugccgucgacgcugccaaccauugcggcacaauugcgaauggggugcuccaaaccuucaugcggauggccuggggaggcucuuacaucgcucuggauuccgggaagggaagcugggacuguaucaugacaucuuaccaguaucuuauuauccagaacauuaccugggaagaucacugccaguuuucccgccccagcccuaucggcuaccuggggcuccugucccaaagaacgcgggacauuuauaucucucgcagacuucugggaacauucaccuggacacucagcgauuccgagggcaacgaaacccccggcggguacugucugacccgguggaugcugaucgaggccgagcucaaaugcuuuggaaauacagcuguugccaaguguaacgaaaaacaugacgaggaguucugcgauaugcugcgccuuuuugacuucaauaagcaggcgauuagacggcugaaaacgccugcccagaugagcauccagcucauuaacaaggcugugaaugcccugaucaacgaucaacuuauuaugaagaaucaucugcgcgacaucaugggcauccccuauugcaacuacucuaaauauuguuaccucaaucacaccgucacagggaagaccucccugccuagaugcugucuggugagcaacggaucuuaccucaaugaaacacacuucagcgacgauauugaacagcaggcugacaacaugaucaccgagcugcuucaaaaagaguauauugaucggcagggcaagacgccgcuggggcucguggaccuguuugucuucuccacaucuuuuuaccugaucagcauuuuccuucaccucguuaaaauccccacccaucgccacguggugggaaagccuugccccaaaccucauagacugaaucacaugggcauuuguuccugcggccuguauaagcaccccggggucccggugaaguggaaacggugaggacuaguuauaagacugacuagcccgaugggccucccaacgggcccuccuccccuccuugcaccgagauuaauaaaaaaaaaaaaaaaaaaaaaaaaaaaaaaaaaaaaaaaaaaaaaaaaaaaaaaaaaaaaaaaaaaaaaaaaaaaaaaaaaaaaaaaaaaaaaaaaaaaa

SEQ ID NO: 33103 - RNA, 1662 nt, Artificial Sequence
  mRNA product Design i-3 (A100) comprising derived and/or modified sequence from LASV(Lassa virus/H.sapiens-wt/NGA/2015/ISTH_0543;Clade II)__AVO03639__GPCmut7 (opt5)
aggagaaagcuuaccaugggccagaucauuaccuucuuucaagaggugccccacgucaucgaagagguuaugaacauugugcugaucgcccucagccugcuugcuauucugaaggggaucuacaauguggccacaugcggacucuucggccuggucuccuuucuucugcucugugggagaucuugcagcacgaccuauaaaggaguguacgaacugcagacacuggagcucgacauggcgaaccugaauaugaccaugccucuuuccuguacaaagaacaauucucaucacuauaucaugguuggcaacgaaaccgggcuggagcucacacugaccaauacgagcauuaucaaccauaaauucugcaaucuuuccgaugcucacaagaaaaaccuguacgaccaugcccucaugucuauuaucagcaccuuucaccuguccauuccgaauuucaaccaguaugaggccaugagcugugauuuuaauggaggcaagaucucugugcaguacaaccugucccacacauaugcugucgacgccgcuaaucauugcggcaccauugccaacggggugcuccaaacauucaugcggauggcguggggaggcagcuacaucgcccuggauucugggaagggauccugggacuguaucaugaccagcuaccaguaucuuguuauucagaacacgacaugggaagaucacugccaguuuucucgccccuccccuaucggcuaccuggggcuccugagccaaagaacccgggacauuuauaucucccgcagacuucugggaacauucaccuggacccucucugauagcgagggcaaugaaacacccggcggguacugucugacgcgguggaugcugauugaggcugagcucaaaugcuuuggaaacaccgccguggcuaaguguaaugaaaaacaugacgaggaguucugcgauaugcugcgccuuuuugacuucaacaagcaggccaucagacggcugaaaaccccugcgcagauguccauccagcucauuaauaaggccgucaacgcucugaucaaugaucaacuuauuaugaagaaccaucugcgcgacaucaugggcauucccuauugcaauuacagcaaauauuguuaccucaaccacacagugacagggaagaccucucugccuagaugcugucugguguccaauggaagcuaccucaacgaaacgcacuucucugacgauaucgaacagcaggccgacaauaugaucacagagcugcuucaaaaagaguauauugaucggcagggcaagaccccgcuggggcucgucgaccuguuuguuuucagcaccuccuuuuaccugaucucuauuuuccuucaccucgugaaaauccccacacaucgccacauuaccggaaagccuugccccaaaccucauagacugaaccacaugggcaucuguagcugcggccuguauaagcaccccggggugccggucaaguggaaacggugaggacuaguuauaagacugacuagcccgaugggccucccaacgggcccuccuccccuccuugcaccgagauuaauaaaaaaaaaaaaaaaaaaaaaaaaaaaaaaaaaaaaaaaaaaaaaaaaaaaaaaaaaaaaaaaaaaaaaaaaaaaaaaaaaaaaaaaaaaaaaaaaaaaa

SEQ ID NO: 33104 - RNA, 1662 nt, Artificial Sequence
  mRNA product Design i-3 (A100) comprising derived and/or modified sequence from LASV(Lassa virus/H.sapiens-wt/NGA/2016/ISTH_0009;Clade II)__AVO03571__GPCmut7 (opt5)
aggagaaagcuuaccaugggccagaucauuaccuucuuucaagaggugccccacgucaucgaagagguuaugaacauugugcugaucgcccucagccugcuugcuauucugaaggggaucuacaauguggccacaugcggacuccugggccuugucuccuuccugcuccugugugggagaucuugcagcacgaccuauaaaggaguguacgaacugcagacacucgagcuggacauggcgucccuuaacaugaccaugccucugucuuguacaaagaauaacagccaucacuauaucaugguuggcaaugaaaccgggcucgagcugacacuuaccaacacguccauuaucaaucauaaauuuugcaaccugucugaugcucacaagaaaaaucucuacgaccaugcccugaugagcauuaucuccaccuuccaccugagcauuccgaacuuuaaucaguaugaggccaugucuugugauuucaacggaggccggaucuccgugcaguacaaucucagccacucuuaugcugucgacgccgcuaaccauugcggcacaauugccaauggggugcugcaaaccuuuaugcgcauggcguggggaggcuccuacaucgcccuugauagcgggaagggaucuugggacuguaucaugacauccuaccaguaucugauuauccagaacaccacgugggaagaucacugccaguucagcagacccuccccuauuggcuaccucgggcugcuuucucaacggacacgcgacaucuauauuagcagacggcugcucggaaccuuuacauggacccuguccgauagcgagggcaacgaaacccccggcggguacugucugacacgcuggaugcucaucgaggcugagcugaagugcuucggaaauacggccguugcuaaauguaacgaaaagcaugacgaggaauuuugcgauaugcuuagacuguucgacuuuaauaaacaggccauccggcgccucaagaccccugcgcagaugucuauucagcugaucaacaaagccgugaaugcucuuauuaacgaucaacugaucaugaagaaucaccucagagacauuaugggcauccccuauugcaacuacuccaaguauuguuaccugaaucacacagucaccgggaaaacaagccugccucggugcugucucgugucuaacggaagcuaccugaaugagacccauuucuccgacgauaucgaacagcaggccgacaacaugauuacggagcuucugcaaaaggaguauaucgaucgccagggcaaaacaccgcucgggcugguggaccuguucgucuuuucuaccagcuucuaccuuauuuccaucuuucuccaccugguuaagauucccacccauagacacaucacaggaaaaccuugccccaagccucaucggcugaaucacaugggcauuuguagcugcggccucuauaaccaccccggggugccggugaaauggaagcgcugaggacuaguuauaagacugacuagcccgaugggccucccaacgggcccuccuccccuccuugcaccgagauuaauaaaaaaaaaaaaaaaaaaaaaaaaaaaaaaaaaaaaaaaaaaaaaaaaaaaaaaaaaaaaaaaaaaaaaaaaaaaaaaaaaaaaaaaaaaaaaaaaaaaa

SEQ ID NO: 33105 - RNA, 1662 nt, Artificial Sequence
  mRNA product Design i-3 (A100) comprising derived and/or modified sequence from LASV(Lassa virus/H.sapiens-wt/NGA/2016/ISTH_0017;Clade II)__AVO03567__GPCmut7 (opt5)
aggagaaagcuuaccaugggccagaucauuaccuucuuucaagaggugccccacgucaucgaagagguuaugaacauugugcugaucgcccucagccugcuugcuauucugaaggggaucuacaauguggccacaugcggacucuucggccuggucuccuuucuucugcucugugggagaucuugcagcacgaccuauaaaggaguguacgaacugcagacacuggagcucgacauggcgucccugaacaugaccaugccucuuucuuguacaaagaauaacagccaucacuauaucaugguuggcaaugaaaccgggcuggagcucacacugaccaacacguccauuaucaaucauaaauucugcaaccuuucugaugcucacaagaaaaaucuguacgaccaugcccucaugagcauuaucuccaccuuucaccugagcauuccgaacuucaaucaguaugaggccaugucuugugauuuuaacggaggcaagaucuccgugcaguacaaucugagccacacauaugcuauugacgccgcuaaccauugcggcaccaucgccaaugggguccuccaaacauucaugcggauggcguggggaggcucuuacaucgcccuggauuccgggaagggaagcugggacuguauuaugaccucuuaccaguaucuuaucauucagaacacgacaugggaagaucacugccaguuuucccgccccagcccuaucggcuaccuggggcuccugucccaaagaacccgggacauuuauaucucucgcagacuucugggaacauucaccuggacccucagcgauuccgagggcaacgaaacacccggcggguacugucugacgcgguggaugcugaucgaggcugagcucaaaugcuuuggaaauaccgccguggcuaaguguaacgaaaaacaugacgaggaguucugcgauaugcugcgccuuuuugacuucaauaagcaggccauuagacggcugaaaaccccugcgcagaugagcauccagcucauuaacaaggccguuaaugcucugaucaacgaucaacuuauuaugaagaaucaucugcgcgacaucaugggcauccccuauugcaacuacucuaaauauuguuaccucaaucacacagugacagggaagaccucccugccuagaugcugucuggucagcaacggaucuuaccucaaugaaacgcacuucagcgacgauauugaacagcaggccgacaacaugaucacagagcugcuucaaaaagaguauauggaucggcagggcaagaccccgcuggggcucguggaccuguuuguguucuccaccucuuuuuaccugauuagcaucuuccuucaccucguccgcauucccacacauagacacguuaucggaaaaccuugccccaagccucaucggcugaaucacaugggcauuuguuccugcggccuguauaaacaccccggggugccggugaaguggaagcgcugaggacuaguuauaagacugacuagcccgaugggccucccaacgggcccuccuccccuccuugcaccgagauuaauaaaaaaaaaaaaaaaaaaaaaaaaaaaaaaaaaaaaaaaaaaaaaaaaaaaaaaaaaaaaaaaaaaaaaaaaaaaaaaaaaaaaaaaaaaaaaaaaaaaa

SEQ ID NO: 33106 - RNA, 1662 nt, Artificial Sequence
  mRNA product Design i-3 (A100) comprising derived and/or modified sequence from LASV(Lassa virus/H.sapiens-wt/NGA/2018/ISTH_0959;Clade II)__AVV65099__GPCmut7 (opt5)
aggagaaagcuuaccaugggccagaucauuaccuucuuucaagaggugccccacgucaucgaagagguuaugaacauugugcugaucgcccucagccugcuugcuauucugaaggggaucuacaauguggucacaugcggacucuucggccugguguccuuucuucugcucugugggagaucuugcagcacgaccuauaaaggaguuuacgaacugcagacacuggagcucgacauggccucccugaacaugaccaugccucuuucuuguacaaagaauaacagccaucacuauaucauggugggcaaugaaaccgggcuggagcucacacugaccaacacguccauuaucaaucauaaauucugcaaccuuucugaugcgcacaagaaaaaucuguacgaccaugcucucaugagcauuaucuccaccuuucaccugagcauuccgaacuucaaucaguaugaggccaugucuugugauuuuaacggaggcaagaucuccguccaguacaaucugagccacgccuaugcuauugacgccgcuaaccauugcggcacaaucgccaauggggugcuccaaaccuucaugcggauggcguggggaggcucuuacaucgcccuggauuccgggaagggaagcugggacuguauuaugacaucuuaccaguaucuuaucauucagaacaccacgugggaagaucacugccaguuuucccgccccagcccuaucggcuaccuggggcuccugucccaaagaacacgggacauuuauaucucucgcagacuucugggaaccuucacauggacccucagcgauuccgagggcaacgaaacccccggcggguacugucugacacgguggaugcugaucgaggcugagcucaaaugcuuuggaaauacggccguugcuaaguguaacgaaaaacaugacgaggaguucugcgauaugcugcgccuuuuugacuucaauaagcaggccauuagacggcugaaaaccccugcgcagaugagcauccagcucauuaacaaggccgugaaugcucugaucaacgaucaacuuauuaugaagaaucaucugcgcgacaucaugggcauccccuauugcaacuacucuaaauauuguuaccucaaucacacagucaccgggaagacaucccugccuagaugcugucuggugagcaacggaucuuaccucaaugaaacccacuucagcgacgauauugaacagcaggccgacaacaugaucacggagcugcuucaaaaagaguauauugaucggcagggcaagacaccgcuggggcucguggaccuguuugucuucuccaccucuuuuuaccugaucagcauuuuccuucaccucguuaaaauccccacccaucgccacgugauuggaaagccuugccccaaaccucauagacugaaucacaugggcaucuguuccugcggccuguauaagcaccccggggugccggucaaguggaaacggugaggacuaguuauaagacugacuagcccgaugggccucccaacgggcccuccuccccuccuugcaccgagauuaauaaaaaaaaaaaaaaaaaaaaaaaaaaaaaaaaaaaaaaaaaaaaaaaaaaaaaaaaaaaaaaaaaaaaaaaaaaaaaaaaaaaaaaaaaaaaaaaaaaaa

SEQ ID NO: 33107 - RNA, 1662 nt, Artificial Sequence
  mRNA product Design i-3 (A100) comprising derived and/or modified sequence from LASV(LASV003-NIG-2008;Clade II)__AIT17580__GPCmut7 (opt5)
aggagaaagcuuaccaugggccagaucauuaccuucuuucaagaggugccccacgucaucgaagagguuaugaacauugugcugaucgcccucagccugcuugcuauucugaaggggaucuacaauguggccacaugcggacucuucggccuggucuccuuucuucugcucugugggagaucuugcagcacgaccuauaaaggaguguacgaacugcagacacuggagcucgacauggcgucccugaacaugaccaugccucuuucuuguacaaagaauaacagccaucacuauaucaugguuggcaaugaaaccgggcuggagcucacacugaccaacacguccauuaucaaucauaaauucugcaaccuuucugaugcucacaagaaaaaucuguacgaccaugcccucaugagcauuaucuccaccuuucaccugagcauuccgaacuucaaucaguaugaggccaugucuugugauuuuaacggaggcaagaucuccgugcaguacaaucugagccacacauaugcugucgacgccgcuaaccauugcggcaccauugccaauggggugcuccaaacauucaugcggauggcguggggaggcucuuacaucgcccuggauuccgggaagggaagcugggacuguaucaugaccucuuaccaguaucuuauuauccagaacacgacaugggaagaucacugccaguuuucccgccccagcccuauuggcuaccuggggcuccugucccaaagaacccgggacaucuauauuucucgcagacuucugggaacauucaccuggacccucagcgauuccgagagcaacgaaacacccggcggcuacugucugacgcgguggaugcugaucgaggcugagcucaaaugcuuugggaauaccgccguugcuaaguguaacgaaaaacaugacgaggaguucugcgauaugcugcgccuuuuugacuucaauaagcaggccaucagacggcugaaagcgccugcccagaugucuauucagcucaucaacaaggcugugaaugcccugauuaacgaucaacuuaucaugaagaaucaucugcgcgacauuaugggaauccccuauugcaacuacuccaaauauuguuaccucaaucacacagucaccggcagaacaagccugccucggugcugucuggugucuaacgggagcuaccucaaugaaacccacuucuccgacgauaucgaacagcaggcugacaacaugauuacggagcugcuucaaaaggaguauauggaucgccagggaaaaacaccgcugggccucguggaccuguuugucuucucuaccagcuuuuaccugaucuccauuuuccuucaccucguuaagauccccacccauagacacgugauugggaaaccuugccccaagccucaucggcugaaucacaugggaaucuguagcugcggccuguauaaacaccccggcgugccggucaaguggaagcgcugaggacuaguuauaagacugacuagcccgaugggccucccaacgggcccuccuccccuccuugcaccgagauuaauaaaaaaaaaaaaaaaaaaaaaaaaaaaaaaaaaaaaaaaaaaaaaaaaaaaaaaaaaaaaaaaaaaaaaaaaaaaaaaaaaaaaaaaaaaaaaaaaaaaa

SEQ ID NO: 33108 - RNA, 1662 nt, Artificial Sequence
  mRNA product Design i-3 (A100) comprising derived and/or modified sequence from LASV(LASV035-NIG-2009;Clade II)__AIT17588__GPCmut7 (opt5)
aggagaaagcuuaccaugggccagaucauuaccuucuuucaagaggugccccacgucaucgaagagguuaugaacauugugcugaucgcccucagccugcuugcuauucugaaggggaucuacaauguggccacaugcggacucuucggccuggucuccuuucuucugcucugugggagaucuugcagcacgaccuauaaaggaguguacgaacugcagacacuggagcucgacauggcgucccugaacaugaccaugccucuuucuuguacaaagaauaacagccaucacuauaucaugguuggcaaugaaaccgggcuggagcucacacugaccaacacguccauuaucaaucauaaauucugcaaccuuucugaugcucacaagaaaaaucuguacgaccaugcccucaugagcauuaucuccaccuuucaccugagcauuccgaacuucaaucaguaugaggccaugucuugugauuuuaacggaggcaagaucuccgugcaguacaaucugagccacgcuuaugccgucgacgcugccaaccauugcggcacaauugcgaauggggugcuccaaaccuucaugcggauggccuggggaggcucuuacaucgcucuggauuccgggaagggaagcugggacuguaucaugacaucuuaccaguaucuuauuauccagaacaccacgugggaagaucacugccaguuuucccgccccagcccuauuggcuaccuggggcuccugucccaaagaacacgggacaucuauauuucucgcagacuucugggaaccuucacauggacccucagcgauuccgagggcaacgaaacccccggcggguacugucugacacgguggaugcugaucgaggccgagcucaaaugcuuuggaaauacggcuguugccaaguguaacgaaaaacaugacgaggaguucugcgauaugcugcgccuuuuugacuucaauaagcaggcgaucagacggcugaaagccccugcucagaugagcauucagcucaucaacaaggccgugaaugcucugauuaacgaucaacuuaucaugaagaaucaucugcgcgacauuaugggcauccccuauugcaacuacucuaaauauuguuaccucaaucacaccgucacagggaagaccucccugccuagaugcugucuggugagcaacggaucuuaccucaaugaaacacacuucagcgacgauaucgaacagcaggccgacaacaugauuaccgagcugcuucaaaaagaguauaucgaucggcagggcaagacgccgcuggggcucguggaccuguuugucuucuccacaucuuuuuaccugauuagcaucuuccuucaccucguuaaaauucccacccaucgccacgugaucggaaagccuugccccaaaccucauagacugaaucacaugggcauuuguuccugcggccuguauaagcaccccggggugccggucaaguggaaacggugaggacuaguuauaagacugacuagcccgaugggccucccaacgggcccuccuccccuccuugcaccgagauuaauaaaaaaaaaaaaaaaaaaaaaaaaaaaaaaaaaaaaaaaaaaaaaaaaaaaaaaaaaaaaaaaaaaaaaaaaaaaaaaaaaaaaaaaaaaaaaaaaaaaa

SEQ ID NO: 33109 - RNA, 1662 nt, Artificial Sequence
  mRNA product Design i-3 (A100) comprising derived and/or modified sequence from LASV(LASV1000-NIG-2009;Clade II)__AIT17782__GPCmut7 (opt5)
aggagaaagcuuaccaugggccagaucauuaccuucuuucaagaggugccccacgucaucgaagagguuaugaacauugugcugaucgcccucagccugcuugcuauucugaaggggaucuacaauguggccacaugcggacucuucggccuggucuccuuucuucugcucugugggagaucuugcagcacgaccuauaaaggaguguacgaacugcagacacuggagcucgacauggcgucccugaacaugaccaugccucuuucuuguacaaagaauaacagccaucacuauaucaugguuggcaaugaaaccgggcuggagcucacacugaccaacacguccauuaucaaucauaaauucugcaaccuuucugaugcucacaagaaaaaucuguacgaccaugcccucaugagcauuaucuccaccuuucaccugagcauuccgaacuucaaucaguaugaggccaugucuugugauuuuaacggaggcaagaucuccgugcaguacaaucugagccacacauaugcugucgacgccgcuaaccauugcggcaccauugccaauggggugcuccaaacauucaugcggauggcguggggaggcucuuacaucgcccuggauuccgggaagggaagcugggacuguaucaugaccucuuaccaguaucuuauuauccagaacacgacaugggaagaucacugccaguuuucccgccccagcccuauuggcuaccuggggcuccugucccaaagaacccgggacaucuauauuucucgcagacuucugggaacauucaccuggacccucagcgauuccgagggcaacgaaacacccggcggguacugucugacgcgguggaugcugaucgaggcugagcucaaaugcuuuggaaauaccgccguugcuaaguguaacgaaaaacaugacgaggaguucugcgauaugcugcgccuuuuugacuucaauaagcaggccaucaaaagacugaagaccccugcgcagaugagcauucagcucaucaacaaggccgugaaugcucugauuaacgaucaacuuaucaugaaaaaucaucugcgggacauuaugggcauccccuauugcaacuacucuaaguauuguuaccucaaucacacagucacagggaaaaccucccugccucgcugcugucuggugagcaacggaucuuaccucaaugaaacgcacuucagcgacgauaucgaacagcaggccgacaacaugauuacagagcugcuucaaaaggaguauaucgauagacagggcaaaaccccgcuggggcucguggaccuguuugucuucuccaccucuuuuuaccugauuagcaucuuccuucaccucguuaagauucccacacaucggcacguggugggaaaaccuugccccaagccucaucgccugaaucacaugggcaucuguuccugcggccuguauaagcaccccggggucccggugaaauggaagagaugaggacuaguuauaagacugacuagcccgaugggccucccaacgggcccuccuccccuccuugcaccgagauuaauaaaaaaaaaaaaaaaaaaaaaaaaaaaaaaaaaaaaaaaaaaaaaaaaaaaaaaaaaaaaaaaaaaaaaaaaaaaaaaaaaaaaaaaaaaaaaaaaaaaa

SEQ ID NO: 33110 - RNA, 1662 nt, Artificial Sequence
  mRNA product Design i-3 (A100) comprising derived and/or modified sequence from LASV(LASV221-NIG-2010;Clade II)__AIT17624__GPCmut7 (opt5)
aggagaaagcuuaccaugggccagaucauuaccuucuuucaagaggugccccacgucaucgaagagguuaugaacauugugcugaucgcccucagccugcuugcuauucugaaggggaucuacaauguggccacaugcggacucuucggccuggucuccuuucuucugcucugugggagaucuugcagcacgaccuauaaaggaguguacgaacugcagacacuggagcucgacauggcgucccugaacaugaccaugccucuuucuuguacaaagaauaacagccaucacuauaucaugguuggcaaugaaaccgggcuggagcucacacugaccaacacguccauuaucaaucauaaauucugcaaccuuucugaugcucacaagaaaaaucuguacgaccaugcccucaugagcauuaucuccaccuuucaccugagcauuccgaacuucaaucaguaugaggccaugucuugugauuuuaacggaggcaagaucuccgugcaguacaaucugagccacacauaugcuauugacgccgcuaaccauugcggcaccaucgccaaugggguccuccaaacauucaugcggauggcguggggaggcucuuacaucgcccuggauuccgggaagggaagcugggacuguauuaugaccucuuaccaguaucuuaucauucagaacacgacaugggaagaucacugccaguuuucccgccccagcccuaucggcuaccuggggcuccugucccaaagaacccgggacauuuauaucucucgcagacuucugggaacauucaccuggacccucagcgauuccgagggcaacgaaacacccggcggguacugucugacgcgguggaugcugaucgaggcugagcucaaaugcuuuggaaauaccgccguggcuaaguguaacgaaaaacaugacgaggaguucugcgauaugcugcgccuuuuugacuucaauaagcaggccauuagacggcugaaaaccccugcgcagaugagcauccagcucauuaacaaggccguuaaugcucugaucaacgaucaacuuauuaugaagaaucaucugcgcgacaucaugggcauccccuauugcaacuacucuaaauauuguuaccucaaucacacagugacagggaagaccucccugccuagaugcugucuggucagcaacggaucuuaccucaaugaaacgcacuucagcgacgauauugaacagcaggccgacaacaugaucacagagaugcugcaaaaagaguauauggaucggcagggcaagaccccgcuugggcugguggaccucuuuguguucuccaccucuuuuuaccugauuagcaucuuccugcaccuugucaaaauucccacacaucgccacguuaucggaaagccuugccccaaaccucauagacucaaucacaugggcauuuguuccugcggccuguauaagcaccccggggugccggugaaguggaaacggugaggacuaguuauaagacugacuagcccgaugggccucccaacgggcccuccuccccuccuugcaccgagauuaauaaaaaaaaaaaaaaaaaaaaaaaaaaaaaaaaaaaaaaaaaaaaaaaaaaaaaaaaaaaaaaaaaaaaaaaaaaaaaaaaaaaaaaaaaaaaaaaaaaaa

SEQ ID NO: 33111 - RNA, 1662 nt, Artificial Sequence
  mRNA product Design i-3 (A100) comprising derived and/or modified sequence from LASV(LASV237-NIG-2010;Clade II)__AIT17638__GPCmut7 (opt5)
aggagaaagcuuaccaugggccagaucauuaccuucuuucaagaggugccccacgucaucgaagagguuaugaacauugugcugaucgcccucagccugcuugcuauucugaaggggaucuacaauguggccacaugcggacucuucggccuggucuccuuucuucugcucugugggagaucuugcagcacgaccuauaaaggaguguacgaacugcagacacuggagcucgacauggcgucccugaacaugaccaugccucuuucuuguacaaagaauaacagccaucacuauaucaugguuggcaaugaaaccgggcuggagcucacacugaccaacacguccauuaucaaucauaaauucugcaaccuuucugaugcucacaagaaagaccuguacgaucaugcccucaugagcauuaucuccaccuuucaccugagcauuccgaauuucaaccaguaugaggccaugucuugugacuuuaauggaggcaagaucuccgugcaguacaaccugagccacacauaugcugucgaugccgcuaaucauugcggcaccauugccaacggggugcuccaaacauucaugcggauggcguggggaggcucuuacaucgcccuggacuccgggaagggaagcugggauuguaucaugaccucuuaccaguaucuuauuauccagaauacgacaugggaagaccacugccaguuuucccgccccagcccuauuggcuaccuggggcuccugucccaaagaacccgggauaucuauauuucucgcagacuucugggaacauucaccuggacccucagcgacuccgagggcaacgaaacacccggcggguacugucugacgcgguggaugcugaucgaggcugagcucaaaugcuuuggaaacaccgccguugcuaaguguaaugaaaaacaugaugaggaguucugcgacaugcugcgccuuuuugauuucaacaagcaggccaucagacggcugaaaaccccugcgcagaugagcauucagcucaucaauaaggccgugaacgcucugauuaaugaccaacuuaucaugaagaaccaucugcgcgacauuaugggcauccccuauugcaauuacucuaaauauuguuaccucaaccacacagucacagggaagaccucccugccuagaugcugucuggugagcaauggaucuuaccucaacgaaacgcacuucagcgaugacaucgaacagcaggccgauaauaugauuacagagcugcuucaaaaagaguauauggaccggcagggcaagaccccgcuggggcucguggaucuguuugucuucuccaccucuuuuuaccugaucagcauuuuccuucaccucaucaaaauucccacacaucgccacaucaccggaaagccuugccccaaaccucauagacugaaccacaugggcauuuguuccugcggccuguauaagcaccccgggguuccggugaaguggaaacggugaggacuaguuauaagacugacuagcccgaugggccucccaacgggcccuccuccccuccuugcaccgagauuaauaaaaaaaaaaaaaaaaaaaaaaaaaaaaaaaaaaaaaaaaaaaaaaaaaaaaaaaaaaaaaaaaaaaaaaaaaaaaaaaaaaaaaaaaaaaaaaaaaaaa

SEQ ID NO: 33112 - RNA, 1662 nt, Artificial Sequence
  mRNA product Design i-3 (A100) comprising derived and/or modified sequence from LASV(LASV253-NIG-2011;Clade II)__AIT17670__GPCmut7 (opt5)
aggagaaagcuuaccaugggccagaucauuaccuucuuucaagaggugccccacgucaucgaagagguuaugaacauugugcugaucgcccucagccugcuugcuauucugaaggggaucuacaauguggccacaugcggacucuucggccuggucuccuuucuucugcucugugggagaucuugcagcacgaccuauaaaggaguguacgaacugcagacacuggagcucgacauggcgucccugaacaugaccaugccucuuucuuguacaaagaauaacagccaucacuauaucaugguuggcaaugaaaccgggcuggagcucacacugaccaacacguccauuaucaaucauaaauucugcaaccuuucugaugcucacaagaaaaaucuguacgaccaugcccucaugagcauuaucuccaccuuucaccugagcauuccgaacuucaaucaguaugaggccaugucuugugauuuuaacggaggcaagaucuccgugcaguacaaucugagccacacauaugcugucgacgccgcuaaccauugcggcaccauugccaauggggugcuccaaacauucaugcggauggcguggggaggcucuuacaucgcccuggauuccgggaagggaagcugggacuguaucaugaccucuuaccaguaucuuauuauccagaacacgacaugggaagaucacugccaguuuucccgccccagcccuauuggcuaccuggggcuccugucccaaagaacccgggacaucuauauuucucgcagacuucugggaacauucaccuggacccucagcgauuccgagggcaacgaaacacccggcggguacugucugacgcgguggaugcugaucgaggcugagcucaaaugcuuuggaaauaccgccguugcuaaguguaacgaaaaacaugacgaggaguucugcgauaugcugcgccuuuuugacuucaauaagcaggccaucagacggcugaaagcgccugcccagaugagcauucagcucaucaacaaggcugugaaugcccugauuaacgaucaacuuaucaugaagaaucaucugcgcgacauuaugggcauccccuauugcaacuacucuaaauauuguuaccucaaucacacagucaccgggagaacaucccugccucggugcugucuggugagcaacggaucuuaccucaaugaaacccacuucagcgacgauaucgaacagcaggcugacaacaugauuacggagcugcuucaaaaggaguauaucgaucgccagggcaaaacaccgcuggggcucguggaccuguuugucuucuccaccucuuuuuaccugauuagcaucuuccuucaccucguuaagauucccacccauagacacaucauuggaaaaccuugccccaagccucaucggcugaaucacaugggcaucuguuccugcggccuguauaaacaccccggggugccggugaaguggaagcgcugaggacuaguuauaagacugacuagcccgaugggccucccaacgggcccuccuccccuccuugcaccgagauuaauaaaaaaaaaaaaaaaaaaaaaaaaaaaaaaaaaaaaaaaaaaaaaaaaaaaaaaaaaaaaaaaaaaaaaaaaaaaaaaaaaaaaaaaaaaaaaaaaaaaa

SEQ ID NO: 33113 - RNA, 1662 nt, Artificial Sequence
  mRNA product Design i-3 (A100) comprising derived and/or modified sequence from LASV(LASV254-NIG-2011;Clade II)__AIT17674__GPCmut7 (opt5)
aggagaaagcuuaccaugggccagaucauuaccuucuuucaagaggugccccacgucaucgaagagguuaugaacauugugcugaucgcccucagccugcuugcuauucugaaggggaucuacaauguggccacaugcggacucuucggccuggucuccuuucuucugcucugugggagaucuugcagcacgaccuauaaaggaguguacgaacugcagacacuggagcucgacaugaccaaccugaauaugacaaugccucuuuccuguaccaagaacaauucucaucacuauaucaugguuggcaacgaaacagggcuggagcucacccugacgaauaccagcauuaucaaccauaaauucugcaaucuuuccgaugcgcacaagaaaaaccuguacaaucaugcucucaugucuauuaucagcacauuucaccuguccauuccgaacuucaaucaguaugaggccaugagcugugacuuuaacggaggcaagaucucugugcaguacaaucugucccacagcuaugccgucgaugcugccaaccauugcggcaccauugcuaacggggugcuccaaacauucaugcggauggccuggggaggcucuuacaucgcgcuggacuccgggaagggaaauugggauuguaucaugaccagcuaccaguaucuuauuauccagaacacgacaugggaagaccacugccaguuuucucgccccuccccuauuggcuaccuggggcuccugagccaaagaacccgggauaucuauauuucccgcagacuucugggaacauucaccuggacccucucugacagcgagggcaaugaaacacccggcggguacugucugacgcgguggaugcugaucgaggccgagcucaaaugcuuuggaaacaccgcuguugccaaguguaaugaaaaacaugaugaggaguucugcgacaugcugcgccuuuuugauuucaacaagcaggcuaucagacggcugaaaaccccugcccaggcgaauauucagcucaucaacaaggccgugaaugcucugauuaacgaccaacuuaucaugaagaaucaucugcgcgauauuaugggcauccccuauugcaacuacuccaaauauuguuaccucaaucacacagucacagggaagaccagccugccuagaugcugucuggugucuaacggauccuaccucaaugaaacgcacuucagcgacgacaucgaacagcaggccgauaacaugauuacagagcugcuucaaaaagaguauauggaccggcagggcaagaccccgcuggggcucguggaucuguuugucuucucuaccagcuuuuaccugaucuccauuuuccuucaccucguuaaaauccccacacaucgccacgugauuggaaagccuugccccaaaccucauagacugaaccacaugggcaucuguucuugcggccuguauaagcaccccggggugccggucaaguggaaacggugaggacuaguuauaagacugacuagcccgaugggccucccaacgggcccuccuccccuccuugcaccgagauuaauaaaaaaaaaaaaaaaaaaaaaaaaaaaaaaaaaaaaaaaaaaaaaaaaaaaaaaaaaaaaaaaaaaaaaaaaaaaaaaaaaaaaaaaaaaaaaaaaaaaa

SEQ ID NO: 33114 - RNA, 1662 nt, Artificial Sequence
  mRNA product Design i-3 (A100) comprising derived and/or modified sequence from LASV(Nig08-A19;Clade III)__ADU56618__GPCmut7 (opt5)
aggagaaagcuuaccaugggccagaucgugaccuucuuucaagaggucccccacguuauugaagaggugaugaacaucgugcugauugcccucagcauccuggcuauucuuaaggggcuguacaauaucgccacaugcggacucaucggccuggucacguuccuucugcucuccgggagaucuuguagcaugaccuauaaaggaguguacgaacugcagacacuggagcucaacaugaauacccugaacaugacaaugccucuuuccugcaccaagaauaacucucaucacuauauuaugguuggcaaugaaacagggcuggagcucacccugacgaacaccagccuucugcaucacaaauuuuguaaucucuccgacgcgcauaagaaaaaccuguacgaucacacacugaugucuaucauuagcaccuuccaccucuccaucccgaauuuuaaccaguaugaggcuaugagcugcgacuucaauggaggcaagauuacagugcaguacaaccugucucauuccuaugccaucgaugccgcuaaucacuguggcaccgucgccaacggggugcuucaaacguuuaugcggauggcuuggggaggcagcuacauugcccuggacucugggcgcggaaagugggauugcaucaugacauccuaccaguaucucaucauucagaacaccacaugggaagaccauugucaguucagcagacccucuccuaucggcuaccuggggcuucugucccaacggacccgcgauauuuauaucagcagacggcuccugggaaccuuuacauggacgcuguccgacucugagggcaaugaaacccccggcggguacugccucacacgcuggaugcugauugaggcggagcuuaaauguuucggaaacaccgccguugcuaagugcaaugaaaaacacgaugaggaauuuugugacaugcugagacucuucgauuuuaacaagcaggccauccggcgccugaaagcuccugcccagaugagcauccagcuuauuaauaaggcggugaacgcccugaucaaugaccaacucauuaugaagaaccaccugagagauaucaugggcauucccuauugcaauuacuccaaauauugcuaccugaaccauacaagcaccgggcggacgucucucccucgcuguugccuggucuccaauggaagcuaccuuaacgagacacacuucucugacgacaucgaacagcaggcugauaauaugaucaccgagaugcugcaaaaggaguaucucgacagacagggcaaaaccccgcuggggcugguggaucuuuucguguuuagcacauccuucuaccucauuucuaucuuucugcaucuggucaagauucccacccaccggcauaucguuggaaaaccuugucccaagccucaccgccucaaccacaugggcauuugcagcuguggccuguauaaacagcccggggugccggugagauggaagcggugaggacuaguuauaagacugacuagcccgaugggccucccaacgggcccuccuccccuccuugcaccgagauuaauaaaaaaaaaaaaaaaaaaaaaaaaaaaaaaaaaaaaaaaaaaaaaaaaaaaaaaaaaaaaaaaaaaaaaaaaaaaaaaaaaaaaaaaaaaaaaaaaaaaa

SEQ ID NO: 33115 - RNA, 1665 nt, Artificial Sequence
  mRNA product Design i-3 (A100) comprising derived and/or modified sequence from LASV(G1180-SLE-2010;Clade IV)__AIT17168__GPCmut7 (opt5)
aggagaaagcuuaccaugggccagaucgugaccuucuuucaagaggucccccacguuauugaagaggugaugaacaucgugcugauugcccucagcauccuggcuguccuuaaggggcuguacaauuucgccacaugcggacucgugggccugcuuacguuucugcuccugugugggagauccugcaccgcgucucgguauaaaggaguuuacgaacugcagacacucgagcugaacauggaaacccuuaauaugacaaugccucugagcuguaccaagaacaauucccaucacuauauuauggugggcaacgagacagggcucgagcugacccuuacgaauaccucuaucaucaaccauaaauucugcaaucugagcgacgcucacaagaaaaaccucuacgaucaugcccugauguccauuaucucuacauuucaccugagcauuccgaauuucaaccaguaugaagccauguccugugacuuuaauggaggcaagaucagcguccaguacaaccucucucacuccuaugcuggcgaugccgcuaaucauugcgggaccguggccaacggaguucugcaaacauucaugcgcauggcguggggcgggagcuacauugcccuugacucuggacacggcuccugggauuguaucaugaccagcuaccaguaucugauuauccagaacacgacaugggaggaccauugccaguuuucuagacccuccccuaucggguaccucggacugcuuagccaacggacccgcgauauuuauaucuccagacggcugcucggcacauucaccuggacccugucugacagcgaaggcaaggauacacccgggggauacugucugacgcgcuggaugcucauugaggcugagcugaaaugcuuuggcaauaccgccguggcuaaguguaacgaaaaacacgacgaggaguucugcgauaugcuuagacuguuugacuucaauaagcaggccauccagcggcucaaagcgccugcccagauguccauucaacugaucaacaaggcugucaaugcccuuaucaacgaucagcugauuaugaagaaucaccuccgcgacaucauggggauucccuauugcaacuacagcaaauauuguuaccugaaucauacaaccacaggaaagaccucucugccuaaaugcugucucguguccaacggcagcuaccugaaugaaacgcacuucucugacgauaucgaacagcaagcugacaacaugauuacagagaugcuucagaaggaguauauggaaagacaggggaaaaccccgcugggacucguggaucuguuugucuucagcaccuccuuuuaccugaucucuaucuuccuucaucucguuaagauucccacacaccggcauaucgugggcaaaagcugcccuaagccccaccgccugaaucacaugggcauuuguuccugcgggcuguauaagcagccuggagugcccgucaaauggaagagaugaggacuaguuauaagacugacuagcccgaugggccucccaacgggcccuccuccccuccuugcaccgagauuaauaaaaaaaaaaaaaaaaaaaaaaaaaaaaaaaaaaaaaaaaaaaaaaaaaaaaaaaaaaaaaaaaaaaaaaaaaaaaaaaaaaaaaaaaaaaaaaaaaaaa

SEQ ID NO: 33116 - RNA, 1665 nt, Artificial Sequence
  mRNA product Design i-3 (A100) comprising derived and/or modified sequence from LASV(G1442-SLE-2011;Clade IV)__AIT17180__GPCmut7 (opt5)
aggagaaagcuuaccaugggccagaucgugaccuucuuucaagaggucccccacguuauugaagaggugaugaacaucgugcugauugcccucagcauccuggcuguccuuaaggggcuguacaauguggccacaugcggacucauuggccugguuacguuccuucugcucugugggagauccugcaccacaacccuguauaaaggaguguacgaacugcagacacucgagcugaacauggaaacccuuaauaugacaaugccucugucuuguaccaagaacaauagccaucacuauauccgggucggcaacgagacggggcucgagcugacccuuacaaauaccuccaucauuaaccauaaauuuugcaaucugucugacgcgcacaagaaaaaccucuacgaucaugcucugaugagcaucauuuccacauuccaccugucuaucccgaauuuuaaccaguaugaagccaugagcugugacuucaauggaggcaagauuuccgugcaguacaaccucagccacucuuaugccggcgaugcugccaaucauugcgggaccguugcuaacggagugcugcaaacguuuaugcgcauggccuggggcggguccuacaucgcgcuugacagcggaagaggcaacugggauuguauuaugacaucuuaccaguaucugaucauccagaauaccacaugggacgaucacugccaguucucccggcccagcccuauuggguaccucggacugcuuucucaacgcaccagagacgucuauaucucccggcgccugcucggcaccuuuacauggacgcugagcgauuccgagggcaaggacacccccgggggauacugucugacaagauggaugcucauugaagccgagcugaaaugcuucggcaacaccgcuguggccaaguguaaugagaaacaugaugaagaguuuugcgacaugcuucggcuguucgauuuuaacaagcaggcuauccagcgccucaaagccccugcgcagaugucuauucaacugaucaauaaggccgugaacgcucuuaucaaugaccagcugauuaugaagaaccaccucagagacaucauggggauucccuauugcaauuacagcaaauauuguuaccugaacaauacagccaccggaaagacgucccugccuaaaugcugucucaucagcaacggcucuuaccugaaugaaacacacuucuccgaugacauugagcaggaagcugauaacaugaucaccgagaugcuucaaaaggaguauauggaacggcaggggaaaaccccgcugggacucgucgaccuguucguuuuuagcacaucuuucuaccugaucagcauuuuucuucaucucgugaagauccccacccaccgccauauugugggcaaauccugcccuaagccccacagacugaaucauaugggcaucuguucuugcgggcuguauaagcagccuggaguccccgugcgguggaaacgcugaggacuaguuauaagacugacuagcccgaugggccucccaacgggcccuccuccccuccuugcaccgagauuaauaaaaaaaaaaaaaaaaaaaaaaaaaaaaaaaaaaaaaaaaaaaaaaaaaaaaaaaaaaaaaaaaaaaaaaaaaaaaaaaaaaaaaaaaaaaaaaaaaaaa

SEQ ID NO: 33117 - RNA, 1665 nt, Artificial Sequence
  mRNA product Design i-3 (A100) comprising derived and/or modified sequence from LASV(G3010-SLE-2013;Clade IV)__AIT17344__GPCmut7 (opt5)
aggagaaagcuuaccaugggccagaucgugaccuucuuucaagaggucccccacguuauugaagaggugaugaacaucgugcugauugcccucagcauccuggcuguccuuaaggggcuguacaauuucgccacaugcggacucgugggccugguuacguuucuucugcucugugggagauccugcaccacaucucuguauaaaggaguguacgaacugcagacccucgagcugaacauggaaacacuuaauaugaccaugccucugagcuguacaaagaacaauucccaucacuauauuauggucggcaacgagaccgggcucgagcugacgcuuaccaauacaucuaucaucaaccauaaauucugcaaucugagcgacgcgcacaagaaaaaccucuacaaucaugcucugauguccauuaucucuaccuuucaccugagcauuccgaacuucaaucaguaugaagccauguccugugauuuuaacggaggcaagaucagcgugcaguacaaucucucucacuccuaugccggcgacgcugccagccauugcgggacaguugcuaacggagugcugcaaaccuucaugcggauggccuggggcgggucuuacauugcgcuugauuccggauacggcaagugggacuguaucaugacgagcuaucaguaccugauuauccagaacacaaccugggaggaucacugccaguuuucucgccccuccccuaucggguaucucggacugcuuagccaaagaacacgggacauuuacaucucccgcagacugcucggcaccuucaccuggacacugucugauagcgaaggcaaagacacgcccgggggauauugucugacccgguggaugcucauugaggccgagcugaagugcuuuggcaauacagcugucgccaaauguaacgaaaagcaugaugaggaguucugcgacaugcuucgccuguuugauuucaauaaacaggcuauccagagacucaagaccccugcccagauguccauucaacugaucaacaaggcggugaaugcccuuaucaacgaccagcugauuaugaaaaaucaccuccgggauaucauggggauucccuacugcaacuauagcaaguacuguuaccugaaucacacaaccacgggaaaaacaucucugccuaagugcugucucguguccaacggcagcuaucugaaugaaacccauuucucugacgacaucgaacagcaagcugauaacaugauuaccgagaugcuucagaaagaguacauggaacgccaggggaagacaccgcugggacucgucgaccuguuuguuuucagcaccuccuuuuaucugaucucuaucuuccuucaccucgugaaaauucccacacauagacacaucgugggcaagagcugcccuaagccccaucggcugaaucacaugggcauuuguuccugcgggcuguacaaacagccuggaguccccgugcgcuggaagagaugaggacuaguuauaagacugacuagcccgaugggccucccaacgggcccuccuccccuccuugcaccgagauuaauaaaaaaaaaaaaaaaaaaaaaaaaaaaaaaaaaaaaaaaaaaaaaaaaaaaaaaaaaaaaaaaaaaaaaaaaaaaaaaaaaaaaaaaaaaaaaaaaaaaa

SEQ ID NO: 33118 - RNA, 1665 nt, Artificial Sequence
  mRNA product Design i-3 (A100) comprising derived and/or modified sequence from LASV(G502-SLE-2009;Clade IV)__AIT17126__GPCmut7 (opt5)
aggagaaagcuuaccaugggccagaucgugaccuucuuucaagaggucccccacguuauugaagaggugaugaacaucgugcugauugcccucagcauccuggcuguccuuaaggggcuguacaauuucgccacaugcggacucgugggccugcuuacguuucugcuccugugugggagauccugcaccacaggacuguauaaaggcguuuacgaacuccagacccuggagcuuaacauggaaacacugaauaugaccaugccucucucuuguacaaagaacaauagccaucacuauauuaugguggggaacgagaccggacuggagcuuacgcugaccaauacauccaucaucaaccauaaauucugcaaucucucugacgcgcacaagaaaaaccuguacgaucaugcucugaugagcauuaucuccaccuuucaccucucuauuccgaauuucaaccaguaugaagccaugagcugugacuuuaauggcggcaagaucuccguccaguacaaccugagccacucuuaugccggggaugcugccgaccauugcggaacaguggcuaauggcguucuucaaaccuucaugcggauggccuggggaggguccuacauugcgcuggauagcggccgcgggagaugggacuguaucaugacgucuuaccaguaucucauuauccagaacacaaccugggaggaucacugccaguuuucccggcccagcccuaucggauaccugggccuucugucucaacgcacaagagacauuuauaucucccggcgccuccugggcaccuucaccuggacacugagcgauuccgaagggaaggacacgcccggaggcuacugucucaccagauggaugcugauugaggccgagcuuaaaugcuuugggaacacagcuguggccaaguguaaugaaaaacaugaugaggaguucugcgacaugcugcggcucuuugauuucaacaagcaggcuauccagcgccugaaagccccugcgcagaugucuauucaacuuaucaauaaggccgucaacgcucugaucaaugaccagcucgugaugaagaaccaccugagagacauuaugggaauccccuauugcaauuacagccgguauuguuaccugaaccacaccacaaccggccgcacgucccucccuaaaugcugucuggugagcaaugggucuuaccuuaacgaaacacauuucuccgaugacauugaacagcaagccgauaauaugaucaccgagaugcugcagaaggaguauauggaaagacagggaaaaaccccgcucggccuggucgaccuguuuguuuucagcacaucuuuuuaccuuauuagcaucuuccuccaccuggugaagauccccacccaucggcacauugugggcaaauccugcccuaagccccaucgccugaaccacauggggaucuguucuugcggacucuauaaacagccuggcguccccgugaaguggaagagaugaggacuaguuauaagacugacuagcccgaugggccucccaacgggcccuccuccccuccuugcaccgagauuaauaaaaaaaaaaaaaaaaaaaaaaaaaaaaaaaaaaaaaaaaaaaaaaaaaaaaaaaaaaaaaaaaaaaaaaaaaaaaaaaaaaaaaaaaaaaaaaaaaaaa

SEQ ID NO: 33119 - RNA, 1665 nt, Artificial Sequence
  mRNA product Design i-3 (A100) comprising derived and/or modified sequence from LASV(G733-SLE-2010;Clade IV)__AIT17154__GPCmut7 (opt5)
aggagaaagcuuaccaugggccagaucgugaccuucuuucaagaggucccccacguuauugaagaggugaugaacaucgugcugauugcccucagcauccuggcuguccuuaaggggcuguacaauuucgccacaugcggaauugugggccucguuuccuuucugcuucugugugggagaucuugcacgaccagccucuauaaaggaguguacgaacugcagacacuggagcucaacauggaaacccugaauaugacaaugccucuuuccuguaccaagaacaauucucaucacuauaucauggucggcaacgagacagggcuggagcucacccugacgaauaccagcaucauuaaccauaaauucugcaaucuuuccgacgcgcacaagaaaaaccuguacgaucaugcucucaugucuaucauuagcacauuucaccuguccaucccgaauuucaaccaguaugaagccaugagcugugacuuuaauggaggcaagauuucugugcaguacaaccugucccacagcuaugccggcgaugcugccaaucauugcgggaccaucgcuaacggaguucuccaaacauucaugcggauggccuggggcgggucuuacauugcgcuggacuccggacgcgauagaugggacuguaucaugaccagcuaccaguaucuuaucauucagaacacgacaugggaggaucacugccaguuuucucggcccuccccuaucggcuaccuggggcuccugagccaacgcaccagagacauuuauaucucccggcgccuucugggaacauucaccuggacccucucugauagcgaaggcaaggacacacccggcggguacugucugacgagauggaugcugauugaggccgagcucaaaugcuuuggaaauaccgcuguggccaaguguaacgaaaaacaugaugaggaguucugcgacaugcugcggcuuuuugauuucaauaagcaggcuauccagcgccugaaagccccugcgcagauguccauccaacucauuaacaaggccgucaaugcucugaucaacgaccagcuuauuaugaagaaucaccugagagacaucaugggcauucccuauugcaacuacagcaaauauuguuaccucaaucacacaaccacagggaagaccucucugccuaaaugcugucugguguccaacggaagcuaccucaaugaaacgcauuucucugaugacaucgaacagcaagccgauaacaugaucacagagaugcugcagaaggaguauauggaacggcagggcaaaaccccgcuugggcugguggaccucuuugucuucagcaccuccuuuuaccugauuucuaucuuccugcaccuuguuaagauucccacacaucgccacguggugggaaaaagcugcccuaagccccauagacucaaucacaugggcaucuguuccugcggccuguaugggcagccuggaguccccgugaaguggaaacggugaggacuaguuauaagacugacuagcccgaugggccucccaacgggcccuccuccccuccuugcaccgagauuaauaaaaaaaaaaaaaaaaaaaaaaaaaaaaaaaaaaaaaaaaaaaaaaaaaaaaaaaaaaaaaaaaaaaaaaaaaaaaaaaaaaaaaaaaaaaaaaaaaaaa

SEQ ID NO: 33120 - RNA, 1665 nt, Artificial Sequence
  mRNA product Design i-3 (A100) comprising derived and/or modified sequence from MOPV/LASV reassortant(IGS-1;Clade IV)__AFY05576__GPCmut7 (opt5)
aggagaaagcuuaccaugggccagaucgugaccuucuuucaagaggucccccacguuauugaagaggugaugaacaucgugcugauugcccucagcguccuggcugugcuuaaggggcuguacaauuucgccacaugcggacucguuggccuggugacguuucuucugcucugugggagauccugcaccacaucucuguauaaaggagucuacgaacugcagacccucgagcugaacauggaaacacuuaauaugaccaugccucugagcuguacaaagaacaauucccaucacuauaucauggugggcaacgagaccgggcucgagcugacgcuuaccaauacaucuauuaucaaccauaaauucugcaaucugagcgacgcgcacaagaaaaaccucuacgaucaugcucugauguccaucauuucuaccuuucaccugagcaucccgaauuucaaccaguaugaagccauguccugugacuuuaauggaggcaagauuagcguucaguacaaccucucucacuccuaugccggcgaugcugccaaucauugcgggacaguggcuaacggaguccugcaaaccuucaugcggauggccuggggcgggagcuacaucgcgcuugacucuggacgcggcaacugggauuguauuaugacguccuaccaguaucugaucauucagaauacaaccugggaggaccacugccaguuuagcagacccucuccuaucggguaccucggacugcuuucccaacggacacgcgauaucuauauuagcagacggcugcucggcaccuucaccuggacacuguccgacucugaaggcgaggauacgcccgggggauacugucugacccgcuggaugcucaucgaggccgaacugaagugcuuuggcaacacagcuguggccaaauguaaugagaagcaugacgaagaguucugcgauaugcuuagacuguuugacuucaacaaacaggcuauucagcggcucaaggccccugcgcagaugagcauccaacugauuaauaaagccgugaacgcucuuaucaaugaucagcugaucaugaagaaccaccuccgcgacauuauggggauccccuauugcaauuacuccaaguauuguuaccugaaccacaccacaaccggaagaacgagccugccuaaaugcugucucgucucuaauggcuccuaccugaacgaaacacauuucagcgacgauauugagcagcaagccgacaauaugaucaccgagaugcuucagaaggaauauauggagcggcaggggaaaaccccgcugggacucguugaucuguuuguguucucuaccagcuuuuaccugauuuccaucuuccuucaccucgugaagauccccacacaucgccacauugucggcaaaucuugcccuaagccccauagacugaaccacaugggcaucuguagcugcgggcuguauaaacagccuggagugcccguuaaguggaagcggugaggacuaguuauaagacugacuagcccgaugggccucccaacgggcccuccuccccuccuugcaccgagauuaauaaaaaaaaaaaaaaaaaaaaaaaaaaaaaaaaaaaaaaaaaaaaaaaaaaaaaaaaaaaaaaaaaaaaaaaaaaaaaaaaaaaaaaaaaaaaaaaaaaaa

SEQ ID NO: 33121 - RNA, 1665 nt, Artificial Sequence
  mRNA product Design i-3 (A100) comprising derived and/or modified sequence from LASV(LM765-SLE-2012;Clade IV)__AIT17814__GPCmut7 (opt5)
aggagaaagcuuaccaugggccagaucgugaccuucuuucaagaggucccccacguuauugaagaggugaugaacaucgugcugauugcccucagcauccuggcuguccuuaaggggcuguacaauuucgccacaugcggacucgugggccugguuacguuucuucugcucugugggagauccugcaccacaucucuguauaaaggaguguacgaacugcagacccucgagcugaacauggaaacacuuaauaugaccaugccucugagcuguacaaagaacaauucccaucacuauauuauggucggcaacgagaccgggcucgagcugacgcuuaccaauacaucuaucaucgaccauaaauucugcaaccugagcgaugcgcaccggaagaaucucuacgaccaugcucugauguccauuaucucuaccuuucaccugagcauuccgaacuucaaucaguaugaagccauguccugugauuuuaacggaggcaaaaucagcgugcaguacaaucucucucacuccuaugccaaggacgcugccgaucauugcggcacaguugcuaacggggugcugcaaaccuucaugcgcauggccuggggaggcagcuacauugcgcuugacucugggagaggacggugggauuguaucaugacguccuaccaguaucugauuauccagaauacaaccugggaggaccacugccaguuuagccgccccucuccuaucggcuaccucgggcugcuuucccaaagaacacgggauauuuauaucagccgcagacugcucggaaccuucaccuggacacuguccgacucugaaggcaaggauacgcccggcggguacugucugacccgguggaugcucauugaggccgagcugaaaugcuuuggaaacacagcugucgccaaguguaacgaaaaacaugacgaggaguucugcgauaugcuucgccuguuugacuucaauaagcaggcuauccagagacucaaagccccugcgcagaugagcauucaacugaucaacaaggccgugaaugcucuuaucaacgaccagcugauuaugaagaaucaccuccgggauaucaugggcauucccuauugcaacuacuccaaauauuguuaccugaaucacaccacaaccgggaagacgagccugccuaaaugcugucucgugucuaacggauccuaccugaaugaaacacauuucagcgacgauaucgaacagcaagccgacaacaugauuaccgagaugcuucagaaggaguauauggaacgccagggcaaaaccccgcuggggcucgucgaucuguuuguuuucucuaccagcuuuuaccugaucuccaucuuccuucaccucgugaagauucccacacauagacacaucgugggaaaaccuugccccaagccucaucggcugaaucacaugggcauuuguucuugcggccuguauaagcagcccggggucccggugaaauggaagcgcugaggacuaguuauaagacugacuagcccgaugggccucccaacgggcccuccuccccuccuugcaccgagauuaauaaaaaaaaaaaaaaaaaaaaaaaaaaaaaaaaaaaaaaaaaaaaaaaaaaaaaaaaaaaaaaaaaaaaaaaaaaaaaaaaaaaaaaaaaaaaaaaaaaaa

SEQ ID NO: 33122 - RNA, 1665 nt, Artificial Sequence
  mRNA product Design i-3 (A100) comprising derived and/or modified sequence from LASV(LM776-SLE-2012;Clade IV)__AIT17824__GPCmut7 (opt5)
aggagaaagcuuaccaugggccagaucgugaccuucuuucaagaggucccccacguuauugaagaggugaugaacaucgugcugauugcccucagcauccuggcuguccuuaaggggcuguacaauuucgccacaugcggacucgugggccugguuacguuucuucugcucugugggagauccugcaccacaucuguguauaaaggagucuacgaacugcagacccuggagcucaacauggaaacacugaauaugaccaugccucuuagcuguacaaagaacaauucccaucacuauauuauggugggcaacgagaccgggcuggagcucacgcugaccaauacaucuaucaucaaccauaaauucugcaaucuuagcgacgcgcacaagaaaaaccuguacgaucaugcucucauguccauuaucucuaccuuucaccugagcauuccgaauuucaaccaguaugaagccauguccugugacuuuaauggaggcaagaucagcguucaguacaaccugucucacuccuaugccggcgaugcugccaaucauugcgggacaguggcuaacggaguccuccaaaccuucaugcggauggccuggggcgggagcuacauugcgcuggacucuggacacggcaagugggauuguaucaugacguccuaccaguaucuuauuauccagaacacaaccugggaggaccauugccaguuuagccgccccucuccuaucggguaccugggacuccugucccaaagaacacgggauauuuauaucagccgcagacuucugggcaccuucaccuggacacucuccgacucugaaggcaaagauacgcccgggggauacugucugacccgguggaugcugauugaggccgagcucaagugcuuuggcaauacagcuguggccaaauguaacgaaaagcacgacgaggaguucugcgauaugcugcgccuuuuugacuucaauaaacaggcuauccagagacugaaggccccugcgcagaugagcauucaacucaucaacaaggccgugaaugcucugaucaacgaucagcuuauuaugaaaaaucaucugcgggacaucauggggauucccuauugcaacuacuccaaguauuguuaccucaaucacaccacaaccggaaaaacgagccugccuaagugcugucuggucucuaacggcuccuaccucaaugaaacacacuucagcgacgauaucgaacagcaagccgacaacaugauuaccgagaugcugcagaaagaguauauggaacgccaggggaagaccccgcuuggacugguugaucucuuuguguucucuaccagcuuuuaccugaucuccaucuuccugcaucuugugaaaauucccacacacagacauaucgucggcaagucuugcccuaagccccaccggcucaaucacaugggcauuuguagcugcgggcuguauaaacagccuggagugcccguucgcuggaagagaugaggacuaguuauaagacugacuagcccgaugggccucccaacgggcccuccuccccuccuugcaccgagauuaauaaaaaaaaaaaaaaaaaaaaaaaaaaaaaaaaaaaaaaaaaaaaaaaaaaaaaaaaaaaaaaaaaaaaaaaaaaaaaaaaaaaaaaaaaaaaaaaaaaaa

SEQ ID NO: 33123 - RNA, 1665 nt, Artificial Sequence
  mRNA product Design i-3 (A100) comprising derived and/or modified sequence from LASV(Mad39;Clade IV)__ANH09722__GPCmut7 (opt5)
aggagaaagcuuaccaugggccagaucgugaccuucuuucaagaggucccccacguuauugaagaggugaugaacaucgugcugauugcccucagcauccuggcuguccuuaaggggcuguacaauguggccacaugcggacucauuggccugguuacguuccuucugcucugugggagauccugcaccacaacccuguauaaaggaguguacgaacugcaggcgcucgagcugaacauggaaacacuuaauaugaccaugccucugucuuguacaaagaacaauagccaucacuauauccgggucggcaacgagaccgggcucgagcugacgcuuaccaauacaucccugaucaaccauaaauuuugcaaucucucugacgcucacaagaaaaaccuguacgaucaugcccugaugagcauuaucuccaccuuccaccucucuauuccgaauuuuaaccaguaugaagccaugagcugugacuucaaugauggaaagaucuccgugcaguacaaccugagccacacauaugcuggcgacaccgccaaucauugcggcacgguugcuaacggggugcuucaaacauuuaugcgcauggccuggggaggcucuuacauugcgcuggauuccgggagaggaggcugggacuguaucaugaccagcuaccaguaucucauuauccagaacacaaccugggaggaucacugccaguucucucggcccuccccuaucggguaccugggacuucugagccaacgcaccagagacauuuauaucucucggcgccuccugggcacauuuacguggacccuguccgauagcgaaggcaaggacacacccgggggauacugucucaccagauggaugcugauugaggccgagcuuaaaugcuucggcaauacagcugucgccaaguguaacgaaaaacaugaugaggaauuuugcgacaugcugcgccucuucgauuuuaauaagcaggcuauccagcggcugaaagccccugcgcagauguccauucaacuuaucaacaaggccgugaaugcucugaucaacgaccagcucauuaugaagaaucaccugagagacaucauggggauucccuauugcaacuacucuaaauauuguuaccugaaucacaccgugacgggaaagacaagccucccuaaaugcugucuggucuccaacggcagcuaccuuaaugagacccauuucucugaugacaucgaacagcaagccgauaacaugauuaccgagaugcugcagaaggaguauauggaacggcaggggaaaacaccgcucggacugguugaccuguucguguuuuccaccagcuucuaccuuaucucuaucuuucuccaccuggugaagauucccacacaucgccacgucgugggcaaaccuugccccaagccucauagacugaaucacaugggcaucuguagcugcggguucuauaagcagcccggaguuccggugcgguggaaacgcugaggacuaguuauaagacugacuagcccgaugggccucccaacgggcccuccuccccuccuugcaccgagauuaauaaaaaaaaaaaaaaaaaaaaaaaaaaaaaaaaaaaaaaaaaaaaaaaaaaaaaaaaaaaaaaaaaaaaaaaaaaaaaaaaaaaaaaaaaaaaaaaaaaaa

SEQ ID NO: 33124 - RNA, 1665 nt, Artificial Sequence
  mRNA product Design i-3 (A100) comprising derived and/or modified sequence from LASV(Z0947-SLE-2011;Clade IV)__AIT17840__GPCmut7 (opt5)
aggagaaagcuuaccaugggccagaucgugaccuucuuucaagaggucccccacguuauugaagaggugaugaacaucgugcugauugcccucagcauccuggcuguccuuaaggggcuguacaauuucgccacaugcggacucgugggccugguuacguuucuucugcucugugggagauccugcaccauuucucuguauaaaggaguguacgaacugcagacacucgagcugaacauggaaacccuuaauaugacaaugccucugagcuguaccaagaacaauucccaucacuauaucauggucggcaacgagacagggcucgagcugacccuuacgaauaccucuaucauuaaccauaaauucugcaaucugagcgacgcgcacaagaaaaaccucuacgaucaugcucugauguccaucauuucuacauuucaccugagcaucccgaauuucaaccaguaugaagccauguccugugacuuuaauggaggcaagauuagcgugcaguacaaccucucucacuccuaugccggcgaugcugccaaucauugcgggaccguugcuaacggagugcugcaaacauucaugcggauggccuggggcgggagcuacaucgcgcuugacucuggacgcgauagaugggacuguauuaugaccuccuaccaguaucugaucauccagaacacgacaugggaggaucacugccaguuuagccggcccucuccuauuggcuaccucgggcugcuuucccaacgcaccagagacaucuauauuagccggcgccugcucggaacauucaccuggacccuguccgauucugaaggcaaggacacacccggcggguacugucugacgagauggaugcucaucgaggccgagcugaaaugcuuuggaaauaccgcugucgccaaguguaacgaaaaacaugaugaggaguucugcgacaugcuucggcuguuugauuucaauaagcaggcuauucagcgccucaaagccccugcgcagaugagcauccaacugaucaacaaggccgugaaugcucuuauuaacgaccagcugaucaugaagaaucaccucagagacauuaugggcauccccuauugcaacuacuccaaauauuguuaccugaaucacacaaccacagggaagaccagccugccuaaaugcugucucgugucuaacggauccuaccugaaugaaacgcauuucagcgaugacauugaacagcaagccgauaacaugaucacagagaugcuucagaaggaguauauggaacggcagggcaaaaccccgcuggggcucgucgaccuguuuguuuucucuaccagcuuuuaccugaucuccauuuuccuucaccucgugaagauccccacacaucgccacauugugggaaaaccuugccccaagccucauagacugaaucacaugggcaucuguucuugcggccuguauaagcagcccggggucccggugaaauggaagcggugaggacuaguuauaagacugacuagcccgaugggccucccaacgggcccuccuccccuccuugcaccgagauuaauaaaaaaaaaaaaaaaaaaaaaaaaaaaaaaaaaaaaaaaaaaaaaaaaaaaaaaaaaaaaaaaaaaaaaaaaaaaaaaaaaaaaaaaaaaaaaaaaaaaa

SEQ ID NO: 33125 - protein, 491 aa, Artificial Sequence
  derived and/or modified protein sequence (artificial) from LASV(Josiah;Clade IV)__NP_694870__GPCmut8
MGQIVTFFQEVPHVIEEVMNIVLIALSVLAVLKGLYNFATCGLVGLVTFLLLCGRSCTTSLYKGVYELQTLELNMETLNMCMPLSCTKNNSHHYIMVGNETGLELTLTNTSIINHKFCNLSDAHKKNLYDHALMSIISTFHLSIPNFNQYEAMSCDFNGGKISVQYNLSHSYAGDAANHCGTVANGVLQTFMRMAWGGSYIALDSGRGNWDCIMTSYQYLIIQNTTWEDHCQFSRPSPIGYLGLLSQRTRDIYISRRLLGTFTWTLSDSEGKDTPGGYCLTRWMLIEAELKCFGNTAVAKCNEKHDEEFCDMLRLFDFCKQAIQRLKAPAQMSIQLINKAVNALINDQLIMKNHLRDIMGIPYCNYSKYCYLNHTTTGRTSLPKCCLVSNGSYLNETHFSDDIEQQADNMITEMLQKEYMERQGKTPLGLVDLFVFSTSFYLISIFLHLVKIPTHRHIVGKSCPKPHRLNHMGICSCGLYKQPGVPVKWKR

SEQ ID NO: 33126 - protein, 490 aa, Artificial Sequence
  derived and/or modified protein sequence (artificial) from LASV(LP;Clade I)__AAF86701__GPCmut8
MGQIITFFQEVPHVIEEVMNIVLIALSLLAILKGLYNIATCGIIGLVAFLFLCGKSCSLTLKGGYELQTLELNMETLNMCMPLSCTKNSSHHYIRVGNETGLELTLTNTSIINHKFCNLSDAHKKNLYDHALMSIISTFHLSIPNFNQYEAMSCDFNGGKISVQYNLSHSYAGDAAEHCGTVANGVLQTFMRMAWGGRYIALDSGKGNWDCIMTSYQYLIIQNTTWEDHCQFSRPSPIGYLGLLSQRTRDIYISRRLLGTFTWTLSDSEGNETPGGYCLTRWMLIEAELKCFGNTAVAKCNEKHDEEFCDMLRLFDFCKQAIRRLKAPAQMSIQLINKAVNALINDQLIMKNHLRDIMGIPYCNYSKYCYLNHTSSGRTSLPKCCLISNGSYLNETQFSDDIEQQADNMITEMLQKEYIERQGKTPLGLVDIFIFSTSFYLISIFLHLIKIPTHRHIVGKPCPKPHRLNHMGVCSCGLYKHPGVPTKWKR

SEQ ID NO: 33127 - protein, 490 aa, Artificial Sequence
  derived and/or modified protein sequence (artificial) from LASV(803213;Clade II)__AAF86703__GPCmut8
MGQIITFFQEVPHVIEEVMNIVLIALSLLAILKGIYNVATCGLFGLISFLLLCGRSCSVTYKGVYELQTLELNMANLNMCMPLSCTKNNSHHYIMVGNETGLELTLTNTSIINHKFCNLSDAHKKNLYDHALMSIISTFHLSIPNFNQYEAMSCDFNGGKISVQYNLSHSFAVDAANHCGTIANGVLQTFMRMAWGGSYIALDSGKGNWDCIMTSYQYLIIQNTTWEDHCQFSRPSPIGYLGLLSQRTRDIYISRRLLGTFTWTLSDSEGNEAPGGYCLTRWMLIEAELKCFGNTAVAKCNEKHDEEFCDMLRLFDFCKQAIKRLKTPAQMSIQLINKAVNALINDQLIMKNHLRDIMGIPYCNYSRYCYLNHTVTGKTSLPRCCLVSNGSYLNETHFSDDIEQQADNMITEMLQKEYMDRQGKTPLGLVDLFVFSTSFYLISIFLHLVKIPTHRHIVGKPCPKPHRLNHMGICSCGLYKHPGVPVKWKR

SEQ ID NO: 33128 - protein, 490 aa, Artificial Sequence
  derived and/or modified protein sequence (artificial) from LASV(GA391;Clade III)__CAA36645__GPCmut8
MGQIVTFFQEVPHVIEEVMNIVLIALSILAILKGLYNVATCGLIGLVTFLLLSGRSCSLIYKGTYELQTLELNMETLNMCMPLSCTKNNSHHYIRVGNETGLELTLTNTSILNHKFCNLSDAHKRNLYDHSLMSIISTFHLSIPNFNQYEAMSCDFNGGKITVQYNLSHSFAVDAAGHCGTLANGVLQTFMRMAWGGSYIALDSGRGNWDCIMTSYQYLIIQNTTWDDHCQFSRPSPIGYLGLLSQRTRDIYISRRLLGTFTWTLSDSEGNETPGGYCLTRWMLIEAELKCFGNTAVAKCNEKHDEEFCDMLRLFDFCKQAIRRLKTPAQMSIQLINKAVNALINDQLIMKNHLRDIMGIPYCNYSRYCYLNHTSTGKTSLPRCCLISNGSYLNETKFSDDIEQQADNMITEMLQKEYIDRQGKTPLGLVDLFVFSTSFYLISIFLHLVKIPTHRHIVGKPCPKPHRLNHMGICSCGLYKQPGVPVRWKR

SEQ ID NO: 33129 - protein, 491 aa, Artificial Sequence
  derived and/or modified protein sequence (artificial) from LASV(AV;Clade V)__CCA30314__GPCmut8
MGQIVTFFQEVPHVIEEVMNIVLIALSILAVLKGLYNIATCGLIGLITFLLLCGRSCSSNLYKGVYELQSLDLNMETLNMCMPLSCTKNNSHHYIRVGNDTGLELTLTNTSILNHKFCNLSDAHKKDLYDHALMSIISTFHLSIPNFNQYEAMSCDFNGGKISVQYNLSHSYAIDAANHCGTVANGILQTFMRMAWGGSYIALDSGRGNWDCIMTSYQYLIIQNTTWENHCQFSRPSPIGYLGLLSQRTRDIYISRRLLGTFTWTLSDSEGNATPGGYCLTRWMLIEAELKCFGNTAVAKCNEKHDEEFCDMLRLFDFCKQAISRLKSPAQMSIQLINKAVNALINDQLIMKNHLRDIMGIPYCNYSKYCYLNHTITGKTSLPKCCLVSNGSYLNETHFSDDIEQQADNMITEMLQKEYMERQGKTPLGLVDLFVFSTSFYLISIFLRLVKIPTHRHIVGKPCPKPHRLNHMGICSCGLYKQPGVPVRWKR

SEQ ID NO: 33130 - protein, 490 aa, Artificial Sequence
  derived and/or modified protein sequence (artificial) from LASV(Togo/2016/7082;Clade VI)__AMR44577__GPCmut8
MGQIITFFQEVPHVIEEVMNIVLIALSLLAILKGVYNVATCGIIGLVTFLFLCGRSCSLIYKGSYELQTLELNMETLNMCMPLSCTKNSSHHYIRVGNETGLELTLTNTSIINHKFCNLSDAHKRNLYDHALMSILSTFHLSIPNFNQYEAMSCDFNGGKISVQYNLSHAYAVDAAEHCGTVANGVLQTFMRMAWGGSYIALDSGRGNWDCIMTSYQYLIIQNTTWEDHCQFSRPSPIGYLGLLSQRTRDIYISRRLLGTFTWTLSDSEGNETPGGYCLTRWMLIEAELKCFGNTAVAKCNEKHDEEFCDMLRLFDFCKQAIQRLKSPAQMSIQLINKAVNALINDQLIMKNHLRDMMGIPYCNYSKYCYLNHTSSGRTSLPKCCLVSNGSYLNETHFSDDIEQQADNMITEMLQKEYIDRQGKTPLGLVDLFVFSTSFYLISIFLHLIKIPTHRHIVGKPCPKPHRLNHMGICSCGLYKQPGVPTRWKR

SEQ ID NO: 33131 - protein, 490 aa, Artificial Sequence
  derived and/or modified protein sequence (artificial) from LASV(KAK-428;Clade n.d. (VII))__ANH09740__GPCmut8
MGQIVTFFQEVPHVIEEVMNIVLIALSLLAILKGLYNFATCGVIGLITFLLLCGRSCSATYKGQYELQTLELNMESLNMCMPLSCTKNNSHHYIRAGNNTGLELTLTNTSIISHKFCNLSDAHKKNLYDHTLMSIITTFHLSIPNFNQYEAMSCDFNGGKISIQYNLSHSYAGDAAQHCGTVANGVLQTFMRMAWGGSYLALDSGRRGWDCIISSYQYLIIQNTTWDDHCQFSRPSPIGYLGFVSQKTRDIYISRRLLGTFTWTLSDSEGHDMPGGYCLTRWMLIEADLKCFGNTAVAKCNEKHDEEFCDMWRLFDFCKQAIQRLKAPAQMNIQLINKAVNALINDQLMMKNHLRDIMGIPYCNYSKFCYLNNTTTGRTSLPRCCLISNGSYLNETHFSDDIEQQADNMITEMLQKEYMDRQGKTPLGLVDLFVFSTSFYLITIFLHLVKIPTHRHIVGKPCPKPHRLNHMGICSCGLYKQPGVPVRWKR

SEQ ID NO: 33132 - protein, 490 aa, Artificial Sequence; identical to SEQ ID NO: 33126
  derived and/or modified protein sequence (artificial) from LASV(Pinneo-NIG-1969;Clade I)__AIT17836__GPCmut8

SEQ ID NO: 33133 - protein, 490 aa, Artificial Sequence
  derived and/or modified protein sequence (artificial) from LASV(ISTH0009-NIG-2011;Clade II)__AIT17404__GPCmut8
MGQIITFFQEVPHVIEEVMNIVLIALSLLAILKGIYNVATCGLFGLVSFLLLCGRSCSTTYKGVYELQTLELDMASLNMCMPLSCTKNNSHHYIMVGNETGLELTLTNTSIINHKFCNLSDAHKKNLYDHALMSIISTFHLSIPNFNQYEAMSCDFNGGKISVQYNLSHAYAVDAANHCGTIANGVLQTFMRMAWGGSYIALDSGKGSWDCIMTSYQYLIIQNTTWEDHCQFSRPSPIGYLGLLSQRTRDIYISRRLLGTFTWTLSDSEGNETPGGYCLTRWMLIEAELKCFGNTAVAKCNEKHDEEFCDMLRLFDFCKQAIRRLKTPAQMSIQLINKAVNALINDQLIMKNHLRDIMGIPYCNYSKYCYLNHTVTGKTSLPRCCLVSNGSYLNETHFSDDIEQQADNMITELLQKEYMDRQGKTPLGLVDLFVFSTSFYLISIFLHLIKIPTHRHITGKPCPKPHRLNHMGICSCGLYKHPGVPVKWKR

SEQ ID NO: 33134 - protein, 490 aa, Artificial Sequence
  derived and/or modified protein sequence (artificial) from LASV(ISTH2010-NIG-2012;Clade II)__AIT17482__GPCmut8
MGQIITFFQEVPHVIEEVMNIVLIALSLLAILKGIYNVATCGLFGLVSFLLLCGRSCSTTYKGVYELQTLELDMASLNMCMPLSCTKNNSHHYIMVGNETGLELTLTNTSIINHKFCNLSDAHKKNLYDHALMSIISTFHLSIPNFNQYEAMSCDFNGGKISVQYNLSHAYAVDAANHCGTIANGVLQTFMRMAWGGSYIALDSGKGSWDCIMTSYQYLIIQNITWEDHCQFSRPSPIGYLGLLSQRTRDIYISRRLLGTFTWTLSDSEGNETPGGYCLTRWMLIEAELKCFGNTAVAKCNEKHDEEFCDMLRLFDFCKQAIRRLKTPAQMSIQLINKAVNALINDQLIMKNHLRDIMGIPYCNYSKYCYLNHTVTGKTSLPRCCLVSNGSYLNETHFSDDIEQQADNMITELLQKEYIDRQGKTPLGLVDLFVFSTSFYLISIFLHLVKIPTHRHVVGKPCPKPHRLNHMGICSCGLYKHPGVPVKWKR

SEQ ID NO: 33135 - protein, 490 aa, Artificial Sequence
  derived and/or modified protein sequence (artificial) from LASV(Lassa virus/H.sapiens-wt/NGA/2015/ISTH_0543;Clade II)__AVO03639__GPCmut8
MGQIITFFQEVPHVIEEVMNIVLIALSLLAILKGIYNVATCGLFGLVSFLLLCGRSCSTTYKGVYELQTLELDMANLNMCMPLSCTKNNSHHYIMVGNETGLELTLTNTSIINHKFCNLSDAHKKNLYDHALMSIISTFHLSIPNFNQYEAMSCDFNGGKISVQYNLSHTYAVDAANHCGTIANGVLQTFMRMAWGGSYIALDSGKGSWDCIMTSYQYLVIQNTTWEDHCQFSRPSPIGYLGLLSQRTRDIYISRRLLGTFTWTLSDSEGNETPGGYCLTRWMLIEAELKCFGNTAVAKCNEKHDEEFCDMLRLFDFCKQAIRRLKTPAQMSIQLINKAVNALINDQLIMKNHLRDIMGIPYCNYSKYCYLNHTVTGKTSLPRCCLVSNGSYLNETHFSDDIEQQADNMITELLQKEYIDRQGKTPLGLVDLFVFSTSFYLISIFLHLVKIPTHRHITGKPCPKPHRLNHMGICSCGLYKHPGVPVKWKR

SEQ ID NO: 33136 - protein, 490 aa, Artificial Sequence
  derived and/or modified protein sequence (artificial) from LASV(Lassa virus/H.sapiens-wt/NGA/2016/ISTH_0009;Clade II)__AVO03571__GPCmut8
MGQIITFFQEVPHVIEEVMNIVLIALSLLAILKGIYNVATCGLLGLVSFLLLCGRSCSTTYKGVYELQTLELDMASLNMCMPLSCTKNNSHHYIMVGNETGLELTLTNTSIINHKFCNLSDAHKKNLYDHALMSIISTFHLSIPNFNQYEAMSCDFNGGRISVQYNLSHSYAVDAANHCGTIANGVLQTFMRMAWGGSYIALDSGKGSWDCIMTSYQYLIIQNTTWEDHCQFSRPSPIGYLGLLSQRTRDIYISRRLLGTFTWTLSDSEGNETPGGYCLTRWMLIEAELKCFGNTAVAKCNEKHDEEFCDMLRLFDFCKQAIRRLKTPAQMSIQLINKAVNALINDQLIMKNHLRDIMGIPYCNYSKYCYLNHTVTGKTSLPRCCLVSNGSYLNETHFSDDIEQQADNMITELLQKEYIDRQGKTPLGLVDLFVFSTSFYLISIFLHLVKIPTHRHITGKPCPKPHRLNHMGICSCGLYNHPGVPVKWKR

SEQ ID NO: 33137 - protein, 490 aa, Artificial Sequence
  derived and/or modified protein sequence (artificial) from LASV(Lassa virus/H.sapiens-wt/NGA/2016/ISTH_0017;Clade II)__AVO03567__GPCmut8
MGQIITFFQEVPHVIEEVMNIVLIALSLLAILKGIYNVATCGLFGLVSFLLLCGRSCSTTYKGVYELQTLELDMASLNMCMPLSCTKNNSHHYIMVGNETGLELTLTNTSIINHKFCNLSDAHKKNLYDHALMSIISTFHLSIPNFNQYEAMSCDFNGGKISVQYNLSHTYAIDAANHCGTIANGVLQTFMRMAWGGSYIALDSGKGSWDCIMTSYQYLIIQNTTWEDHCQFSRPSPIGYLGLLSQRTRDIYISRRLLGTFTWTLSDSEGNETPGGYCLTRWMLIEAELKCFGNTAVAKCNEKHDEEFCDMLRLFDFCKQAIRRLKTPAQMSIQLINKAVNALINDQLIMKNHLRDIMGIPYCNYSKYCYLNHTVTGKTSLPRCCLVSNGSYLNETHFSDDIEQQADNMITELLQKEYMDRQGKTPLGLVDLFVFSTSFYLISIFLHLVRIPTHRHVIGKPCPKPHRLNHMGICSCGLYKHPGVPVKWKR

SEQ ID NO: 33138 - protein, 490 aa, Artificial Sequence
  derived and/or modified protein sequence (artificial) from LASV(Lassa virus/H.sapiens-wt/NGA/2018/ISTH_0959;Clade II)__AVV65099__GPCmut8
MGQIITFFQEVPHVIEEVMNIVLIALSLLAILKGIYNVVTCGLFGLVSFLLLCGRSCSTTYKGVYELQTLELDMASLNMCMPLSCTKNNSHHYIMVGNETGLELTLTNTSIINHKFCNLSDAHKKNLYDHALMSIISTFHLSIPNFNQYEAMSCDFNGGKISVQYNLSHAYAIDAANHCGTIANGVLQTFMRMAWGGSYIALDSGKGSWDCIMTSYQYLIIQNTTWEDHCQFSRPSPIGYLGLLSQRTRDIYISRRLLGTFTWTLSDSEGNETPGGYCLTRWMLIEAELKCFGNTAVAKCNEKHDEEFCDMLRLFDFCKQAIRRLKTPAQMSIQLINKAVNALINDQLIMKNHLRDIMGIPYCNYSKYCYLNHTVTGKTSLPRCCLVSNGSYLNETHFSDDIEQQADNMITELLQKEYIDRQGKTPLGLVDLFVFSTSFYLISIFLHLVKIPTHRHVIGKPCPKPHRLNHMGICSCGLYKHPGVPVKWKR

SEQ ID NO: 33139 - protein, 490 aa, Artificial Sequence
  derived and/or modified protein sequence (artificial) from LASV(LASV003-NIG-2008;Clade II)__AIT17580__GPCmut8
MGQIITFFQEVPHVIEEVMNIVLIALSLLAILKGIYNVATCGLFGLVSFLLLCGRSCSTTYKGVYELQTLELDMASLNMCMPLSCTKNNSHHYIMVGNETGLELTLTNTSIINHKFCNLSDAHKKNLYDHALMSIISTFHLSIPNFNQYEAMSCDFNGGKISVQYNLSHTYAVDAANHCGTIANGVLQTFMRMAWGGSYIALDSGKGSWDCIMTSYQYLIIQNTTWEDHCQFSRPSPIGYLGLLSQRTRDIYISRRLLGTFTWTLSDSESNETPGGYCLTRWMLIEAELKCFGNTAVAKCNEKHDEEFCDMLRLFDFCKQAIRRLKAPAQMSIQLINKAVNALINDQLIMKNHLRDIMGIPYCNYSKYCYLNHTVTGRTSLPRCCLVSNGSYLNETHFSDDIEQQADNMITELLQKEYMDRQGKTPLGLVDLFVFSTSFYLISIFLHLVKIPTHRHVIGKPCPKPHRLNHMGICSCGLYKHPGVPVKWKR

SEQ ID NO: 33140 - protein, 490 aa, Artificial Sequence
  derived and/or modified protein sequence (artificial) from LASV(LASV035-NIG-2009;Clade II)__AIT17588__GPCmut8
MGQIITFFQEVPHVIEEVMNIVLIALSLLAILKGIYNVATCGLFGLVSFLLLCGRSCSTTYKGVYELQTLELDMASLNMCMPLSCTKNNSHHYIMVGNETGLELTLTNTSIINHKFCNLSDAHKKNLYDHALMSIISTFHLSIPNFNQYEAMSCDFNGGKISVQYNLSHAYAVDAANHCGTIANGVLQTFMRMAWGGSYIALDSGKGSWDCIMTSYQYLIIQNTTWEDHCQFSRPSPIGYLGLLSQRTRDIYISRRLLGTFTWTLSDSEGNETPGGYCLTRWMLIEAELKCFGNTAVAKCNEKHDEEFCDMLRLFDFCKQAIRRLKAPAQMSIQLINKAVNALINDQLIMKNHLRDIMGIPYCNYSKYCYLNHTVTGKTSLPRCCLVSNGSYLNETHFSDDIEQQADNMITELLQKEYIDRQGKTPLGLVDLFVFSTSFYLISIFLHLVKIPTHRHVIGKPCPKPHRLNHMGICSCGLYKHPGVPVKWKR

SEQ ID NO: 33141 - protein, 490 aa, Artificial Sequence
  derived and/or modified protein sequence (artificial) from LASV(LASV1000-NIG-2009;Clade II)__AIT17782__GPCmut8
MGQIITFFQEVPHVIEEVMNIVLIALSLLAILKGIYNVATCGLFGLVSFLLLCGRSCSTTYKGVYELQTLELDMASLNMCMPLSCTKNNSHHYIMVGNETGLELTLTNTSIINHKFCNLSDAHKKNLYDHALMSIISTFHLSIPNFNQYEAMSCDFNGGKISVQYNLSHTYAVDAANHCGTIANGVLQTFMRMAWGGSYIALDSGKGSWDCIMTSYQYLIIQNTTWEDHCQFSRPSPIGYLGLLSQRTRDIYISRRLLGTFTWTLSDSEGNETPGGYCLTRWMLIEAELKCFGNTAVAKCNEKHDEEFCDMLRLFDFCKQAIKRLKTPAQMSIQLINKAVNALINDQLIMKNHLRDIMGIPYCNYSKYCYLNHTVTGKTSLPRCCLVSNGSYLNETHFSDDIEQQADNMITELLQKEYIDRQGKTPLGLVDLFVFSTSFYLISIFLHLVKIPTHRHVVGKPCPKPHRLNHMGICSCGLYKHPGVPVKWKR

SEQ ID NO: 33142 - protein, 490 aa, Artificial Sequence
  derived and/or modified protein sequence (artificial) from LASV(LASV221-NIG-2010;Clade II)__AIT17624__GPCmut8
MGQIITFFQEVPHVIEEVMNIVLIALSLLAILKGIYNVATCGLFGLVSFLLLCGRSCSTTYKGVYELQTLELDMASLNMCMPLSCTKNNSHHYIMVGNETGLELTLTNTSIINHKFCNLSDAHKKNLYDHALMSIISTFHLSIPNFNQYEAMSCDFNGGKISVQYNLSHTYAIDAANHCGTIANGVLQTFMRMAWGGSYIALDSGKGSWDCIMTSYQYLIIQNTTWEDHCQFSRPSPIGYLGLLSQRTRDIYISRRLLGTFTWTLSDSEGNETPGGYCLTRWMLIEAELKCFGNTAVAKCNEKHDEEFCDMLRLFDFCKQAIRRLKTPAQMSIQLINKAVNALINDQLIMKNHLRDIMGIPYCNYSKYCYLNHTVTGKTSLPRCCLVSNGSYLNETHFSDDIEQQADNMITEMLQKEYMDRQGKTPLGLVDLFVFSTSFYLISIFLHLVKIPTHRHVIGKPCPKPHRLNHMGICSCGLYKHPGVPVKWKR

SEQ ID NO: 33143 - protein, 490 aa, Artificial Sequence
  derived and/or modified protein sequence (artificial) from LASV(LASV237-NIG-2010;Clade II)__AIT17638__GPCmut8
MGQIITFFQEVPHVIEEVMNIVLIALSLLAILKGIYNVATCGLFGLVSFLLLCGRSCSTTYKGVYELQTLELDMASLNMCMPLSCTKNNSHHYIMVGNETGLELTLTNTSIINHKFCNLSDAHKKDLYDHALMSIISTFHLSIPNFNQYEAMSCDFNGGKISVQYNLSHTYAVDAANHCGTIANGVLQTFMRMAWGGSYIALDSGKGSWDCIMTSYQYLIIQNTTWEDHCQFSRPSPIGYLGLLSQRTRDIYISRRLLGTFTWTLSDSEGNETPGGYCLTRWMLIEAELKCFGNTAVAKCNEKHDEEFCDMLRLFDFCKQAIRRLKTPAQMSIQLINKAVNALINDQLIMKNHLRDIMGIPYCNYSKYCYLNHTVTGKTSLPRCCLVSNGSYLNETHFSDDIEQQADNMITELLQKEYMDRQGKTPLGLVDLFVFSTSFYLISIFLHLIKIPTHRHITGKPCPKPHRLNHMGICSCGLYKHPGVPVKWKR

SEQ ID NO: 33144 - protein, 490 aa, Artificial Sequence
  derived and/or modified protein sequence (artificial) from LASV(LASV253-NIG-2011;Clade II)__AIT17670__GPCmut8
MGQIITFFQEVPHVIEEVMNIVLIALSLLAILKGIYNVATCGLFGLVSFLLLCGRSCSTTYKGVYELQTLELDMASLNMCMPLSCTKNNSHHYIMVGNETGLELTLTNTSIINHKFCNLSDAHKKNLYDHALMSIISTFHLSIPNFNQYEAMSCDFNGGKISVQYNLSHTYAVDAANHCGTIANGVLQTFMRMAWGGSYIALDSGKGSWDCIMTSYQYLIIQNTTWEDHCQFSRPSPIGYLGLLSQRTRDIYISRRLLGTFTWTLSDSEGNETPGGYCLTRWMLIEAELKCFGNTAVAKCNEKHDEEFCDMLRLFDFCKQAIRRLKAPAQMSIQLINKAVNALINDQLIMKNHLRDIMGIPYCNYSKYCYLNHTVTGRTSLPRCCLVSNGSYLNETHFSDDIEQQADNMITELLQKEYIDRQGKTPLGLVDLFVFSTSFYLISIFLHLVKIPTHRHIIGKPCPKPHRLNHMGICSCGLYKHPGVPVKWKR

SEQ ID NO: 33145 - protein, 490 aa, Artificial Sequence
  derived and/or modified protein sequence (artificial) from LASV(LASV254-NIG-2011;Clade II)__AIT17674__GPCmut8
MGQIITFFQEVPHVIEEVMNIVLIALSLLAILKGIYNVATCGLFGLVSFLLLCGRSCSTTYKGVYELQTLELDMTNLNMCMPLSCTKNNSHHYIMVGNETGLELTLTNTSIINHKFCNLSDAHKKNLYNHALMSIISTFHLSIPNFNQYEAMSCDFNGGKISVQYNLSHSYAVDAANHCGTIANGVLQTFMRMAWGGSYIALDSGKGNWDCIMTSYQYLIIQNTTWEDHCQFSRPSPIGYLGLLSQRTRDIYISRRLLGTFTWTLSDSEGNETPGGYCLTRWMLIEAELKCFGNTAVAKCNEKHDEEFCDMLRLFDFCKQAIRRLKTPAQANIQLINKAVNALINDQLIMKNHLRDIMGIPYCNYSKYCYLNHTVTGKTSLPRCCLVSNGSYLNETHFSDDIEQQADNMITELLQKEYMDRQGKTPLGLVDLFVFSTSFYLISIFLHLVKIPTHRHVIGKPCPKPHRLNHMGICSCGLYKHPGVPVKWKR

SEQ ID NO: 33146 - protein, 490 aa, Artificial Sequence
  derived and/or modified protein sequence (artificial) from LASV(Nig08-A19;Clade III)__ADU56618__GPCmut8
MGQIVTFFQEVPHVIEEVMNIVLIALSILAILKGLYNIATCGLIGLVTFLLLSGRSCSMTYKGVYELQTLELNMNTLNMCMPLSCTKNNSHHYIMVGNETGLELTLTNTSLLHHKFCNLSDAHKKNLYDHTLMSIISTFHLSIPNFNQYEAMSCDFNGGKITVQYNLSHSYAIDAANHCGTVANGVLQTFMRMAWGGSYIALDSGRGKWDCIMTSYQYLIIQNTTWEDHCQFSRPSPIGYLGLLSQRTRDIYISRRLLGTFTWTLSDSEGNETPGGYCLTRWMLIEAELKCFGNTAVAKCNEKHDEEFCDMLRLFDFCKQAIRRLKAPAQMSIQLINKAVNALINDQLIMKNHLRDIMGIPYCNYSKYCYLNHTSTGRTSLPRCCLVSNGSYLNETHFSDDIEQQADNMITEMLQKEYLDRQGKTPLGLVDLFVFSTSFYLISIFLHLVKIPTHRHIVGKPCPKPHRLNHMGICSCGLYKQPGVPVRWKR

SEQ ID NO: 33147 - protein, 491 aa, Artificial Sequence
  derived and/or modified protein sequence (artificial) from LASV(G1180-SLE-2010;Clade IV)__AIT17168__GPCmut8
MGQIVTFFQEVPHVIEEVMNIVLIALSILAVLKGLYNFATCGLVGLLTFLLLCGRSCTASRYKGVYELQTLELNMETLNMCMPLSCTKNNSHHYIMVGNETGLELTLTNTSIINHKFCNLSDAHKKNLYDHALMSIISTFHLSIPNFNQYEAMSCDFNGGKISVQYNLSHSYAGDAANHCGTVANGVLQTFMRMAWGGSYIALDSGHGSWDCIMTSYQYLIIQNTTWEDHCQFSRPSPIGYLGLLSQRTRDIYISRRLLGTFTWTLSDSEGKDTPGGYCLTRWMLIEAELKCFGNTAVAKCNEKHDEEFCDMLRLFDFCKQAIQRLKAPAQMSIQLINKAVNALINDQLIMKNHLRDIMGIPYCNYSKYCYLNHTTTGKTSLPKCCLVSNGSYLNETHFSDDIEQQADNMITEMLQKEYMERQGKTPLGLVDLFVFSTSFYLISIFLHLVKIPTHRHIVGKSCPKPHRLNHMGICSCGLYKQPGVPVKWKR

SEQ ID NO: 33148 - protein, 491 aa, Artificial Sequence
  derived and/or modified protein sequence (artificial) from LASV(G1442-SLE-2011;Clade IV)__AIT17180__GPCmut8
MGQIVTFFQEVPHVIEEVMNIVLIALSILAVLKGLYNVATCGLIGLVTFLLLCGRSCTTTLYKGVYELQTLELNMETLNMCMPLSCTKNNSHHYIRVGNETGLELTLTNTSIINHKFCNLSDAHKKNLYDHALMSIISTFHLSIPNFNQYEAMSCDFNGGKISVQYNLSHSYAGDAANHCGTVANGVLQTFMRMAWGGSYIALDSGRGNWDCIMTSYQYLIIQNTTWDDHCQFSRPSPIGYLGLLSQRTRDVYISRRLLGTFTWTLSDSEGKDTPGGYCLTRWMLIEAELKCFGNTAVAKCNEKHDEEFCDMLRLFDFCKQAIQRLKAPAQMSIQLINKAVNALINDQLIMKNHLRDIMGIPYCNYSKYCYLNNTATGKTSLPKCCLISNGSYLNETHFSDDIEQEADNMITEMLQKEYMERQGKTPLGLVDLFVFSTSFYLISIFLHLVKIPTHRHIVGKSCPKPHRLNHMGICSCGLYKQPGVPVRWKR

SEQ ID NO: 33149 - protein, 491 aa, Artificial Sequence
  derived and/or modified protein sequence (artificial) from LASV(G3010-SLE-2013;Clade IV)__AIT17344__GPCmut8
MGQIVTFFQEVPHVIEEVMNIVLIALSILAVLKGLYNFATCGLVGLVTFLLLCGRSCTTSLYKGVYELQTLELNMETLNMCMPLSCTKNNSHHYIMVGNETGLELTLTNTSIINHKFCNLSDAHKKNLYNHALMSIISTFHLSIPNFNQYEAMSCDFNGGKISVQYNLSHSYAGDAASHCGTVANGVLQTFMRMAWGGSYIALDSGYGKWDCIMTSYQYLIIQNTTWEDHCQFSRPSPIGYLGLLSQRTRDIYISRRLLGTFTWTLSDSEGKDTPGGYCLTRWMLIEAELKCFGNTAVAKCNEKHDEEFCDMLRLFDFCKQAIQRLKTPAQMSIQLINKAVNALINDQLIMKNHLRDIMGIPYCNYSKYCYLNHTTTGKTSLPKCCLVSNGSYLNETHFSDDIEQQADNMITEMLQKEYMERQGKTPLGLVDLFVFSTSFYLISIFLHLVKIPTHRHIVGKSCPKPHRLNHMGICSCGLYKQPGVPVRWKR

SEQ ID NO: 33150 - protein, 491 aa, Artificial Sequence
  derived and/or modified protein sequence (artificial) from LASV(G502-SLE-2009;Clade IV)__AIT17126__GPCmut8
MGQIVTFFQEVPHVIEEVMNIVLIALSILAVLKGLYNFATCGLVGLLTFLLLCGRSCTTGLYKGVYELQTLELNMETLNMCMPLSCTKNNSHHYIMVGNETGLELTLTNTSIINHKFCNLSDAHKKNLYDHALMSIISTFHLSIPNFNQYEAMSCDFNGGKISVQYNLSHSYAGDAADHCGTVANGVLQTFMRMAWGGSYIALDSGRGRWDCIMTSYQYLIIQNTTWEDHCQFSRPSPIGYLGLLSQRTRDIYISRRLLGTFTWTLSDSEGKDTPGGYCLTRWMLIEAELKCFGNTAVAKCNEKHDEEFCDMLRLFDFCKQAIQRLKAPAQMSIQLINKAVNALINDQLVMKNHLRDIMGIPYCNYSRYCYLNHTTTGRTSLPKCCLVSNGSYLNETHFSDDIEQQADNMITEMLQKEYMERQGKTPLGLVDLFVFSTSFYLISIFLHLVKIPTHRHIVGKSCPKPHRLNHMGICSCGLYKQPGVPVKWKR

SEQ ID NO: 33151 - protein, 491 aa, Artificial Sequence
  derived and/or modified protein sequence (artificial) from LASV(G733-SLE-2010;Clade IV)__AIT17154__GPCmut8
MGQIVTFFQEVPHVIEEVMNIVLIALSILAVLKGLYNFATCGIVGLVSFLLLCGRSCTTSLYKGVYELQTLELNMETLNMCMPLSCTKNNSHHYIMVGNETGLELTLTNTSIINHKFCNLSDAHKKNLYDHALMSIISTFHLSIPNFNQYEAMSCDFNGGKISVQYNLSHSYAGDAANHCGTIANGVLQTFMRMAWGGSYIALDSGRDRWDCIMTSYQYLIIQNTTWEDHCQFSRPSPIGYLGLLSQRTRDIYISRRLLGTFTWTLSDSEGKDTPGGYCLTRWMLIEAELKCFGNTAVAKCNEKHDEEFCDMLRLFDFCKQAIQRLKAPAQMSIQLINKAVNALINDQLIMKNHLRDIMGIPYCNYSKYCYLNHTTTGKTSLPKCCLVSNGSYLNETHFSDDIEQQADNMITEMLQKEYMERQGKTPLGLVDLFVFSTSFYLISIFLHLVKIPTHRHVVGKSCPKPHRLNHMGICSCGLYGQPGVPVKWKR

SEQ ID NO: 33152 - protein, 491 aa, Artificial Sequence
  derived and/or modified protein sequence (artificial) from MOPV/LASV reassortant(IGS-1;Clade IV)__AFY05576__GPCmut8
MGQIVTFFQEVPHVIEEVMNIVLIALSVLAVLKGLYNFATCGLVGLVTFLLLCGRSCTTSLYKGVYELQTLELNMETLNMCMPLSCTKNNSHHYIMVGNETGLELTLTNTSIINHKFCNLSDAHKKNLYDHALMSIISTFHLSIPNFNQYEAMSCDFNGGKISVQYNLSHSYAGDAANHCGTVANGVLQTFMRMAWGGSYIALDSGRGNWDCIMTSYQYLIIQNTTWEDHCQFSRPSPIGYLGLLSQRTRDIYISRRLLGTFTWTLSDSEGEDTPGGYCLTRWMLIEAELKCFGNTAVAKCNEKHDEEFCDMLRLFDFCKQAIQRLKAPAQMSIQLINKAVNALINDQLIMKNHLRDIMGIPYCNYSKYCYLNHTTTGRTSLPKCCLVSNGSYLNETHFSDDIEQQADNMITEMLQKEYMERQGKTPLGLVDLFVFSTSFYLISIFLHLVKIPTHRHIVGKSCPKPHRLNHMGICSCGLYKQPGVPVKWKR

SEQ ID NO: 33153 - protein, 491 aa, Artificial Sequence
  derived and/or modified protein sequence (artificial) from LASV(LM765-SLE-2012;Clade IV)__AIT17814__GPCmut8
MGQIVTFFQEVPHVIEEVMNIVLIALSILAVLKGLYNFATCGLVGLVTFLLLCGRSCTTSLYKGVYELQTLELNMETLNMCMPLSCTKNNSHHYIMVGNETGLELTLTNTSIIDHKFCNLSDAHRKNLYDHALMSIISTFHLSIPNFNQYEAMSCDFNGGKISVQYNLSHSYAKDAADHCGTVANGVLQTFMRMAWGGSYIALDSGRGRWDCIMTSYQYLIIQNTTWEDHCQFSRPSPIGYLGLLSQRTRDIYISRRLLGTFTWTLSDSEGKDTPGGYCLTRWMLIEAELKCFGNTAVAKCNEKHDEEFCDMLRLFDFCKQAIQRLKAPAQMSIQLINKAVNALINDQLIMKNHLRDIMGIPYCNYSKYCYLNHTTTGKTSLPKCCLVSNGSYLNETHFSDDIEQQADNMITEMLQKEYMERQGKTPLGLVDLFVFSTSFYLISIFLHLVKIPTHRHIVGKPCPKPHRLNHMGICSCGLYKQPGVPVKWKR

SEQ ID NO: 33154 - protein, 491 aa, Artificial Sequence
  derived and/or modified protein sequence (artificial) from LASV(LM776-SLE-2012;Clade IV)__AIT17824__GPCmut8
MGQIVTFFQEVPHVIEEVMNIVLIALSILAVLKGLYNFATCGLVGLVTFLLLCGRSCTTSVYKGVYELQTLELNMETLNMCMPLSCTKNNSHHYIMVGNETGLELTLTNTSIINHKFCNLSDAHKKNLYDHALMSIISTFHLSIPNFNQYEAMSCDFNGGKISVQYNLSHSYAGDAANHCGTVANGVLQTFMRMAWGGSYIALDSGHGKWDCIMTSYQYLIIQNTTWEDHCQFSRPSPIGYLGLLSQRTRDIYISRRLLGTFTWTLSDSEGKDTPGGYCLTRWMLIEAELKCFGNTAVAKCNEKHDEEFCDMLRLFDFCKQAIQRLKAPAQMSIQLINKAVNALINDQLIMKNHLRDIMGIPYCNYSKYCYLNHTTTGKTSLPKCCLVSNGSYLNETHFSDDIEQQADNMITEMLQKEYMERQGKTPLGLVDLFVFSTSFYLISIFLHLVKIPTHRHIVGKSCPKPHRLNHMGICSCGLYKQPGVPVRWKR

SEQ ID NO: 33155 - protein, 491 aa, Artificial Sequence
  derived and/or modified protein sequence (artificial) from LASV(Mad39;Clade IV)__ANH09722__GPCmut8
MGQIVTFFQEVPHVIEEVMNIVLIALSILAVLKGLYNVATCGLIGLVTFLLLCGRSCTTTLYKGVYELQALELNMETLNMCMPLSCTKNNSHHYIRVGNETGLELTLTNTSLINHKFCNLSDAHKKNLYDHALMSIISTFHLSIPNFNQYEAMSCDFNDGKISVQYNLSHTYAGDTANHCGTVANGVLQTFMRMAWGGSYIALDSGRGGWDCIMTSYQYLIIQNTTWEDHCQFSRPSPIGYLGLLSQRTRDIYISRRLLGTFTWTLSDSEGKDTPGGYCLTRWMLIEAELKCFGNTAVAKCNEKHDEEFCDMLRLFDFCKQAIQRLKAPAQMSIQLINKAVNALINDQLIMKNHLRDIMGIPYCNYSKYCYLNHTVTGKTSLPKCCLVSNGSYLNETHFSDDIEQQADNMITEMLQKEYMERQGKTPLGLVDLFVFSTSFYLISIFLHLVKIPTHRHVVGKPCPKPHRLNHMGICSCGFYKQPGVPVRWKR

SEQ ID NO: 33156 - protein, 491 aa, Artificial Sequence
  derived and/or modified protein sequence (artificial) from LASV(Z0947-SLE-2011;Clade IV)__AIT17840__GPCmut8
MGQIVTFFQEVPHVIEEVMNIVLIALSILAVLKGLYNFATCGLVGLVTFLLLCGRSCTISLYKGVYELQTLELNMETLNMCMPLSCTKNNSHHYIMVGNETGLELTLTNTSIINHKFCNLSDAHKKNLYDHALMSIISTFHLSIPNFNQYEAMSCDFNGGKISVQYNLSHSYAGDAANHCGTVANGVLQTFMRMAWGGSYIALDSGRDRWDCIMTSYQYLIIQNTTWEDHCQFSRPSPIGYLGLLSQRTRDIYISRRLLGTFTWTLSDSEGKDTPGGYCLTRWMLIEAELKCFGNTAVAKCNEKHDEEFCDMLRLFDFCKQAIQRLKAPAQMSIQLINKAVNALINDQLIMKNHLRDIMGIPYCNYSKYCYLNHTTTGKTSLPKCCLVSNGSYLNETHFSDDIEQQADNMITEMLQKEYMERQGKTPLGLVDLFVFSTSFYLISIFLHLVKIPTHRHIVGKPCPKPHRLNHMGICSCGLYKQPGVPVKWKR

SEQ ID NO: 33157 - RNA, 1476 nt, Artificial Sequence
  derived and/or modified CDS sequence (opt1) from LASV(Josiah;Clade IV)__NP_694870__GPCmut8
augggccagaucgugaccuucuuccaggaggucccccacgugaucgaggaggugaugaacaucguccugaucgcccucagcgugcuggccgugcugaaggggcucuacaacuucgcgaccugcggccuggucgggcuggugacguuccuccugcugugcggccgcuccugcaccaccagccucuacaaggggguguacgagcugcagacccuggagcucaacauggagacgcugaacaugugcaugccgcuguccugcaccaagaacaacagccaccacuacaucauggucggcaacgagaccggccucgagcugacgcugaccaacaccuccaucaucaaccacaaguucugcaaccucagcgacgcccacaagaagaaccuguacgaccacgcccugauguccaucaucagcaccuuccaccucuccauccccaacuucaaccaguacgaggccaugagcugcgacuucaacgggggcaagaucuccgugcaguacaaccugagccacuccuacgccggggacgcggccaaccacugcggcacgguggccaacgggguccugcagaccuucaugcggauggccuggggcggcagcuacaucgcgcucgacuccgggcgcggcaacugggacugcaucaugaccagcuaccaguaccugaucauccagaacaccacgugggaggaccacugccaguucucccggcccagccccaucggguaccugggccuccugucccagcgcacccgggacaucuacaucagccgccggcugcucggcaccuucaccuggacgcugagcgacuccgaggggaaggacaccccgggcggguacugccugacccgcuggaugcucaucgaggccgagcugaagugcuucggcaacaccgccguggccaagugcaacgagaagcacgacgaggaguucugcgacaugcugcggcuguucgacuucugcaagcaggccauccagcgccugaaggcgcccgcccagaugagcauccagcugaucaacaaggccgugaacgcccucaucaacgaccagcugaucaugaagaaccaccuccgggacaucauggggauccccuacugcaacuacuccaaguacugcuaccucaaccacacgaccaccggccgcaccagccugcccaagugcugccuggucuccaacggcagcuaccucaacgagacgcacuucuccgacgacaucgagcagcaggccgacaacaugaucaccgagaugcugcagaaggaguacauggagcggcaggggaagacgccccugggccucguggaccuguucguguucagcaccuccuucuaccugaucagcaucuuccugcaccucgucaagaucccgacccaccgccacaucguggggaaguccugccccaagccccaccggcugaaccacaugggcaucugcagcugcgggcuguacaagcagcccggcgugccggucaaguggaagcgcuga

SEQ ID NO: 33158 - RNA, 1473 nt, Artificial Sequence
  derived and/or modified CDS sequence (opt1) from LASV(LP;Clade I)__AAF86701__GPCmut8
augggccagaucaucaccuucuuccaggaggugccccacgucaucgaggaggugaugaacaucgugcugaucgcccucagccugcuggccauccucaaggggcuguacaacaucgcgaccugcggcaucaucgggcuggucgccuuccucuuccugugcggcaaguccugcagccugacgcucaagggcggguacgagcugcagacccuggagcucaacauggagacccugaacaugugcaugccgcuguccugcacgaagaacagcucccaccacuacauccgcgugggcaacgagaccgggcucgagcugacccugaccaacacgagcaucaucaaccacaaguucugcaaccucuccgacgcccacaagaagaaccuguacgaccacgcccugaugagcaucaucuccaccuuccaccucagcauccccaacuucaaccaguacgaggccauguccugcgacuucaacggcgggaagaucagcgugcaguacaaccugucccacagcuacgcgggcgacgccgccgagcacugcgggaccgucgccaacggcgugcugcagaccuucaugcggauggcguggggcgggcgcuacaucgcccucgacuccggcaaggggaacugggacugcaucaugacgagcuaccaguaccugaucauccagaacaccaccugggaggaccacugccaguucucccggcccagccccaucggcuaccugggccuccugucccagcgcacccgggacaucuacaucagccgccggcugcucgggacguucaccuggacccugagcgacuccgagggcaacgagacccccgggggcuacugccugacgcgcuggaugcucaucgaggccgagcugaagugcuucgggaacaccgccguggccaagugcaacgagaagcacgacgaggaguucugcgacaugcugcggcuguucgacuucugcaagcaggcgauccgccggcugaaggcccccgcccagaugagcauccagcugaucaacaaggccgucaacgcccucaucaacgaccagcugaucaugaagaaccaccuccgcgacaucaugggcauccccuacugcaacuacuccaaguacugcuaccucaaccacaccagcuccggccggaccagccugcccaagugcugccugaucuccaacgggagcuaccucaacgagacgcaguucuccgacgacaucgagcagcaggcggacaacaugaucaccgagaugcugcagaaggaguacaucgagcgccagggcaagaccccgcuggggcucguggacaucuucaucuucagcaccuccuucuaccugaucagcaucuuccugcaccugaucaagaucccgacgcaccggcacaucgugggcaagcccugccccaagccccaccgccucaaccacaugggggucugcuccugcggccuguacaagcacccgggcgugcccaccaaguggaagcgguga

SEQ ID NO: 33159 - RNA, 1473 nt, Artificial Sequence
  derived and/or modified CDS sequence (opt1) from LASV(803213;Clade II)__AAF86703__GPCmut8
augggccagaucaucaccuucuuccaggaggugccccacgucaucgaggaggugaugaacaucgugcugaucgcccucagccugcuggccauccucaaggggaucuacaacgucgcgaccugcggccuguucgggcugaucuccuuccuccugcugugcggccgcagcugcuccgugacguacaaggggguguacgagcuccagacccuggagcugaacauggccaaccucaacaugugcaugccgcugagcugcaccaagaacaacucccaccacuacaucauggucggcaacgagacgggccuggagcucacccugaccaacaccagcaucaucaaccacaaguucugcaaccuguccgacgcccacaagaagaaccucuacgaccacgcccugaugagcaucaucuccacguuccaccugagcauccccaacuucaaccaguacgaggccauguccugcgacuucaacgggggcaagaucagcgugcaguacaaccucucccacagcuucgcgguggacgccgccaaccacugcgggaccaucgccaacggcguccugcagaccuucaugcggauggcguggggcggguccuacaucgcccuggacagcggcaaggggaacugggacugcaucaugaccuccuaccaguaccucaucauccagaacacgaccugggaggaccacugccaguucagccgccccucccccaucggcuaccuggggcugcucagccagcggacccgcgacaucuacaucagccggcgccugcugggcaccuucacguggacccucuccgacagcgagggcaacgaggcccccgggggcuacugccugacccgguggaugcugaucgaggccgagcucaagugcuucgggaacaccgccguggcgaagugcaacgagaagcacgacgaggaguucugcgacaugcugcgccuguucgacuucugcaagcaggccaucaagcggcucaagacgcccgcccagauguccauccagcugaucaacaaggccgugaacgcccugaucaacgaccagcucaucaugaagaaccaccuccgcgacaucaugggcauccccuacugcaacuacagccgguacugcuaccugaaccacaccgucaccgggaagaccucccugccccgcugcugccuggugagcaacggcuccuaccugaacgagacgcacuucagcgacgacaucgagcagcaggcggacaacaugaucaccgagaugcuccagaaggaguacauggaccggcagggcaagaccccgcuggggcugguggaccucuucgucuucuccaccagcuucuaccugaucuccaucuuccugcaccuggugaagaucccgacgcaccgccacaucgugggcaagcccugccccaagccccaccggcucaaccacauggggaucugcagcugcggccuguacaagcacccggggguccccgugaaguggaagcgcuga

SEQ ID NO: 33160 - RNA, 1473 nt, Artificial Sequence
  derived and/or modified CDS sequence (opt1) from LASV(GA391;Clade III)__CAA36645__GPCmut8
augggccagaucgugaccuucuuccaggaggucccccacgugaucgaggaggugaugaacaucguccugaucgcccucagcauccuggccauccugaaggggcucuacaacguggcgaccugcggccugaucgggcuggugacguuccuccugcuguccggccgcagcugcucccucaucuacaaggggaccuacgagcugcagacccuggagcucaacauggagacccugaacaugugcaugccgcugagcugcaccaagaacaacucccaccacuacauccgggucggcaacgagaccggccucgagcugacccugacgaacaccagcauccucaaccacaaguucugcaaccuguccgacgcccacaagcgcaaccuguacgaccacagccucauguccaucaucagcaccuuccaccuguccauccccaacuucaaccaguacgaggccaugagcugcgacuucaacgggggcaagaucaccgugcaguacaaccugucccacagcuucgccguggacgccgcggggcacugcggcacgcucgccaacgggguccugcagaccuucaugcggauggccuggggcggcuccuacaucgcccuggacagcgggcgcggcaacugggacugcaucaugaccuccuaccaguaccucaucauccagaacaccacgugggacgaccacugccaguucagccggcccucccccaucggguaccugggccugcucagccagcgcacccgggacaucuacaucagccgccggcugcugggcaccuucaccuggacgcucuccgacagcgaggggaacgagaccccgggcggguacugccugacccgcuggaugcugaucgaggcggagcucaagugcuucggcaacaccgccguggccaagugcaacgagaagcacgacgaggaguucugcgacaugcugcggcuguucgacuucugcaagcaggccauccgccggcucaagacgcccgcccagauguccauccagcugaucaacaaggcggugaacgcccugaucaacgaccagcucaucaugaagaaccaccuccgcgacaucauggggauccccuacugcaacuacagccgguacugcuaccugaaccacaccuccaccggcaagaccagccugccccgcugcugccugaucuccaacggcagcuaccugaacgagacgaaguucuccgacgacaucgagcagcaggccgacaacaugaucaccgagaugcuccagaaggaguacaucgaccggcaggggaagacgccccugggccuggucgaccuguucguguucagcaccuccuucuaccucaucagcaucuuccugcaccuggugaagaucccgacccaccgccacaucgucgggaagcccugccccaagccccaccggcucaaccacaugggcaucugcuccugcgggcuguacaagcagccgggcgugcccgugcgcuggaagcgguga

SEQ ID NO: 33161 - RNA, 1476 nt, Artificial Sequence
  derived and/or modified CDS sequence (opt1) from LASV(AV;Clade V)__CCA30314__GPCmut8
augggccagaucgugaccuucuuccaggaggucccccacgugaucgaggaggugaugaacaucguccugaucgcccucagcauccuggccgugcugaaggggcucuacaacaucgcgaccugcggccugaucgggcugaucacguuccuccugcugugcggccgcuccugcagcuccaaccucuacaaggggguguacgagcugcagagccuggaccucaacauggagacccugaacaugugcaugccgcuguccugcaccaagaacaacagccaccacuacauccgggucggcaacgacacgggccucgagcugacccugaccaacaccuccauccucaaccacaaguucugcaaccugagcgacgcccacaagaaggaccuguacgaccacgcccucauguccaucaucagcacguuccaccuguccauccccaacuucaaccaguacgaggccaugagcugcgacuucaacgggggcaagaucuccgugcaguacaaccugagccacuccuacgccaucgacgcggccaaccacugcgggaccguggccaacggcauccuccagaccuucaugcgcauggccuggggcgggagcuacaucgcgcuggacuccggccgggggaacugggacugcaucaugaccagcuaccaguaccugaucauccagaacacgaccugggagaaccacugccaguucucccgccccagccccaucggcuaccucgggcugcugagccagcggacccgcgacaucuacaucucccggcgccuccugggcaccuucacguggacccugagcgacuccgagggcaacgccacccccgggggcuacugccucacccgguggaugcugaucgaggccgagcugaagugcuucgggaacacggccgucgccaagugcaacgagaagcacgacgaggaguucugcgacaugcuccgccuguucgacuucugcaagcaggcgaucagccggcugaagucccccgcccagaugagcauccagcucaucaacaaggccgugaacgcccugaucaacgaccagcugaucaugaagaaccaccuccgcgacaucaugggcauccccuacugcaacuacuccaaguacugcuaccugaaccacaccaucaccgggaagaccagccugcccaagugcugccucguguccaacggcagcuaccugaacgagacgcacuucuccgacgacaucgagcagcaggccgacaacaugaucaccgagaugcugcagaaggaguacauggagcggcagggcaagaccccgcucgggcuggucgaccuguucguguucagcaccuccuucuaccugaucagcaucuuccuccgccuggugaagaucccgacgcaccggcacaucgucggcaagcccugccccaagccccaccgccugaaccacauggggaucugcuccugcggccucuacaagcagccgggggugcccgugcgguggaagcgcuga

SEQ ID NO: 33162 - RNA, 1473 nt, Artificial Sequence
  derived and/or modified CDS sequence (opt1) from LASV(Togo/2016/7082;Clade VI)__AMR44577__GPCmut8
augggccagaucaucaccuucuuccaggaggugccccacgucaucgaggaggugaugaacaucgugcugaucgcccucagccugcuggccauccucaagggggucuacaacguggcgaccugcggcaucaucgggcuggugacguuccuguuccucugcggccgcuccugcagccugaucuacaagggguccuacgagcugcagacccucgagcugaacauggagacccugaacaugugcaugccgcucagcugcacgaagaacuccagccaccacuacauccgggucggcaacgagaccggccuggagcugacccucaccaacacguccaucaucaaccacaaguucugcaaccugagcgacgcccacaagcgcaaccuguacgaccacgcccucauguccauccugagcaccuuccaccuguccauccccaacuucaaccaguacgaggccaugagcugcgacuucaacgggggcaagaucuccgugcaguacaaccucagccacgccuacgcgguggacgccgccgagcacugcgggaccgucgccaacggcgugcugcagaccuucaugcggauggcguggggcggguccuacaucgcccuggacagcggccgcgggaacugggacugcaucaugacguccuaccaguaccucaucauccagaacaccaccugggaggaccacugccaguucagccggcccucccccaucggcuaccuggggcugcucagccagcgcacccgggacaucuacaucagccgccggcugcugggcacguucaccuggacccucuccgacagcgagggcaacgagacccccgggggcuacugccugacgcgcuggaugcugaucgaggccgagcucaagugcuucgggaacaccgccguggccaagugcaacgagaagcacgacgaggaguucugcgacaugcugcggcuguucgacuucugcaagcaggcgauccagcgccucaagucccccgcccagaugagcauccagcugaucaacaaggccgucaacgcccugaucaacgaccagcucaucaugaagaaccaccuccgggacaugaugggcauccccuacugcaacuacuccaaguacugcuaccugaaccacaccagcuccgggcgcaccagccugcccaagugcugccugguguccaacggcagcuaccugaacgagacgcacuucuccgacgacaucgagcagcaggccgacaacaugaucaccgagaugcuccagaaggaguacaucgaccggcagggcaagaccccgcuggggcugguggaccucuucgucuucagcaccuccuucuaccugaucagcaucuuccugcaccugaucaagaucccgacgcaccgccacaucgugggcaagcccugccccaagccccaccggcucaaccacauggggaucugcuccugcggccuguacaagcagccgggggugcccacccgcuggaagcgguga

SEQ ID NO: 33163 - RNA, 1473 nt, Artificial Sequence
  derived and/or modified CDS sequence (opt1) from LASV(KAK-428;Clade n.d. (VII))__ANH09740__GPCmut8
augggccagaucgugaccuucuuccaggaggucccccacgugaucgaggaggugaugaacaucguccugaucgcccucagccugcuggccauccucaaggggcuguacaacuucgcgaccugcggcgugaucgggcugaucacguuccuccugcugugcggccgcuccugcagcgccaccuacaaggggcaguacgagcuccagacccuggagcugaacauggagucccucaacaugugcaugccgcugagcugcacgaagaacaacucccaccacuacauccgggccggcaacaacaccggccuggagcucacccugaccaacacgagcaucaucucccacaaguucugcaaccugagcgacgcccacaagaagaaccucuacgaccacacccugauguccaucaucaccaccuuccaccugagcauccccaacuucaaccaguacgaggccauguccugcgacuucaacgggggcaagaucagcauccaguacaaccucucccacagcuacgcgggggacgccgcccagcacugcggcacgguggccaacgggguccugcagaccuucaugcgcauggcguggggcggcuccuaccuggcccucgacagcgggcggcgcggcugggacugcaucaucuccagcuaccaguaccugaucauccagaacaccaccugggacgaccacugccaguucucccggcccagccccaucggguaccugggcuucgugagccagaagacgcgcgacaucuacaucucccggcgccuccugggcaccuucaccuggacccugagcgacuccgaggggcacgacaugccgggcggguacugccucacgcgguggaugcugaucgaggccgaccugaagugcuucggcaacaccgccguggccaagugcaacgagaagcacgacgaggaguucugcgacauguggcgccucuucgacuucugcaagcaggcgauccagcggcugaaggcccccgcccagaugaacauccagcugaucaacaaggccgucaacgcccucaucaacgaccagcugaugaugaagaaccaccuccgcgacaucauggggauccccuacugcaacuacagcaaguucugcuaccugaacaacaccaccacgggccggaccucccugccccgcugcugccugaucagcaacggcuccuaccucaacgagacccacuucagcgacgacaucgagcagcaggcggacaacaugaucaccgagaugcugcagaaggaguacauggaccggcaggggaagacgccccugggccucguggaccuguucguguucuccaccagcuucuaccugaucaccaucuuccuccaccuggucaagaucccgacccaccgccacaucguggggaagcccugccccaagccccaccggcugaaccacaugggcaucugcuccugcgggcuguacaagcagccgggcgugcccguccgcuggaagcgguga

SEQ ID NO: 33164 - RNA, 1473 nt, Artificial Sequence; identical to SEQ ID NO: 33158
  derived and/or modified CDS sequence (opt1) from LASV(Pinneo-NIG-1969;Clade I)__AIT17836__GPCmut8

SEQ ID NO: 33165 - RNA, 1473 nt, Artificial Sequence
  derived and/or modified CDS sequence (opt1) from LASV(ISTH0009-NIG-2011;Clade II)__AIT17404__GPCmut8
augggccagaucaucaccuucuuccaggaggugccccacgucaucgaggaggugaugaacaucgugcugaucgcccucagccugcuggccauccucaaggggaucuacaacgucgcgaccugcggccuguucgggcugguguccuuccuccugcugugcggccgcagcugcuccacgaccuacaaggggguguacgagcuccagacccuggagcuggacauggccagccucaacaugugcaugccgcuguccugcacgaagaacaacagccaccacuacaucauggucggcaacgagaccggccuggagcucacccugaccaacacguccaucaucaaccacaaguucugcaaccugagcgacgcccacaagaagaaccucuacgaccacgcccugauguccaucaucagcaccuuccaccuguccauccccaacuucaaccaguacgaggccaugagcugcgacuucaacgggggcaagaucuccgugcaguacaaccucagccacgcguacgccguggacgccgccaaccacugcgggaccaucgcgaacggcguccugcagaccuucaugcggauggccuggggcggguccuacaucgcccuggacagcggcaagggguccugggacugcaucaugacgagcuaccaguaccucaucauccagaacaccaccugggaggaccacugccaguucucccgccccagccccaucggcuaccuggggcugcucagccagcggacccgcgacaucuacaucucccggcgccugcugggcacguucaccuggacccucagcgacuccgagggcaacgagacccccgggggcuacugccugacgcgguggaugcugaucgaggccgagcucaagugcuucgggaacaccgccguggcgaagugcaacgagaagcacgacgaggaguucugcgacaugcugcgccuguucgacuucugcaagcaggccauccggcgccucaagacccccgcccagaugagcauccagcugaucaacaaggccgugaacgcccugaucaacgaccagcucaucaugaagaaccaccuccgggacaucaugggcaucccguacugcaacuacuccaaguacugcuaccugaaccacaccgucacggggaagaccagccugccccgcugcugccugguguccaacggcagcuaccugaacgagacccacuucuccgacgacaucgagcagcaggcggacaacaugaucaccgagcuccugcagaaggaguacauggaccggcagggcaagacgccccuggggcucguggaccuguucgucuucagcaccuccuucuaccugaucagcaucuuccugcaccucaucaagaucccgacccaccgccacaucaccggcaagcccugccccaagccccaccggcugaaccacauggggaucugcuccugcggccuguacaagcacccgggggugcccgugaaguggaagcgcuga

SEQ ID NO: 33166 - RNA, 1473 nt, Artificial Sequence
  derived and/or modified CDS sequence (opt1) from LASV(ISTH2010-NIG-2012;Clade II)__AIT17482__GPCmut8
augggccagaucaucaccuucuuccaggaggugccccacgucaucgaggaggugaugaacaucgugcugaucgcccucagccugcuggccauccucaaggggaucuacaacgucgcgaccugcggccuguucgggcugguguccuuccuccugcugugcggccgcagcugcuccacgaccuacaaggggguguacgagcuccagacccuggagcuggacauggccagccucaacaugugcaugccgcuguccugcacgaagaacaacagccaccacuacaucauggucggcaacgagaccggccuggagcucacccugaccaacacguccaucaucaaccacaaguucugcaaccugagcgacgcccacaagaagaaccucuacgaccacgcccugauguccaucaucagcaccuuccaccuguccauccccaacuucaaccaguacgaggccaugagcugcgacuucaacgggggcaagaucuccgugcaguacaaccucagccacgcguacgccguggacgccgccaaccacugcgggaccaucgcgaacggcguccugcagaccuucaugcggauggccuggggcggguccuacaucgcccuggacagcggcaagggguccugggacugcaucaugacgagcuaccaguaccucaucauccagaacaucaccugggaggaccacugccaguucucccgccccagccccaucggcuaccuggggcugcucagccagcggacccgcgacaucuacaucucccggcgccugcugggcaccuucacguggacccucagcgacuccgagggcaacgagacccccgggggcuacugccugacccgguggaugcugaucgaggccgagcucaagugcuucgggaacacggccguggcgaagugcaacgagaagcacgacgaggaguucugcgacaugcugcgccuguucgacuucugcaagcaggccauccggcgccucaagacccccgcccagaugagcauccagcugaucaacaaggccgugaacgcccugaucaacgaccagcucaucaugaagaaccaccuccgggacaucaugggcauccccuacugcaacuacuccaaguacugcuaccugaaccacaccgucaccgggaagacgagccugccccgcugcugccugguguccaacggcagcuaccugaacgagacccacuucuccgacgacaucgagcagcaggcggacaacaugaucaccgagcuccugcagaaggaguacaucgaccggcagggcaagaccccgcuggggcucguggaccuguucgucuucagcacguccuucuaccugaucagcaucuuccugcaccucgugaagaucccgacccaccgccacguggucggcaagcccugccccaagccccaccggcugaaccacauggggaucugcuccugcggccuguacaagcacccgggggugcccgugaaguggaagcgcuga

SEQ ID NO: 33167 - RNA, 1473 nt, Artificial Sequence
  derived and/or modified CDS sequence (opt1) from LASV(Lassa virus/H.sapiens-wt/NGA/2015/ISTH_0543;Clade II)__AVO03639__GPCmut8
augggccagaucaucaccuucuuccaggaggugccccacgucaucgaggaggugaugaacaucgugcugaucgcccucagccugcuggccauccucaaggggaucuacaacgucgcgaccugcggccuguucgggcugguguccuuccuccugcugugcggccgcagcugcuccacgaccuacaaggggguguacgagcuccagacccuggagcuggacauggccaaccucaacaugugcaugccgcugagcugcacgaagaacaacucccaccacuacaucauggucggcaacgagaccggccuggagcucacccugaccaacacgagcaucaucaaccacaaguucugcaaccuguccgacgcccacaagaagaaccucuacgaccacgcccugaugagcaucaucuccaccuuccaccugagcauccccaacuucaaccaguacgaggccauguccugcgacuucaacgggggcaagaucagcgugcaguacaaccucucccacaccuacgcgguggacgccgccaaccacugcgggaccaucgccaacggcguccugcagacguucaugcggauggcguggggcgggagcuacaucgcccuggacuccggcaaggggagcugggacugcaucaugaccuccuaccaguaccucgugauccagaacaccaccugggaggaccacugccaguucagccgccccucccccaucggcuaccuggggcugcucagccagcggacgcgcgacaucuacaucagccggcgccugcugggcaccuucaccuggacccucuccgacagcgagggcaacgagacgcccgggggcuacugccugacccgguggaugcugaucgaggccgagcucaagugcuucgggaacaccgccguggccaagugcaacgagaagcacgacgaggaguucugcgacaugcugcgccuguucgacuucugcaagcaggcgauccggcgccucaagacccccgcccagauguccauccagcugaucaacaaggccgucaacgcccugaucaacgaccagcucaucaugaagaaccaccuccgggacaucaugggcauccccuacugcaacuacagcaaguacugcuaccugaaccacacggugaccgggaagaccucccugccccgcugcugccuggugagcaacggcuccuaccugaacgagacccacuucagcgacgacaucgagcagcaggccgacaacaugaucacggagcuccugcagaaggaguacaucgaccggcagggcaagaccccgcuggggcucgucgaccuguucguguucuccaccagcuucuaccugaucuccaucuuccugcaccucgugaagaucccgacccaccgccacaucacgggcaagcccugccccaagccccaccggcugaaccacauggggaucugcagcugcggccuguacaagcacccggggguccccgugaaguggaagcgcuga

SEQ ID NO: 33168 - RNA, 1473 nt, Artificial Sequence
  derived and/or modified CDS sequence (opt1) from LASV(Lassa virus/H.sapiens-wt/NGA/2016/ISTH_0009;Clade II)__AVO03571__GPCmut8
augggccagaucaucaccuucuuccaggaggugccccacgucaucgaggaggugaugaacaucgugcugaucgcccucagccugcuggccauccucaaggggaucuacaacgucgcgaccugcggccugcuggggcucguguccuuccugcugcucugcggccgcagcugcuccacgaccuacaaggggguguacgagcugcagacccuggagcucgacauggccagccugaacaugugcaugccgcuguccugcacgaagaacaacagccaccacuacaucauggucggcaacgagaccggccucgagcugacccugaccaacacguccaucaucaaccacaaguucugcaaccucagcgacgcccacaagaagaaccuguacgaccacgcccugauguccaucaucagcaccuuccaccucuccauccccaacuucaaccaguacgaggccaugagcugcgacuucaacgggggccggaucuccgugcaguacaaccugagccacuccuacgcgguggacgccgccaaccacugcgggaccaucgccaacggcguccugcagaccuucaugcgcauggcguggggcgggagcuacaucgcccucgacuccggcaaggggagcugggacugcaucaugacguccuaccaguaccugaucauccagaacaccaccugggaggaccacugccaguucagccggcccagccccaucggcuaccuggggcuccugucccagcgcacccgggacaucuacaucagccgccggcugcucggcacguucaccuggacccuguccgacagcgagggcaacgagacccccgggggcuacugccugacgcgcuggaugcucaucgaggccgagcugaagugcuucgggaacaccgccguggccaagugcaacgagaagcacgacgaggaguucugcgacaugcugcggcuguucgacuucugcaagcaggcgauccgccggcugaagacccccgcccagauguccauccagcugaucaacaaggccgugaacgcccucaucaacgaccagcugaucaugaagaaccaccuccgcgacaucaugggcaucccguacugcaacuacagcaaguacugcuaccucaaccacaccgucacggggaagaccucccugccccggugcugccuggugagcaacggcuccuaccucaacgagacccacuucagcgacgacaucgagcagcaggccgacaacaugaucaccgagcugcugcagaaggaguacaucgaccgccagggcaagacgccccucgggcugguggaccuguucgucuucuccaccagcuucuaccugaucuccaucuuccuccaccuggugaagaucccgacccaccggcacaucaccggcaagcccugccccaagccccaccgccugaaccacauggggaucugcagcugcggccucuacaaccacccgggggugcccgucaaguggaagcgguga

SEQ ID NO: 33169 - RNA, 1473 nt, Artificial Sequence
  derived and/or modified CDS sequence (opt1) from LASV(Lassa virus/H.sapiens-wt/NGA/2016/ISTH_0017;Clade II)__AVO03567__GPCmut8
augggccagaucaucaccuucuuccaggaggugccccacgucaucgaggaggugaugaacaucgugcugaucgcccucagccugcuggccauccucaaggggaucuacaacgucgcgaccugcggccuguucgggcugguguccuuccuccugcugugcggccgcagcugcuccacgaccuacaaggggguguacgagcuccagacccuggagcuggacauggccagccucaacaugugcaugccgcuguccugcacgaagaacaacagccaccacuacaucauggucggcaacgagaccggccuggagcucacccugaccaacacguccaucaucaaccacaaguucugcaaccugagcgacgcccacaagaagaaccucuacgaccacgcccugauguccaucaucagcaccuuccaccuguccauccccaacuucaaccaguacgaggccaugagcugcgacuucaacgggggcaagaucuccgugcaguacaaccucagccacaccuacgcgaucgacgccgccaaccacugcgggaccaucgccaacggcgugcugcagacguucaugcggauggcguggggcggguccuacaucgcccuggacagcggcaagggguccugggacugcaucaugaccagcuaccaguaccucaucauccagaacaccaccugggaggaccacugccaguucucccgccccagccccaucggcuaccuggggcugcucagccagcggacgcgcgacaucuacaucucccggcgccugcugggcaccuucaccuggacccucagcgacuccgagggcaacgagacgcccgggggcuacugccugacccgguggaugcugaucgaggccgagcucaagugcuucgggaacaccgccgucgccaagugcaacgagaagcacgacgaggaguucugcgacaugcugcgccuguucgacuucugcaagcaggcgauccggcgccucaagacccccgcccagaugagcauccagcugaucaacaaggccgugaacgcccugaucaacgaccagcucaucaugaagaaccaccuccgggacaucaugggcauccccuacugcaacuacuccaaguacugcuaccugaaccacacggugaccgggaagaccagccugccccgcugcugccuggucuccaacggcagcuaccugaacgagacccacuucuccgacgacaucgagcagcaggccgacaacaugaucacggagcuccugcagaaggaguacauggaccggcagggcaagaccccgcuggggcucguggaccuguucguguucagcaccuccuucuaccugaucagcaucuuccugcaccucguccgcaucccgacccaccggcacgugaucggcaagcccugccccaagccccaccgccugaaccacauggggaucugcuccugcggccuguacaagcacccgggggugcccgucaaguggaagcgguga

SEQ ID NO: 33170 - RNA, 1473 nt, Artificial Sequence
  derived and/or modified CDS sequence (opt1) from LASV(Lassa virus/H.sapiens-wt/NGA/2018/ISTH_0959;Clade II)__AVV65099__GPCmut8
augggccagaucaucaccuucuuccaggaggugccccacgucaucgaggaggugaugaacaucgugcugaucgcccucagccugcuggccauccucaaggggaucuacaacgucgugaccugcggccuguucgggcugguguccuuccuccugcugugcggccgcagcugcuccacgaccuacaagggggucuacgagcuccagacccuggagcuggacauggcgagccucaacaugugcaugccgcuguccugcacgaagaacaacagccaccacuacaucauggugggcaacgagaccggccuggagcucacccugaccaacacguccaucaucaaccacaaguucugcaaccugagcgacgcccacaagaagaaccucuacgaccacgcccugauguccaucaucagcaccuuccaccuguccauccccaacuucaaccaguacgaggccaugagcugcgacuucaacgggggcaagaucuccgugcaguacaaccucagccacgccuacgcgaucgacgccgccaaccacugcgggaccaucgccaacggcguccugcagaccuucaugcggauggcguggggcggguccuacaucgcccuggacagcggcaagggguccugggacugcaucaugacgagcuaccaguaccucaucauccagaacaccaccugggaggaccacugccaguucucccgccccagccccaucggcuaccuggggcugcucagccagcggacccgcgacaucuacaucucccggcgccugcugggcacguucaccuggacccucagcgacuccgagggcaacgagacccccgggggcuacugccugacgcgguggaugcugaucgaggccgagcucaagugcuucgggaacaccgccguggccaagugcaacgagaagcacgacgaggaguucugcgacaugcugcgccuguucgacuucugcaagcaggcgauccggcgccucaagacccccgcccagaugagcauccagcugaucaacaaggccgugaacgcccugaucaacgaccagcucaucaugaagaaccaccuccgggacaucaugggcaucccguacugcaacuacuccaaguacugcuaccugaaccacaccgucacggggaagaccagccugccccgcugcugccugguguccaacggcagcuaccugaacgagacccacuucuccgacgacaucgagcagcaggccgacaacaugaucaccgagcuccugcagaaggaguacaucgaccggcagggcaagacgccccuggggcucguggaccuguucgucuucagcaccuccuucuaccugaucagcaucuuccugcaccucgugaagaucccgacccaccgccacgugaucggcaagcccugccccaagccccaccggcugaaccacauggggaucugcuccugcggccuguacaagcacccggggguccccgugaaguggaagcgcuga

SEQ ID NO: 33171 - RNA, 1473 nt, Artificial Sequence
  derived and/or modified CDS sequence (opt1) from LASV(LASV003-NIG-2008;Clade II)__AIT17580__GPCmut8
augggccagaucaucaccuucuuccaggaggugccccacgucaucgaggaggugaugaacaucgugcugaucgcccucagccugcuggccauccucaaggggaucuacaacgucgcgaccugcggccuguucgggcugguguccuuccuccugcugugcggccgcagcugcuccacgaccuacaaggggguguacgagcuccagacccuggagcuggacauggccagccucaacaugugcaugccgcuguccugcacgaagaacaacagccaccacuacaucauggucggcaacgagaccggccuggagcucacccugaccaacacguccaucaucaaccacaaguucugcaaccugagcgacgcccacaagaagaaccucuacgaccacgcccugauguccaucaucagcaccuuccaccuguccauccccaacuucaaccaguacgaggccaugagcugcgacuucaacgggggcaagaucuccgugcaguacaaccucagccacaccuacgcgguggacgccgccaaccacugcgggaccaucgccaacggcguccugcagacguucaugcggauggcguggggcggguccuacaucgcccuggacagcggcaagggguccugggacugcaucaugaccagcuaccaguaccucaucauccagaacaccaccugggaggaccacugccaguucucccgccccagccccaucggcuaccuggggcugcucagccagcggacgcgcgacaucuacaucucccggcgccugcugggcaccuucaccuggacccucagcgacuccgagagcaacgagacgccgggcggguacugccugacccgguggaugcugaucgaggccgagcucaagugcuucggcaacaccgccguggccaagugcaacgagaagcacgacgaggaguucugcgacaugcugcgccuguucgacuucugcaagcaggcgauccggcgccucaaggcccccgcccagauguccauccagcugaucaacaaggccgugaacgcccugaucaacgaccagcucaucaugaagaaccaccuccgggacaucauggggauccccuacugcaacuacagcaaguacugcuaccugaaccacaccgucacgggccgcaccucccugccccggugcugccuggugagcaacggguccuaccugaacgagacccacuucagcgacgacaucgagcagcaggcggacaacaugaucaccgagcuccugcagaaggaguacauggaccgccagggcaagacgccccugggccucguggaccuguucgucuucuccaccagcuucuaccugaucuccaucuuccugcaccucgugaagaucccgacccaccggcacgugaucgggaagcccugccccaagccccaccgccugaaccacaugggcaucugcagcugcgggcuguacaagcacccgggcguccccgugaaguggaagcgguga

SEQ ID NO: 33172 - RNA, 1473 nt, Artificial Sequence
  derived and/or modified CDS sequence (opt1) from LASV(LASV035-NIG-2009;Clade II)__AIT17588__GPCmut8
augggccagaucaucaccuucuuccaggaggugccccacgucaucgaggaggugaugaacaucgugcugaucgcccucagccugcuggccauccucaaggggaucuacaacgucgcgaccugcggccuguucgggcugguguccuuccuccugcugugcggccgcagcugcuccacgaccuacaaggggguguacgagcuccagacccuggagcuggacauggccagccucaacaugugcaugccgcuguccugcacgaagaacaacagccaccacuacaucauggucggcaacgagaccggccuggagcucacccugaccaacacguccaucaucaaccacaaguucugcaaccugagcgacgcccacaagaagaaccucuacgaccacgcccugauguccaucaucagcaccuuccaccuguccauccccaacuucaaccaguacgaggccaugagcugcgacuucaacgggggcaagaucuccgugcaguacaaccucagccacgcguacgccguggacgccgccaaccacugcgggaccaucgcgaacggcguccugcagaccuucaugcggauggccuggggcggguccuacaucgcccuggacagcggcaagggguccugggacugcaucaugacgagcuaccaguaccucaucauccagaacaccaccugggaggaccacugccaguucucccgccccagccccaucggcuaccuggggcugcucagccagcggacccgcgacaucuacaucucccggcgccugcugggcacguucaccuggacccucagcgacuccgagggcaacgagacccccgggggcuacugccugacgcgguggaugcugaucgaggccgagcucaagugcuucgggaacaccgccguggcgaagugcaacgagaagcacgacgaggaguucugcgacaugcugcgccuguucgacuucugcaagcaggccauccggcgccucaaggcccccgcccagaugagcauccagcugaucaacaaggccgugaacgcgcugaucaacgaccagcucaucaugaagaaccaccuccgggacaucaugggcauccccuacugcaacuacuccaaguacugcuaccugaaccacaccgucaccgggaagacgagccugccccgcugcugccugguguccaacggcagcuaccugaacgagacccacuucuccgacgacaucgagcagcaggccgacaacaugaucaccgagcuccugcagaaggaguacaucgaccggcagggcaagaccccgcuggggcucguggaccuguucgucuucagcacguccuucuaccugaucagcaucuuccugcaccucgugaagaucccgacccaccgccacgugaucggcaagcccugccccaagccccaccggcugaaccacauggggaucugcuccugcggccuguacaagcacccggggguccccgugaaguggaagcgcuga

SEQ ID NO: 33173 - RNA, 1473 nt, Artificial Sequence
  derived and/or modified CDS sequence (opt1) from LASV(LASV1000-NIG-2009;Clade II)__AIT17782__GPCmut8
augggccagaucaucaccuucuuccaggaggugccccacgucaucgaggaggugaugaacaucgugcugaucgcccucagccugcuggccauccucaaggggaucuacaacgucgcgaccugcggccuguucgggcugguguccuuccuccugcugugcggccgcagcugcuccacgaccuacaaggggguguacgagcuccagacccuggagcuggacauggccagccucaacaugugcaugccgcuguccugcacgaagaacaacagccaccacuacaucauggucggcaacgagaccggccuggagcucacccugaccaacacguccaucaucaaccacaaguucugcaaccugagcgacgcccacaagaagaaccucuacgaccacgcccugauguccaucaucagcaccuuccaccuguccauccccaacuucaaccaguacgaggccaugagcugcgacuucaacgggggcaagaucuccgugcaguacaaccucagccacaccuacgcgguggacgccgccaaccacugcgggaccaucgccaacggcguccugcagacguucaugcggauggcguggggcggguccuacaucgcccuggacagcggcaagggguccugggacugcaucaugaccagcuaccaguaccucaucauccagaacaccaccugggaggaccacugccaguucucccgccccagccccaucggcuaccuggggcugcucagccagcggacgcgcgacaucuacaucucccggcgccugcugggcaccuucaccuggacccucagcgacuccgagggcaacgagacgcccgggggcuacugccugacccgguggaugcugaucgaggccgagcucaagugcuucgggaacaccgccguggccaagugcaacgagaagcacgacgaggaguucugcgacaugcugcgccuguucgacuucugcaagcaggcgaucaagcggcucaagacccccgcccagaugagcauccagcugaucaacaaggccgugaacgcccugaucaacgaccagcucaucaugaagaaccaccuccgcgacaucaugggcauccccuacugcaacuacuccaaguacugcuaccugaaccacacggucaccgggaagaccagccugccccggugcugccugguguccaacggcagcuaccugaacgagacccacuucuccgacgacaucgagcagcaggccgacaacaugaucacggagcuccugcagaaggaguacaucgaccgccagggcaagaccccgcuggggcucguggaccuguucgucuucagcaccuccuucuaccugaucagcaucuuccugcaccucgugaagaucccgacccaccggcacguggucggcaagcccugccccaagccccaccgccugaaccacauggggaucugcuccugcggccuguacaagcacccgggggugcccgugaaguggaagcgguga

SEQ ID NO: 33174 - RNA, 1473 nt, Artificial Sequence
  derived and/or modified CDS sequence (opt1) from LASV(LASV221-NIG-2010;Clade II)__AIT17624__GPCmut8
augggccagaucaucaccuucuuccaggaggugccccacgucaucgaggaggugaugaacaucgugcugaucgcccucagccugcuggccauccucaaggggaucuacaacgucgcgaccugcggccuguucgggcugguguccuuccuccugcugugcggccgcagcugcuccacgaccuacaaggggguguacgagcuccagacccuggagcuggacauggccagccucaacaugugcaugccgcuguccugcacgaagaacaacagccaccacuacaucauggucggcaacgagaccggccuggagcucacccugaccaacacguccaucaucaaccacaaguucugcaaccugagcgacgcccacaagaagaaccucuacgaccacgcccugauguccaucaucagcaccuuccaccuguccauccccaacuucaaccaguacgaggccaugagcugcgacuucaacgggggcaagaucuccgugcaguacaaccucagccacaccuacgcgaucgacgccgccaaccacugcgggaccaucgccaacggcgugcugcagacguucaugcggauggcguggggcggguccuacaucgcccuggacagcggcaagggguccugggacugcaucaugaccagcuaccaguaccucaucauccagaacaccaccugggaggaccacugccaguucucccgccccagccccaucggcuaccuggggcugcucagccagcggacgcgcgacaucuacaucucccggcgccugcugggcaccuucaccuggacccucagcgacuccgagggcaacgagacgcccgggggcuacugccugacccgguggaugcugaucgaggccgagcucaagugcuucgggaacaccgccgucgccaagugcaacgagaagcacgacgaggaguucugcgacaugcugcgccuguucgacuucugcaagcaggcgauccggcgccucaagacccccgcccagaugagcauccagcugaucaacaaggccgugaacgcccugaucaacgaccagcucaucaugaagaaccaccuccgggacaucaugggcauccccuacugcaacuacuccaaguacugcuaccugaaccacacggugaccgggaagaccagccugccccgcugcugccuggucuccaacggcagcuaccugaacgagacccacuucuccgacgacaucgagcagcaggccgacaacaugaucacggagaugcuccagaaggaguacauggaccggcagggcaagaccccgcuggggcugguggaccucuucguguucagcaccuccuucuaccugaucagcaucuuccugcaccuggucaagaucccgacccaccgccacgugaucggcaagcccugccccaagccccaccggcucaaccacauggggaucugcuccugcggccuguacaagcacccgggggugcccgucaaguggaagcgcuga

SEQ ID NO: 33175 - RNA, 1473 nt, Artificial Sequence
  derived and/or modified CDS sequence (opt1) from LASV(LASV237-NIG-2010;Clade II)__AIT17638__GPCmut8
augggccagaucaucaccuucuuccaggaggugccccacgucaucgaggaggugaugaacaucgugcugaucgcccucagccugcuggccauccucaaggggaucuacaacgucgcgaccugcggccuguucgggcugguguccuuccuccugcugugcggccgcagcugcuccacgaccuacaaggggguguacgagcuccagacccuggagcuggacauggccagccucaacaugugcaugccgcuguccugcacgaagaacaacagccaccacuacaucauggucggcaacgagaccggccuggagcucacccugaccaacacguccaucaucaaccacaaguucugcaaccugagcgacgcccacaagaaggaccucuacgaccacgcccugauguccaucaucagcaccuuccaccuguccauccccaacuucaaccaguacgaggccaugagcugcgacuucaacgggggcaagaucuccgugcaguacaaccucagccacaccuacgcgguggacgccgccaaccacugcgggaccaucgccaacggcguccugcagacguucaugcggauggcguggggcggguccuacaucgcccuggacagcggcaagggguccugggacugcaucaugaccagcuaccaguaccucaucauccagaacaccaccugggaggaccacugccaguucucccgccccagccccaucggcuaccuggggcugcucagccagcggacgcgcgacaucuacaucucccggcgccugcugggcaccuucaccuggacccucagcgacuccgagggcaacgagacgcccgggggcuacugccugacccgguggaugcugaucgaggccgagcucaagugcuucgggaacaccgccguggccaagugcaacgagaagcacgacgaggaguucugcgacaugcugcgccuguucgacuucugcaagcaggcgauccggcgccucaagacccccgcccagaugagcauccagcugaucaacaaggccgugaacgcccugaucaacgaccagcucaucaugaagaaccaccuccgggacaucaugggcauccccuacugcaacuacuccaaguacugcuaccugaaccacacggucaccgggaagaccagccugccccgcugcugccugguguccaacggcagcuaccugaacgagacccacuucuccgacgacaucgagcagcaggccgacaacaugaucacggagcuccugcagaaggaguacauggaccggcagggcaagaccccgcuggggcucguggaccuguucgucuucagcaccuccuucuaccugaucagcaucuuccugcaccucaucaagaucccgacccaccgccacaucacgggcaagcccugccccaagccccaccggcugaaccacauggggaucugcuccugcggccuguacaagcacccgggggugcccgugaaguggaagcgcuga

SEQ ID NO: 33176 - RNA, 1473 nt, Artificial Sequence
  derived and/or modified CDS sequence (opt1) from LASV(LASV253-NIG-2011;Clade II)__AIT17670__GPCmut8
augggccagaucaucaccuucuuccaggaggugccccacgucaucgaggaggugaugaacaucgugcugaucgcccucagccugcuggccauccucaaggggaucuacaacgucgcgaccugcggccuguucgggcugguguccuuccuccugcugugcggccgcagcugcuccacgaccuacaaggggguguacgagcuccagacccuggagcuggacauggccagccucaacaugugcaugccgcuguccugcacgaagaacaacagccaccacuacaucauggucggcaacgagaccggccuggagcucacccugaccaacacguccaucaucaaccacaaguucugcaaccugagcgacgcccacaagaagaaccucuacgaccacgcccugauguccaucaucagcaccuuccaccuguccauccccaacuucaaccaguacgaggccaugagcugcgacuucaacgggggcaagaucuccgugcaguacaaccucagccacaccuacgcgguggacgccgccaaccacugcgggaccaucgccaacggcguccugcagacguucaugcggauggcguggggcggguccuacaucgcccuggacagcggcaagggguccugggacugcaucaugaccagcuaccaguaccucaucauccagaacaccaccugggaggaccacugccaguucucccgccccagccccaucggcuaccuggggcugcucagccagcggacgcgcgacaucuacaucucccggcgccugcugggcaccuucaccuggacccucagcgacuccgagggcaacgagacgcccgggggcuacugccugacccgguggaugcugaucgaggccgagcucaagugcuucgggaacaccgccguggccaagugcaacgagaagcacgacgaggaguucugcgacaugcugcgccuguucgacuucugcaagcaggcgauccggcgccucaaggcccccgcccagaugagcauccagcugaucaacaaggccgugaacgcccugaucaacgaccagcucaucaugaagaaccaccuccgggacaucaugggcaucccguacugcaacuacuccaaguacugcuaccugaaccacaccgucacggggcgcaccagccugccccggugcugccugguguccaacggcagcuaccugaacgagacccacuucuccgacgacaucgagcagcaggcggacaacaugaucaccgagcuccugcagaaggaguacaucgaccgccagggcaagacgccccuggggcucguggaccuguucgucuucagcaccuccuucuaccugaucagcaucuuccugcaccucgugaagaucccgacccaccggcacaucaucggcaagcccugccccaagccccaccgccugaaccacauggggaucugcuccugcggccuguacaagcacccgggggugcccgucaaguggaagcgguga

SEQ ID NO: 33177 - RNA, 1473 nt, Artificial Sequence
  derived and/or modified CDS sequence (opt1) from LASV(LASV254-NIG-2011;Clade II)__AIT17674__GPCmut8
augggccagaucaucaccuucuuccaggaggugccccacgucaucgaggaggugaugaacaucgugcugaucgcccucagccugcuggccauccucaaggggaucuacaacgucgcgaccugcggccuguucgggcugguguccuuccuccugcugugcggccgcagcugcuccacgaccuacaaggggguguacgagcuccagacccuggagcuggacaugaccaaccucaacaugugcaugccgcugagcugcaccaagaacaacucccaccacuacaucauggucggcaacgagaccggccuggagcucacccugacgaacaccagcaucaucaaccacaaguucugcaaccuguccgacgcccacaagaagaaccucuacaaccacgcccugaugagcaucaucuccaccuuccaccugagcauccccaacuucaaccaguacgaggccauguccugcgacuucaacgggggcaagaucagcgugcaguacaaccucucccacagcuacgccguggacgcggccaaccacugcgggaccaucgccaacggcguccugcagacguucaugcggauggccuggggcggguccuacaucgcgcuggacagcggcaaggggaacugggacugcaucaugaccuccuaccaguaccucaucauccagaacaccaccugggaggaccacugccaguucagccgccccucccccaucggcuaccuggggcugcucagccagcggacgcgcgacaucuacaucagccggcgccugcugggcaccuucaccuggacccucuccgacagcgagggcaacgagacgcccgggggcuacugccugacccgguggaugcugaucgaggccgagcucaagugcuucgggaacaccgccguggccaagugcaacgagaagcacgacgaggaguucugcgacaugcugcgccuguucgacuucugcaagcaggccauccggcgccucaagacccccgcgcaggccaacauccagcugaucaacaaggccgugaacgcccugaucaacgaccagcucaucaugaagaaccaccuccgggacaucaugggcauccccuacugcaacuacuccaaguacugcuaccugaaccacacggucaccgggaagaccagccugccccgcugcugccugguguccaacggcagcuaccugaacgagacccacuucuccgacgacaucgagcagcaggccgacaacaugaucacggagcuccugcagaaggaguacauggaccggcagggcaagaccccgcuggggcucguggaccuguucgucuucagcaccuccuucuaccugaucagcaucuuccugcaccucgugaagaucccgacccaccgccacgugaucggcaagcccugccccaagccccaccggcugaaccacauggggaucugcuccugcggccuguacaagcacccggggguccccgugaaguggaagcgcuga

SEQ ID NO: 33178 - RNA, 1473 nt, Artificial Sequence
  derived and/or modified CDS sequence (opt1) from LASV(Nig08-A19;Clade III)__ADU56618__GPCmut8
augggccagaucgugaccuucuuccaggaggucccccacgugaucgaggaggugaugaacaucguccugaucgcccucagcauccuggccauccugaaggggcucuacaacaucgcgaccugcggccugaucgggcuggugacguuccuccugcuguccggccgcagcugcuccaugaccuacaaggggguguacgagcuccagacccuggagcugaacaugaacacccucaacaugugcaugccgcugagcugcaccaagaacaacucccaccacuacaucauggucggcaacgagaccggccuggagcucacccugacgaacaccagccugcuccaccacaaguucugcaaccuguccgacgcccacaagaagaaccuguacgaccacacccucaugagcaucaucuccaccuuccaccugagcauccccaacuucaaccaguacgaggccauguccugcgacuucaacgggggcaagaucacggugcaguacaaccugagccacuccuacgccaucgacgccgcgaaccacugcgggaccguggccaacggcguccuccagaccuucaugcggauggccuggggcgggagcuacaucgcccuggacuccggccgcgggaagugggacugcaucaugaccagcuaccaguaccugaucauccagaacacgaccugggaggaccacugccaguucucccggcccagccccaucggcuaccucgggcugcugucccagcgcacccgggacaucuacaucagccgccggcuccugggcaccuucacguggacccugagcgacuccgagggcaacgagacccccgggggcuacugccucacccgcuggaugcugaucgaggcggagcugaagugcuucgggaacacggccguggccaagugcaacgagaagcacgacgaggaguucugcgacaugcuccggcuguucgacuucugcaagcaggccauccgccggcugaaggcccccgcgcagaugagcauccagcucaucaacaaggccgugaacgcccugaucaacgaccagcugaucaugaagaaccaccuccgcgacaucaugggcauccccuacugcaacuacuccaaguacugcuaccugaaccacaccagcaccgggcggaccucccugccccgcugcugccucgucagcaacggcuccuaccugaacgagacgcacuucagcgacgacaucgagcagcaggccgacaacaugaucaccgagaugcugcagaaggaguaccucgaccggcagggcaagaccccgcuggggcugguggaccuguucguguucuccaccagcuucuaccucaucuccaucuuccugcaccuggucaagaucccgacgcaccgccacaucgugggcaagcccugccccaagccccaccggcucaaccacauggggaucugcagcugcggccuguacaagcagccgggggugcccguccgcuggaagcgguga

SEQ ID NO: 33179 - RNA, 1476 nt, Artificial Sequence
  derived and/or modified CDS sequence (opt1) from LASV(G1180-SLE-2010;Clade IV)__AIT17168__GPCmut8
augggccagaucgugaccuucuuccaggaggucccccacgugaucgaggaggugaugaacaucguccugaucgcccucagcauccuggccgugcugaaggggcucuacaacuucgcgaccugcggccugguggggcugcucaccuuccugcugcucugcggccgcuccugcaccgccagccgguacaagggggucuacgagcugcagacccuggagcucaacauggagacccugaacaugugcaugccgcuguccugcaccaagaacaacagccaccacuacaucauggugggcaacgagaccggccucgagcugacccugacgaacaccuccaucaucaaccacaaguucugcaaccucagcgacgcccacaagaagaaccuguacgaccacgcccugauguccaucaucagcaccuuccaccucuccauccccaacuucaaccaguacgaggccaugagcugcgacuucaacgggggcaagaucuccgugcaguacaaccugagccacuccuacgcgggggacgccgccaaccacugcggcaccgucgccaacggggugcugcagacguucaugcgcauggcguggggcggcagcuacaucgcccucgacuccgggcacggcagcugggacugcaucaugaccuccuaccaguaccugaucauccagaacaccaccugggaggaccacugccaguucagccggcccucccccaucggguaccugggccuccugagccagcgcacgcgggacaucuacaucagccgccggcugcucggcaccuucaccuggacccuguccgacagcgaggggaaggacacgccgggcggguacugccugacccgcuggaugcucaucgaggccgagcugaagugcuucggcaacaccgccguggccaagugcaacgagaagcacgacgaggaguucugcgacaugcugcggcuguucgacuucugcaagcaggcgauccagcgccugaaggcccccgcccagauguccauccagcugaucaacaaggccgucaacgcccucaucaacgaccagcugaucaugaagaaccaccuccgggacaucauggggauccccuacugcaacuacagcaaguacugcuaccucaaccacaccacgaccggcaagaccucccugcccaagugcugccuggugagcaacggcuccuaccucaacgagacccacuucagcgacgacaucgagcagcaggcggacaacaugaucacggagaugcugcagaaggaguacauggagcgccaggggaagacgccccugggccucguggaccuguucgucuucuccaccagcuucuaccugaucuccaucuuccugcaccucgugaagaucccgacccaccggcacaucgugggcaagagcugccccaagccccaccgccugaaccacauggggaucugcuccugcgggcuguacaagcagcccggcgucccggugaaguggaagcgguga

SEQ ID NO: 33180 - RNA, 1476 nt, Artificial Sequence
  derived and/or modified CDS sequence (opt1) from LASV(G1442-SLE-2011;Clade IV)__AIT17180__GPCmut8
augggccagaucgugaccuucuuccaggaggucccccacgugaucgaggaggugaugaacaucguccugaucgcccucagcauccuggccgugcugaaggggcucuacaacguggcgaccugcggccugaucgggcuggucacguuccuccugcugugcggccgcuccugcaccaccacccucuacaaggggguguacgagcugcagacgcuggagcucaacauggagacccugaacaugugcaugccgcugagcugcaccaagaacaacucccaccacuacauccgggugggcaacgagacgggccucgagcugacccugaccaacaccagcaucaucaaccacaaguucugcaaccucuccgacgcccacaagaagaaccuguacgaccacgcccugaugagcaucaucuccacguuccaccucagcauccccaacuucaaccaguacgaggccauguccugcgacuucaacgggggcaagaucagcguccaguacaaccugucccacagcuacgccggggacgcggccaaccacugcggcaccguggccaacggggugcugcagaccuucaugcgcauggccuggggcggcuccuacaucgcgcucgacagcgggcggggcaacugggacugcaucaugaccuccuaccaguaccugaucauccagaacacgaccugggacgaccacugccaguucagccgccccucccccaucggguaccugggccuccugagccagcggacccgcgacgucuacaucucccggcgccugcucggcaccuucacguggacccugagcgacagcgaggggaaggacaccccgggcggguacugccugacccgguggaugcucaucgaggccgagcugaagugcuucggcaacacggccguggccaagugcaacgagaagcacgacgaggaguucugcgacaugcugcgccucuucgacuucugcaagcaggccauccagcggcugaaggcgcccgcccagauguccauccagcugaucaacaaggccgugaacgcccucaucaacgaccagcugaucaugaagaaccaccuccgcgacaucauggggauccccuacugcaacuacagcaaguacugcuaccugaacaacaccgccaccggcaagaccucccugcccaagugcugccugaucagcaacggcuccuaccucaacgagacgcacuucagcgacgacaucgagcaggaggcggacaacaugaucaccgagaugcugcagaaggaguacauggagcggcaggggaagacgccccugggccucgucgaccuguucguguucuccaccagcuucuaccugaucuccaucuuccugcaccucgugaagaucccgacccaccgccacaucgucggcaagagcugccccaagccccaccggcugaaccacauggggaucugcuccugcgggcuguacaagcagcccggcgugccggugcgcuggaagcgguga

SEQ ID NO: 33181 - RNA, 1476 nt, Artificial Sequence
  derived and/or modified CDS sequence (opt1) from LASV(G3010-SLE-2013;Clade IV)__AIT17344__GPCmut8
augggccagaucgugaccuucuuccaggaggucccccacgugaucgaggaggugaugaacaucguccugaucgcccucagcauccuggccgugcugaaggggcucuacaacuucgcgaccugcggccugguggggcuggucacguuccuccugcugugcggccgcuccugcaccaccagccucuacaaggggguguacgagcugcagacccuggagcucaacauggagacgcugaacaugugcaugccgcuguccugcaccaagaacaacagccaccacuacaucauggugggcaacgagaccggccucgagcugacgcugaccaacaccuccaucaucaaccacaaguucugcaaccucagcgacgcccacaagaagaaccuguacaaccacgcccugauguccaucaucagcaccuuccaccucuccauccccaacuucaaccaguacgaggccaugagcugcgacuucaacgggggcaagaucuccguccaguacaaccugagccacuccuacgccggggacgcggccagccacugcggcacgguggccaacggggugcugcagaccuucaugcggauggccuggggcggcuccuacaucgcgcucgacagcggguacggcaagugggacugcaucaugaccuccuaccaguaccugaucauccagaacaccacgugggaggaccacugccaguucagccgccccucccccaucggguaccugggccuccugagccagcggacccgcgacaucuacaucagccggcgccugcucggcaccuucaccuggacgcuguccgacagcgaggggaaggacaccccgggcggguacugccugacccgguggaugcucaucgaggccgagcugaagugcuucggcaacaccgccgucgccaagugcaacgagaagcacgacgaggaguucugcgacaugcugcgccucuucgacuucugcaagcaggccauccagcggcugaagacgcccgcgcagauguccauccagcugaucaacaaggccgugaacgcccucaucaacgaccagcugaucaugaagaaccaccuccgcgacaucauggggauccccuacugcaacuacagcaaguacugcuaccugaaccacaccaccaccggcaagacgucccugcccaagugcugccuggugagcaacggcuccuaccucaacgagacccacuucagcgacgacaucgagcagcaggccgacaacaugaucaccgagaugcugcagaaggaguacauggagcggcaggggaagacgccccugggccucgucgaccuguucguguucuccaccagcuucuaccugaucuccaucuuccugcaccucgugaagaucccgacccaccgccacaucgucggcaagagcugccccaagccccaccggcugaaccacauggggaucugcuccugcgggcuguacaagcagcccggcgugccggugcgcuggaagcgguga

SEQ ID NO: 33182 - RNA, 1476 nt, Artificial Sequence
  derived and/or modified CDS sequence (opt1) from LASV(G502-SLE-2009;Clade IV)__AIT17126__GPCmut8
augggccagaucgugaccuucuuccaggaggucccccacgugaucgaggaggugaugaacaucguccugaucgcccucagcauccuggccgugcugaaggggcucuacaacuucgcgaccugcggccugguggggcugcucacguuccugcugcucugcggccgcuccugcaccaccgggcuguacaagggcgucuacgagcugcagacccucgagcugaacauggagacgcugaacaugugcaugccgcucagcugcaccaagaacaacucccaccacuacaucauggugggcaacgagaccgggcuggagcugacgcucaccaacaccagcaucaucaaccacaaguucugcaaccuguccgacgcccacaagaagaaccuguacgaccacgcccucaugagcaucaucuccaccuuccaccugagcauccccaacuucaaccaguacgaggccauguccugcgacuucaacggcgggaagaucagcgugcaguacaaccugucccacagcuacgccggcgacgcggccgaccacugcgggacggucgccaacggcgugcuccagaccuucaugcggauggccuggggcggguccuacaucgcgcuggacagcggccgcgggcggugggacugcaucaugaccuccuaccaguaccugaucauccagaacaccacgugggaggaccacugccaguucagccgccccucccccaucggcuaccucggccugcugagccagcggacccgcgacaucuacaucucccggcgccuccuggggaccuucaccuggacgcugagcgacagcgagggcaaggacacccccgggggcuacugccucacccgguggaugcugaucgaggccgagcugaagugcuucgggaacaccgccguggccaagugcaacgagaagcacgacgaggaguucugcgacaugcuccgccuguucgacuucugcaagcaggccauccagcggcugaaggcgcccgcccagauguccauccagcucaucaacaaggccgucaacgcccugaucaacgaccagcuggugaugaagaaccaccuccgcgacaucaugggcauccccuacugcaacuacagccgguacugcuaccugaaccacacgaccaccggccgcaccucccugcccaagugcugccucgugagcaacggguccuaccugaacgagacgcacuucagcgacgacaucgagcagcaggccgacaacaugaucaccgagaugcugcagaaggaguacauggagcggcagggcaagaccccgcucgggcuggucgaccuguucguguucuccaccagcuucuaccugaucuccaucuuccuccaccuggugaagaucccgacgcaccgccacaucgucggcaagagcugccccaagccccaccggcugaaccacauggggaucugcuccugcggccucuacaagcagcccggcgugccggugaaguggaagcgcuga

SEQ ID NO: 33183 - RNA, 1476 nt, Artificial Sequence
  derived and/or modified CDS sequence (opt1) from LASV(G733-SLE-2010;Clade IV)__AIT17154__GPCmut8
augggccagaucgugaccuucuuccaggaggucccccacgugaucgaggaggugaugaacaucguccugaucgcccucagcauccuggccgugcugaaggggcucuacaacuucgcgaccugcggcaucguggggcuggucuccuuccugcuccugugcggccgcagcugcacgaccucccuguacaaggggguguacgagcuccagacccuggagcugaacauggagacccucaacaugugcaugccgcugagcugcaccaagaacaacucccaccacuacaucauggugggcaacgagaccggccuggagcucacccugacgaacaccagcaucaucaaccacaaguucugcaaccuguccgacgcccacaagaagaaccucuacgaccacgcccugaugagcaucaucuccaccuuccaccugagcauccccaacuucaaccaguacgaggccauguccugcgacuucaacgggggcaagaucagcguccaguacaaccucucccacagcuacgccggggacgcggccaaccacugcggcaccaucgccaacggggugcugcagacguucaugcggauggccuggggcggcuccuacaucgcgcuggacagcgggcgcgaccggugggacugcaucaugaccuccuaccaguaccucaucauccagaacaccaccugggaggaccacugccaguucagccgccccucccccaucggcuaccuggggcugcucagccagcggacgcgcgacaucuacaucagccggcgccugcugggcaccuucaccuggacccucuccgacagcgagggcaaggacacgcccgggggcuacugccugacccgguggaugcugaucgaggccgagcucaagugcuucgggaacaccgccguggccaagugcaacgagaagcacgacgaggaguucugcgacaugcugcgccuguucgacuucugcaagcaggccauccagcggcucaaggcgcccgcccagauguccauccagcugaucaacaaggccgucaacgcccugaucaacgaccagcucaucaugaagaaccaccuccgcgacaucaugggcauccccuacugcaacuacagcaaguacugcuaccugaaccacaccacgaccgggaagaccucccugcccaagugcugccuggugagcaacggcuccuaccugaacgagacccacuucagcgacgacaucgagcagcaggccgacaacaugaucacggagaugcuccagaaggaguacauggagcggcagggcaagaccccgcuggggcugguggaccucuucgucuucuccaccagcuucuaccugaucuccaucuuccugcaccuggugaagaucccgacccaccgccacguggucggcaagagcugccccaagccccaccggcucaaccacauggggaucugcuccugcggccuguacgggcagcccggcgugccggugaaguggaagcgcuga

SEQ ID NO: 33184 - RNA, 1476 nt, Artificial Sequence
  derived and/or modified CDS sequence (opt1) from MOPV/LASV reassortant(IGS-1;Clade IV)__AFY05576__GPCmut8
augggccagaucgugaccuucuuccaggaggucccccacgugaucgaggaggugaugaacaucguccugaucgcccucagcgugcuggccgugcugaaggggcucuacaacuucgcgaccugcggccuggucgggcuggugacguuccuccugcugugcggccgcuccugcaccaccagccucuacaaggggguguacgagcugcagacccuggagcucaacauggagacgcugaacaugugcaugccgcuguccugcaccaagaacaacagccaccacuacaucauggucggcaacgagaccggccucgagcugacgcugaccaacaccuccaucaucaaccacaaguucugcaaccucagcgacgcccacaagaagaaccuguacgaccacgcccugauguccaucaucagcaccuuccaccucuccauccccaacuucaaccaguacgaggccaugagcugcgacuucaacgggggcaagaucuccgugcaguacaaccugagccacuccuacgccggggacgcggccaaccacugcggcacgguggccaacgggguccugcagaccuucaugcggauggccuggggcggcagcuacaucgcgcucgacuccgggcgcggcaacugggacugcaucaugaccagcuaccaguaccugaucauccagaacaccacgugggaggaccacugccaguucucccggcccagccccaucggguaccugggccuccugucccagcgcacccgggacaucuacaucagccgccggcugcucggcaccuucaccuggacgcugagcgacuccgagggggaggacaccccgggcggguacugccugacccgcuggaugcucaucgaggccgagcugaagugcuucggcaacaccgccguggccaagugcaacgagaagcacgacgaggaguucugcgacaugcugcggcuguucgacuucugcaagcaggccauccagcgccugaaggcgcccgcccagaugagcauccagcugaucaacaaggccgugaacgcccucaucaacgaccagcugaucaugaagaaccaccuccgggacaucauggggauccccuacugcaacuacuccaaguacugcuaccucaaccacacgaccaccggccgcaccagccugcccaagugcugccuggucuccaacggcagcuaccucaacgagacgcacuucuccgacgacaucgagcagcaggccgacaacaugaucaccgagaugcugcagaaggaguacauggagcggcaggggaagacgccccugggccucguggaccuguucguguucagcaccuccuucuaccugaucagcaucuuccugcaccucgucaagaucccgacccaccgccacaucguggggaaguccugccccaagccccaccggcugaaccacaugggcaucugcagcugcgggcuguacaagcagcccggcgugccggucaaguggaagcgcuga

SEQ ID NO: 33185 - RNA, 1476 nt, Artificial Sequence
  derived and/or modified CDS sequence (opt1) from LASV(LM765-SLE-2012;Clade IV)__AIT17814__GPCmut8
augggccagaucgugaccuucuuccaggaggucccccacgugaucgaggaggugaugaacaucguccugaucgcccucagcauccuggccgugcugaaggggcucuacaacuucgcgaccugcggccugguggggcuggucacguuccuccugcugugcggccgcuccugcaccaccagccucuacaaggggguguacgagcugcagacccuggagcucaacauggagacgcugaacaugugcaugccgcuguccugcaccaagaacaacagccaccacuacaucauggugggcaacgagaccggccucgagcugacgcugaccaacaccuccaucaucgaccacaaguucugcaaccucagcgacgcccaccggaagaaccuguacgaccacgcccugauguccaucaucagcaccuuccaccucuccauccccaacuucaaccaguacgaggccaugagcugcgacuucaacgggggcaagaucuccguccaguacaaccugagccacuccuacgccaaggacgcggccgaccacugcgggacgguggccaacggcgugcugcagaccuucaugcgcauggccuggggcgggagcuacaucgcgcucgacuccggccgggggcgcugggacugcaucaugaccagcuaccaguaccugaucauccagaacaccacgugggaggaccacugccaguucucccggcccagccccaucggcuaccuggggcuccugucccagcgcacccgggacaucuacaucagccgccggcugcucggcaccuucaccuggacgcugagcgacuccgagggcaaggacacccccgggggcuacugccugacccgcuggaugcucaucgaggccgagcugaagugcuucgggaacaccgccgucgccaagugcaacgagaagcacgacgaggaguucugcgacaugcugcggcuguucgacuucugcaagcaggccauccagcgccugaaggcgcccgcccagaugagcauccagcugaucaacaaggccgugaacgcccucaucaacgaccagcugaucaugaagaaccaccuccgggacaucaugggcauccccuacugcaacuacuccaaguacugcuaccucaaccacacgaccaccgggaagaccagccugcccaagugcugccugguguccaacggcagcuaccucaacgagacgcacuucuccgacgacaucgagcagcaggccgacaacaugaucaccgagaugcugcagaaggaguacauggagcgccagggcaagaccccgcuggggcucgucgaccuguucguguucagcaccuccuucuaccugaucagcaucuuccugcaccucgugaagaucccgacgcaccggcacaucgucggcaagcccugccccaagccccaccgccugaaccacauggggaucugcuccugcggccuguacaagcagccgggggugcccgugaaguggaagcgguga

SEQ ID NO: 33186 - RNA, 1476 nt, Artificial Sequence
  derived and/or modified CDS sequence (opt1) from LASV(LM776-SLE-2012;Clade IV)__AIT17824__GPCmut8
augggccagaucgugaccuucuuccaggaggucccccacgugaucgaggaggugaugaacaucguccugaucgcccucagcauccuggccgugcugaaggggcucuacaacuucgcgaccugcggccugguggggcuggucacguuccuccugcugugcggccgcuccugcaccaccagcguguacaaggggguguacgagcuccagacccuggagcugaacauggagacgcucaacaugugcaugccgcuguccugcaccaagaacaacagccaccacuacaucauggucggcaacgagaccggccuggagcucacgcugaccaacaccuccaucaucaaccacaaguucugcaaccugagcgacgcccacaagaagaaccucuacgaccacgcccugauguccaucaucagcaccuuccaccuguccauccccaacuucaaccaguacgaggccaugagcugcgacuucaacgggggcaagaucuccgugcaguacaaccucagccacuccuacgccggggacgcggccaaccacugcggcacgguggccaacgggguccugcagaccuucaugcggauggccuggggcggcagcuacaucgcgcuggacuccgggcacggcaagugggacugcaucaugaccagcuaccaguaccucaucauccagaacaccacgugggaggaccacugccaguucucccgccccagccccaucggguaccugggccugcucucccagcggacccgcgacaucuacaucagccggcgccugcugggcaccuucaccuggacgcucagcgacuccgaggggaaggacaccccgggcggguacugccugacccgguggaugcugaucgaggccgagcucaagugcuucggcaacaccgccguggccaagugcaacgagaagcacgacgaggaguucugcgacaugcugcgccuguucgacuucugcaagcaggccauccagcggcucaaggcgcccgcccagaugagcauccagcugaucaacaaggccgugaacgcccugaucaacgaccagcucaucaugaagaaccaccuccgcgacaucauggggauccccuacugcaacuacuccaaguacugcuaccugaaccacacgaccaccggcaagaccagccugcccaagugcugccuggucuccaacggcagcuaccugaacgagacgcacuucuccgacgacaucgagcagcaggccgacaacaugaucaccgagaugcuccagaaggaguacauggagcggcaggggaagacgccccugggccugguggaccucuucguguucagcaccuccuucuaccugaucagcaucuuccugcaccuggucaagaucccgacccaccgccacaucguggggaaguccugccccaagccccaccggcucaaccacaugggcaucugcagcugcgggcuguacaagcagcccggcgugccgguccgcuggaagcgguga

SEQ ID NO: 33187 - RNA, 1476 nt, Artificial Sequence
  derived and/or modified CDS sequence (opt1) from LASV(Mad39;Clade IV)__ANH09722__GPCmut8
augggccagaucgugaccuucuuccaggaggucccccacgugaucgaggaggugaugaacaucguccugaucgcccucagcauccuggccgugcugaaggggcucuacaacguggcgaccugcggccugaucgggcuggucacguuccuccugcugugcggccgcuccugcaccaccacccucuacaaggggguguacgagcugcaggcccuggagcucaacauggagacgcugaacaugugcaugccgcugagcugcaccaagaacaacucccaccacuacauccgggugggcaacgagaccggccucgagcugacgcugaccaacaccagccucaucaaccacaaguucugcaaccuguccgacgcccacaagaagaaccuguacgaccacgcccucaugagcaucaucuccaccuuccaccugagcauccccaacuucaaccaguacgaggccauguccugcgacuucaacgacgggaagaucagcguccaguacaaccugucccacacguacgcgggcgacaccgccaaccacugcgggaccguggccaacggcgugcuccagaccuucaugcgcauggccuggggcgggagcuacaucgcgcuggacuccggccgcgggggcugggacugcaucaugacgagcuaccaguaccugaucauccagaacaccaccugggaggaccacugccaguucucccggcccagccccaucggguaccucggccugcugucccagcggacccgcgacaucuacaucagccggcgccuccugggcacguucaccuggacccuguccgacagcgaggggaaggacaccccgggcggguacugccucacgcgguggaugcugaucgaggccgagcugaagugcuucggcaacaccgccgucgccaagugcaacgagaagcacgacgaggaguucugcgacaugcuccgccuguucgacuucugcaagcaggccauccagcggcugaaggcgcccgcccagaugagcauccagcucaucaacaaggccgugaacgcccugaucaacgaccagcugaucaugaagaaccaccuccgcgacaucauggggauccccuacugcaacuacuccaaguacugcuaccugaaccacaccgugaccggcaagacgagccugcccaagugcugccucgucuccaacggcagcuaccugaacgagacccacuucuccgacgacaucgagcagcaggccgacaacaugaucaccgagaugcugcagaaggaguacauggagcggcaggggaagacgccccucggccugguggaccuguucguguucagcaccuccuucuaccugaucagcaucuuccuccaccuggucaagaucccgacccaccgccacgugguggggaagcccugccccaagccccaccggcugaaccacaugggcaucugcuccugcggguucuacaagcagccgggcguccccgugcgcuggaagcgguga

SEQ ID NO: 33188 - RNA, 1476 nt, Artificial Sequence
  derived and/or modified CDS sequence (opt1) from LASV(Z0947-SLE-2011;Clade IV)__AIT17840__GPCmut8
augggccagaucgugaccuucuuccaggaggucccccacgugaucgaggaggugaugaacaucguccugaucgcccucagcauccuggccgugcugaaggggcucuacaacuucgcgaccugcggccugguggggcuggucacguuccuccugcugugcggccgcuccugcaccaucagccucuacaaggggguguacgagcugcagacccuggagcucaacauggagacccugaacaugugcaugccgcuguccugcaccaagaacaacagccaccacuacaucauggugggcaacgagaccggccucgagcugacccugacgaacaccuccaucaucaaccacaaguucugcaaccucagcgacgcccacaagaagaaccuguacgaccacgcccugauguccaucaucagcaccuuccaccucuccauccccaacuucaaccaguacgaggccaugagcugcgacuucaacgggggcaagaucuccguccaguacaaccugagccacuccuacgccggggacgcggccaaccacugcggcaccguggccaacggggugcugcagacguucaugcggauggccuggggcggcagcuacaucgcgcucgacuccgggcgcgaccggugggacugcaucaugaccagcuaccaguaccugaucauccagaacaccaccugggaggaccacugccaguucucccgccccagccccaucggcuaccuggggcuccugucccagcggacgcgcgacaucuacaucagccggcgccugcucggcaccuucaccuggacccugagcgacuccgagggcaaggacacgcccgggggcuacugccugacccgguggaugcucaucgaggccgagcugaagugcuucgggaacaccgccgucgccaagugcaacgagaagcacgacgaggaguucugcgacaugcugcgccucuucgacuucugcaagcaggccauccagcggcugaaggcgcccgcccagaugagcauccagcugaucaacaaggccgugaacgcccucaucaacgaccagcugaucaugaagaaccaccuccgcgacaucaugggcauccccuacugcaacuacuccaaguacugcuaccugaaccacaccacgaccgggaagaccagccugcccaagugcugccugguguccaacggcagcuaccucaacgagacccacuucuccgacgacaucgagcagcaggccgacaacaugaucacggagaugcugcagaaggaguacauggagcggcagggcaagaccccgcuggggcucgucgaccuguucguguucagcaccuccuucuaccugaucagcaucuuccugcaccucgugaagaucccgacccaccgccacaucgucggcaagcccugccccaagccccaccggcugaaccacauggggaucugcuccugcggccuguacaagcagccgggggugcccgugaaguggaagcgcuga

SEQ ID NO: 33189 - RNA, 1476 nt, Artificial Sequence
  derived and/or modified CDS sequence (opt1) from LASV(Josiah;Clade IV)__NP_694870__GPCmut8
augggccagaucgugaccuucuuccaggaggucccccacgugaucgaggaggugaugaacaucguccugaucgcccucagcgugcuggccgugcugaaggggcucuacaacuucgcgaccugcggccuggucgggcuggugacguuccuccugcugugcggccgcuccugcaccaccagccucuacaaggggguguacgagcugcagacccuggagcucaacauggagacgcugaacaugugcaugccgcuguccugcaccaagaacaacagccaccacuacaucauggucggcaacgagaccggccucgagcugacccugacgaacaccuccaucaucaaccacaaguucugcaaccucagcgacgcccacaagaagaaccuguacgaccacgcccugauguccaucaucagcaccuuccaccucuccauccccaacuucaaccaguacgaggccaugagcugcgacuucaacgggggcaagaucuccgugcaguacaaccugagccacuccuacgccggggacgcggccaaccacugcggcaccguggccaacgggguccugcagacguucaugcggauggccuggggcggcagcuacaucgcgcucgacuccgggcgcggcaacugggacugcaucaugaccagcuaccaguaccugaucauccagaacaccaccugggaggaccacugccaguucucccggcccagccccaucggguaccugggccuccugucccagcgcacgcgggacaucuacaucagccgccggcugcucggcaccuucaccuggacccugagcgacuccgaggggaaggacacgccgggcggguacugccugacccgcuggaugcucaucgaggccgagcugaagugcuucggcaacaccgccguggccaagugcaacgagaagcacgacgaggaguucugcgacaugcugcggcuguucgacuucugcaagcaggccauccagcgccugaaggcgcccgcccagaugagcauccagcugaucaacaaggccgugaacgcccucaucaacgaccagcugaucaugaagaaccaccuccgggacaucauggggauccccuacugcaacuacuccaaguacugcuaccucaaccacaccacgaccggccgcaccagccugcccaagugcugccuggucuccaacggcagcuaccucaacgagacccacuucuccgacgacaucgagcagcaggccgacaacaugaucacggagaugcugcagaaggaguacauggagcggcaggggaagaccccgcugggccugguggaccucuucguguucagcaccuccuucuaccugaucagcaucuuccugcaccucgucaagauccccacccaccgccacaucguggggaaguccugccccaagccccaccggcugaaccacaugggcaucugcagcugcgggcuguacaagcagccgggcgugcccgucaaguggaagcgcuga

SEQ ID NO: 33190 - RNA, 1473 nt, Artificial Sequence
  derived and/or modified CDS sequence (opt1) from LASV(LP;Clade I)__AAF86701__GPCmut8
augggccagaucaucaccuucuuccaggaggugccccacgucaucgaggaggugaugaacaucgugcugaucgcccucagccugcuggccauccucaaggggcuguacaacaucgcgaccugcggcaucaucgggcuggucgccuuccucuuccugugcggcaaguccugcagccugacgcucaagggcggguacgagcugcagacccuggagcucaacauggagacccugaacaugugcaugccgcuguccugcaccaagaacagcucccaccacuacauccgcgugggcaacgagacggggcucgagcugacccugaccaacaccagcaucaucaaccacaaguucugcaaccucuccgacgcccacaagaagaaccuguacgaccacgcccugaugagcaucaucuccacguuccaccucagcauccccaacuucaaccaguacgaggccauguccugcgacuucaacggcgggaagaucagcgugcaguacaaccugucccacagcuacgcgggcgacgccgccgagcacugcgggaccgucgccaacggcgugcugcagaccuucaugcggauggcguggggcgggcgcuacaucgcccucgacuccggcaaggggaacugggacugcaucaugaccagcuaccaguaccugaucauccagaacacgaccugggaggaccacugccaguucucccggcccagccccaucggcuaccugggccuccugucccagcgcacccgggacaucuacaucagccgccggcugcucgggaccuucacguggacccugagcgacuccgagggcaacgagacccccgggggcuacugccugacccgcuggaugcucaucgaggccgagcugaagugcuucgggaacacggccguggccaagugcaacgagaagcacgacgaggaguucugcgacaugcugcggcuguucgacuucugcaagcaggcgauccgccggcugaaggccccggcccagaugagcauccagcugaucaacaaggccgucaacgcccucaucaacgaccagcugaucaugaagaaccaccuccgcgacaucaugggcauccccuacugcaacuacuccaaguacugcuaccucaaccacaccagcuccggccggaccagccugcccaagugcugccugaucuccaacgggagcuaccucaacgagacccaguucuccgacgacaucgagcagcaggcggacaacaugaucacggagaugcugcagaaggaguacaucgagcgccagggcaagaccccgcuggggcugguggacaucuucaucuucagcaccuccuucuaccucaucagcaucuuccugcaccugaucaagauccccacccaccggcacaucgugggcaagcccugccccaagccgcaccgccucaaccacaugggggucugcuccugcggccuguacaagcaccccggcgugcccacgaaguggaagcgguga

SEQ ID NO: 33191 - RNA, 1473 nt, Artificial Sequence
  derived and/or modified CDS sequence (opt1) from LASV(803213;Clade II)__AAF86703__GPCmut8
augggccagaucaucaccuucuuccaggaggugccccacgucaucgaggaggugaugaacaucgugcugaucgcccucagccugcuggccauccucaaggggaucuacaacgucgcgaccugcggccuguucgggcugaucuccuuccuccugcugugcggccgcagcugcuccgugacguacaaggggguguacgagcuccagacccuggagcugaacauggccaaccucaacaugugcaugccgcugagcugcaccaagaacaacucccaccacuacaucauggucggcaacgagaccggccuggagcucacgcugaccaacaccagcaucaucaaccacaaguucugcaaccuguccgacgcccacaagaagaaccucuacgaccacgcccugaugagcaucaucuccaccuuccaccugagcauccccaacuucaaccaguacgaggccauguccugcgacuucaacgggggcaagaucagcgugcaguacaaccucucccacagcuucgcgguggacgccgccaaccacugcgggacgaucgccaacggcguccugcagaccuucaugcggauggcguggggcggguccuacaucgcccuggacagcggcaaggggaacugggacugcaucaugaccuccuaccaguaccucaucauccagaacaccacgugggaggaccacugccaguucagccgccccucccccaucggcuaccuggggcugcucagccagcggacccgcgacaucuacaucagccggcgccugcugggcaccuucaccuggacgcucuccgacagcgagggcaacgaggcccccgggggcuacugccugacccgguggaugcugaucgaggccgagcucaagugcuucgggaacaccgccguggcgaagugcaacgagaagcacgacgaggaguucugcgacaugcugcgccuguucgacuucugcaagcaggccaucaagcggcucaagaccccggcccagauguccauccagcugaucaacaaggccgugaacgcccugaucaacgaccagcucaucaugaagaaccaccuccgcgacaucaugggcauccccuacugcaacuacagccgguacugcuaccugaaccacacggucaccgggaagaccucccugccccgcugcugccuggugagcaacggcuccuaccugaacgagacccacuucagcgacgacaucgagcagcaggcggacaacaugaucacggagaugcuccagaaggaguacauggaccggcagggcaagaccccgcuggggcugguggaccuguucgucuucuccaccagcuucuaccucaucuccaucuuccugcaccuggugaagauccccacccaccgccacaucgugggcaagcccugccccaagccgcaccggcucaaccacauggggaucugcagcugcggccuguacaagcaccccgggguccccgugaaguggaagcgcuga

SEQ ID NO: 33192 - RNA, 1473 nt, Artificial Sequence
  derived and/or modified CDS sequence (opt1) from LASV(GA391;Clade III)__CAA36645__GPCmut8
augggccagaucgugaccuucuuccaggaggucccccacgugaucgaggaggugaugaacaucguccugaucgcccucagcauccuggccauccugaaggggcucuacaacguggcgaccugcggccugaucgggcuggugacguuccuccugcuguccggccgcagcugcucccucaucuacaaggggaccuacgagcugcagacccuggagcucaacauggagacccugaacaugugcaugccgcugagcugcacgaagaacaacucccaccacuacauccgggucggcaacgagaccggccucgagcugacccugaccaacacgagcauccucaaccacaaguucugcaaccuguccgacgcccacaagcgcaaccuguacgaccacagccucauguccaucaucagcaccuuccaccuguccauccccaacuucaaccaguacgaggccaugagcugcgacuucaacgggggcaagaucaccgugcaguacaaccugucccacagcuucgccguggacgccgcggggcacugcggcacccucgccaacgggguccugcagacguucaugcggauggccuggggcggcuccuacaucgcccuggacagcgggcgcggcaacugggacugcaucaugaccuccuaccaguaccucaucauccagaacaccaccugggacgaccacugccaguucagccggcccucccccaucggguaccugggccugcucagccagcgcacgcgggacaucuacaucagccgccggcugcugggcaccuucaccuggacccucuccgacagcgaggggaacgagacgccgggcggguacugccugacccgcuggaugcugaucgaggcggagcucaagugcuucggcaacaccgccguggccaagugcaacgagaagcacgacgaggaguucugcgacaugcugcggcuguucgacuucugcaagcaggccauccgccggcucaagacccccgcccagauguccauccagcugaucaacaaggcggugaacgcccugaucaacgaccagcucaucaugaagaaccaccuccgcgacaucauggggauccccuacugcaacuacagccgguacugcuaccugaaccacacguccaccggcaagaccagccugccccgcugcugccugaucuccaacggcagcuaccugaacgagaccaaguucuccgacgacaucgagcagcaggccgacaacaugaucacggagaugcugcagaaggaguacaucgaccggcaggggaagaccccgcucggccuggucgaccuguucguguucagcaccuccuucuaccucaucagcaucuuccugcaccuggugaagauccccacccaccgccacaucgucgggaagcccugccccaagccgcaccggcucaaccacaugggcaucugcuccugcgggcuguacaagcagcccggcgugcccgugcgcuggaagcgguga

SEQ ID NO: 33193 - RNA, 1476 nt, Artificial Sequence
  derived and/or modified CDS sequence (opt1) from LASV(AV;Clade V)__CCA30314__GPCmut8
augggccagaucgugaccuucuuccaggaggucccccacgugaucgaggaggugaugaacaucguccugaucgcccucagcauccuggccgugcugaaggggcucuacaacaucgcgaccugcggccugaucgggcugaucacguuccuccugcugugcggccgcuccugcagcuccaaccucuacaaggggguguacgagcugcagagccuggaccucaacauggagacccugaacaugugcaugccgcuguccugcaccaagaacaacagccaccacuacauccgggucggcaacgacaccggccucgagcugacgcugaccaacaccuccauccucaaccacaaguucugcaaccugagcgacgcccacaagaaggaccuguacgaccacgcccucauguccaucaucagcaccuuccaccuguccauccccaacuucaaccaguacgaggccaugagcugcgacuucaacgggggcaagaucuccgugcaguacaaccugagccacuccuacgccaucgacgcggccaaccacugcgggacgguggccaacggcauccuccagaccuucaugcgcauggccuggggcgggagcuacaucgcgcuggacuccggccgggggaacugggacugcaucaugaccagcuaccaguaccugaucauccagaacaccacgugggagaaccacugccaguucucccgccccagccccaucggcuaccucgggcugcugagccagcggacccgcgacaucuacaucucccggcgccuccugggcaccuucaccuggacgcugagcgacuccgagggcaacgccacccccgggggcuacugccucacccgguggaugcugaucgaggccgagcugaagugcuucgggaacaccgccgucgccaagugcaacgagaagcacgacgaggaguucugcgacaugcuccgccuguucgacuucugcaagcaggcgaucagccggcugaaguccccggcccagaugagcauccagcucaucaacaaggccgugaacgcccugaucaacgaccagcugaucaugaagaaccaccuccgcgacaucaugggcauccccuacugcaacuacuccaaguacugcuaccugaaccacacgaucaccgggaagaccagccugcccaagugcugccucguguccaacggcagcuaccugaacgagacccacuucuccgacgacaucgagcagcaggccgacaacaugaucacggagaugcugcagaaggaguacauggagcggcagggcaagaccccgcuggggcucgucgaccuguucguguucagcaccuccuucuaccugaucagcaucuuccuccgccuggugaagauccccacccaccggcacaucgucggcaagcccugccccaagccgcaccgccugaaccacauggggaucugcuccugcggccucuacaagcagcccggggugcccgugcgguggaagcgcuga

SEQ ID NO: 33194 - RNA, 1473 nt, Artificial Sequence
  derived and/or modified CDS sequence (opt1) from LASV(Togo/2016/7082;Clade VI)__AMR44577__GPCmut8
augggccagaucaucaccuucuuccaggaggugccccacgucaucgaggaggugaugaacaucgugcugaucgcccucagccugcuggccauccucaagggggucuacaacguggcgaccugcggcaucaucgggcuggugacguuccuguuccucugcggccgcuccugcagccugaucuacaagggguccuacgagcugcagacccucgagcugaacauggagacccugaacaugugcaugccgcucagcugcaccaagaacuccagccaccacuacauccgggucggcaacgagacgggccuggagcugacccucaccaacaccuccaucaucaaccacaaguucugcaaccugagcgacgcccacaagcgcaaccuguacgaccacgcccucauguccauccugagcacguuccaccuguccauccccaacuucaaccaguacgaggccaugagcugcgacuucaacgggggcaagaucuccgugcaguacaaccucagccacgccuacgcgguggacgccgccgagcacugcgggaccgucgccaacggcgugcugcagaccuucaugcggauggcguggggcggguccuacaucgcccuggacagcggccgcgggaacugggacugcaucaugaccuccuaccaguaccucaucauccagaacacgaccugggaggaccacugccaguucagccggcccucccccaucggcuaccuggggcugcucagccagcgcacccgggacaucuacaucagccgccggcugcugggcaccuucacguggacccucuccgacagcgagggcaacgagacccccgggggcuacugccugacccgcuggaugcugaucgaggccgagcucaagugcuucgggaacacggccguggccaagugcaacgagaagcacgacgaggaguucugcgacaugcugcggcuguucgacuucugcaagcaggcgauccagcgccucaaguccccggcccagaugagcauccagcugaucaacaaggccgucaacgcccugaucaacgaccagcucaucaugaagaaccaccuccgggacaugaugggcauccccuacugcaacuacuccaaguacugcuaccugaaccacaccagcuccgggcgcaccagccugcccaagugcugccugguguccaacggcagcuaccugaacgagacccacuucuccgacgacaucgagcagcaggccgacaacaugaucacggagaugcuccagaaggaguacaucgaccggcagggcaagaccccgcuggggcugguggaccuguucgucuucagcaccuccuucuaccucaucagcaucuuccugcaccugaucaagauccccacccaccgccacaucgugggcaagcccugccccaagccgcaccggcucaaccacauggggaucugcuccugcggccuguacaagcagcccggggugcccacgcgcuggaagcgguga

SEQ ID NO: 33195 - RNA, 1473 nt, Artificial Sequence
  derived and/or modified CDS sequence (opt1) from LASV(KAK-428;Clade n.d. (VII))__ANH09740__GPCmut8
augggccagaucgugaccuucuuccaggaggucccccacgugaucgaggaggugaugaacaucguccugaucgcccucagccugcuggccauccucaaggggcuguacaacuucgcgaccugcggcgugaucgggcugaucacguuccuccugcugugcggccgcuccugcagcgccaccuacaaggggcaguacgagcuccagacccuggagcugaacauggagucccucaacaugugcaugccgcugagcugcaccaagaacaacucccaccacuacauccgggccggcaacaacacgggccuggagcucacccugaccaacaccagcaucaucucccacaaguucugcaaccugagcgacgcccacaagaagaaccucuacgaccacacgcugauguccaucaucaccaccuuccaccugagcauccccaacuucaaccaguacgaggccauguccugcgacuucaacgggggcaagaucagcauccaguacaaccucucccacagcuacgcgggggacgccgcccagcacugcggcaccguggccaacgggguccugcagacguucaugcgcauggcguggggcggcuccuaccuggcccucgacagcgggcggcgcggcugggacugcaucaucuccagcuaccaguaccugaucauccagaacaccaccugggacgaccacugccaguucucccggcccagccccaucggguaccugggcuucgugagccagaagacccgcgacaucuacaucucccggcgccuccugggcacguucaccuggacccugagcgacuccgaggggcacgacaugccgggcggguacugccucacccgguggaugcugaucgaggccgaccugaagugcuucggcaacacggccguggccaagugcaacgagaagcacgacgaggaguucugcgacauguggcgccucuucgacuucugcaagcaggcgauccagcggcugaaggcccccgcccagaugaacauccagcugaucaacaaggccgucaacgcccucaucaacgaccagcugaugaugaagaaccaccuccgcgacaucauggggauccccuacugcaacuacagcaaguucugcuaccugaacaacaccaccaccggccggacgucccugccccgcugcugccugaucagcaacggcuccuaccucaacgagacccacuucagcgacgacaucgagcagcaggcggacaacaugaucaccgagaugcugcagaaggaguacauggaccggcaggggaagaccccgcugggccucguggaccuguucguguucuccacgagcuucuaccugaucaccaucuuccugcaccucgucaagauccccacccaccgccacaucguggggaagcccugccccaagccgcaccggcugaaccacaugggcaucugcuccugcgggcuguacaagcagcccggcgugcccguccgcuggaagcgguga

SEQ ID NO: 33196 - RNA, 1473 nt, Artificial Sequence; identical to SEQ ID NO: 33190
  derived and/or modified CDS sequence (opt1) from LASV(Pinneo-NIG-1969;Clade I)__AIT17836__GPCmut8

SEQ ID NO: 33197 - RNA, 1473 nt, Artificial Sequence
  derived and/or modified CDS sequence (opt1) from LASV(ISTH0009-NIG-2011;Clade II)__AIT17404__GPCmut8
augggccagaucaucaccuucuuccaggaggugccccacgucaucgaggaggugaugaacaucgugcugaucgcccucagccugcuggccauccucaaggggaucuacaacgucgcgaccugcggccuguucgggcugguguccuuccuccugcugugcggccgcagcugcuccacgaccuacaaggggguguacgagcuccagacccuggagcuggacauggccagccucaacaugugcaugccgcuguccugcaccaagaacaacagccaccacuacaucauggucggcaacgagacgggccuggagcucacccugaccaacaccuccaucaucaaccacaaguucugcaaccugagcgacgcccacaagaagaaccucuacgaccacgcccugauguccaucaucagcacguuccaccuguccauccccaacuucaaccaguacgaggccaugagcugcgacuucaacgggggcaagaucuccgugcaguacaaccucagccacgcguacgccguggacgccgccaaccacugcgggaccaucgcgaacggcguccugcagaccuucaugcggauggccuggggcggguccuacaucgcccuggacagcggcaagggguccugggacugcaucaugaccagcuaccaguaccucaucauccagaacacgaccugggaggaccacugccaguucucccgccccagccccaucggcuaccuggggcugcucagccagcggacccgcgacaucuacaucucccggcgccugcugggcaccuucacguggacccucagcgacuccgagggcaacgagacccccgggggcuacugccugacccgguggaugcugaucgaggccgagcucaagugcuucgggaacacggccguggcgaagugcaacgagaagcacgacgaggaguucugcgacaugcugcgccuguucgacuucugcaagcaggccauccggcgccucaagaccccggcccagaugagcauccagcugaucaacaaggccgugaacgcccugaucaacgaccagcucaucaugaagaaccaccuccgggacaucaugggcauccccuacugcaacuacuccaaguacugcuaccugaaccacaccgucaccgggaagacgagccugccccgcugcugccugguguccaacggcagcuaccugaacgagacccacuucuccgacgacaucgagcagcaggcggacaacaugaucaccgagcuccugcagaaggaguacauggaccggcagggcaagaccccgcuggggcugguggaccucuucgucuucagcacguccuucuaccugaucagcaucuuccugcaccucaucaagauccccacccaccgccacaucaccggcaagcccugccccaagccgcaccggcugaaccacauggggaucugcuccugcggccuguacaagcaccccggggugcccgugaaguggaagcgcuga

SEQ ID NO: 33198 - RNA, 1473 nt, Artificial Sequence
  derived and/or modified CDS sequence (opt1) from LASV(ISTH2010-NIG-2012;Clade II)__AIT17482__GPCmut8
augggccagaucaucaccuucuuccaggaggugccccacgucaucgaggaggugaugaacaucgugcugaucgcccucagccugcuggccauccucaaggggaucuacaacgucgcgaccugcggccuguucgggcugguguccuuccuccugcugugcggccgcagcugcuccacgaccuacaaggggguguacgagcuccagacccuggagcuggacauggccagccucaacaugugcaugccgcuguccugcaccaagaacaacagccaccacuacaucauggucggcaacgagacgggccuggagcucacccugaccaacaccuccaucaucaaccacaaguucugcaaccugagcgacgcccacaagaagaaccucuacgaccacgcccugauguccaucaucagcacguuccaccuguccauccccaacuucaaccaguacgaggccaugagcugcgacuucaacgggggcaagaucuccgugcaguacaaccucagccacgcguacgccguggacgccgccaaccacugcgggaccaucgcgaacggcguccugcagaccuucaugcggauggccuggggcggguccuacaucgcccuggacagcggcaagggguccugggacugcaucaugaccagcuaccaguaccucaucauccagaacaucacgugggaggaccacugccaguucucccgccccagccccaucggcuaccuggggcugcucagccagcggacccgcgacaucuacaucucccggcgccugcugggcaccuucaccuggacgcucagcgacuccgagggcaacgagacccccgggggcuacugccugacccgguggaugcugaucgaggccgagcucaagugcuucgggaacaccgccguggcgaagugcaacgagaagcacgacgaggaguucugcgacaugcugcgccuguucgacuucugcaagcaggccauccggcgccucaagacgccggcccagaugagcauccagcugaucaacaaggccgugaacgcccugaucaacgaccagcucaucaugaagaaccaccuccgggacaucaugggcauccccuacugcaacuacuccaaguacugcuaccugaaccacaccgucaccgggaagaccagccugccccgcugcugccugguguccaacggcagcuaccugaacgagacgcacuucuccgacgacaucgagcagcaggcggacaacaugaucaccgagcuccugcagaaggaguacaucgaccggcagggcaagaccccgcuggggcugguggaccucuucgucuucagcaccuccuucuaccugaucagcaucuuccugcaccucgugaagauccccacgcaccgccacguggucggcaagcccugccccaagccgcaccggcugaaccacauggggaucugcuccugcggccuguacaagcaccccggggugcccgugaaguggaagcgcuga

SEQ ID NO: 33199 - RNA, 1473 nt, Artificial Sequence
  derived and/or modified CDS sequence (opt1) from LASV(Lassa virus/H.sapiens-wt/NGA/2015/ISTH_0543;Clade II)__AVO03639__GPCmut8
augggccagaucaucaccuucuuccaggaggugccccacgucaucgaggaggugaugaacaucgugcugaucgcccucagccugcuggccauccucaaggggaucuacaacgucgcgaccugcggccuguucgggcugguguccuuccuccugcugugcggccgcagcugcuccacgaccuacaaggggguguacgagcuccagacccuggagcuggacauggccaaccucaacaugugcaugccgcugagcugcaccaagaacaacucccaccacuacaucauggucggcaacgagacgggccuggagcucacccugaccaacaccagcaucaucaaccacaaguucugcaaccuguccgacgcccacaagaagaaccucuacgaccacgcccugaugagcaucaucuccacguuccaccugagcauccccaacuucaaccaguacgaggccauguccugcgacuucaacgggggcaagaucagcgugcaguacaaccucucccacaccuacgcgguggacgccgccaaccacugcgggaccaucgccaacggcguccugcagaccuucaugcggauggcguggggcgggagcuacaucgcccuggacuccggcaaggggagcugggacugcaucaugacguccuaccaguaccucgugauccagaacaccaccugggaggaccacugccaguucagccgccccucccccaucggcuaccuggggcugcucagccagcggacccgcgacaucuacaucagccggcgccugcugggcacguucaccuggacccucuccgacagcgagggcaacgagacccccgggggcuacugccugacgcgguggaugcugaucgaggccgagcucaagugcuucgggaacaccgccguggccaagugcaacgagaagcacgacgaggaguucugcgacaugcugcgccuguucgacuucugcaagcaggcgauccggcgccucaagaccccggcccagauguccauccagcugaucaacaaggccgucaacgcccugaucaacgaccagcucaucaugaagaaccaccuccgggacaucaugggcauccccuacugcaacuacagcaaguacugcuaccugaaccacaccgugacggggaagaccucccugccccgcugcugccuggugagcaacggcuccuaccugaacgagacccacuucagcgacgacaucgagcagcaggccgacaacaugaucaccgagcuccugcagaaggaguacaucgaccggcagggcaagacgccgcuggggcuggucgaccucuucguguucuccaccagcuucuaccugaucuccaucuuccugcaccucgugaagauccccacccaccgccacaucaccggcaagcccugccccaagccgcaccggcugaaccacauggggaucugcagcugcggccuguacaagcaccccgggguccccgugaaguggaagcgcuga

SEQ ID NO: 33200 - RNA, 1473 nt, Artificial Sequence
  derived and/or modified CDS sequence (opt1) from LASV(Lassa virus/H.sapiens-wt/NGA/2016/ISTH_0009;Clade II)__AVO03571__GPCmut8
augggccagaucaucaccuucuuccaggaggugccccacgucaucgaggaggugaugaacaucgugcugaucgcccucagccugcuggccauccucaaggggaucuacaacgucgcgaccugcggccugcuggggcucguguccuuccugcugcucugcggccgcagcugcuccacgaccuacaaggggguguacgagcugcagacccuggagcucgacauggccagccugaacaugugcaugccgcuguccugcaccaagaacaacagccaccacuacaucauggucggcaacgagacgggccucgagcugacccugaccaacaccuccaucaucaaccacaaguucugcaaccucagcgacgcccacaagaagaaccuguacgaccacgcccugauguccaucaucagcacguuccaccucuccauccccaacuucaaccaguacgaggccaugagcugcgacuucaacgggggccggaucuccgugcaguacaaccugagccacuccuacgcgguggacgccgccaaccacugcgggaccaucgccaacggcguccugcagaccuucaugcgcauggcguggggcgggagcuacaucgcccucgacuccggcaaggggagcugggacugcaucaugaccuccuaccaguaccugaucauccagaacacgaccugggaggaccacugccaguucagccggcccagccccaucggcuaccuggggcuccugucccagcgcacccgggacaucuacaucagccgccggcugcucggcaccuucacguggacccuguccgacagcgagggcaacgagacccccgggggcuacugccugacccgcuggaugcucaucgaggccgagcugaagugcuucgggaacacggccguggccaagugcaacgagaagcacgacgaggaguucugcgacaugcugcggcuguucgacuucugcaagcaggcgauccgccggcugaagaccccggcccagauguccauccagcugaucaacaaggccgugaacgcccucaucaacgaccagcugaucaugaagaaccaccuccgcgacaucaugggcauccccuacugcaacuacagcaaguacugcuaccucaaccacaccgucaccgggaagacgucccugccccggugcugccuggugagcaacggcuccuaccucaacgagacccacuucagcgacgacaucgagcagcaggccgacaacaugaucaccgagcugcugcagaaggaguacaucgaccgccagggcaagaccccgcuggggcucguggaccuguucgucuucuccacgagcuucuaccugaucuccaucuuccuccaccuggugaagauccccacccaccggcacaucaccggcaagcccugccccaagccgcaccgccugaaccacauggggaucugcagcugcggccucuacaaccaccccggggugcccgucaaguggaagcgguga

SEQ ID NO: 33201 - RNA, 1473 nt, Artificial Sequence
  derived and/or modified CDS sequence (opt1) from LASV(Lassa virus/H.sapiens-wt/NGA/2016/ISTH_0017;Clade II)__AVO03567__GPCmut8
augggccagaucaucaccuucuuccaggaggugccccacgucaucgaggaggugaugaacaucgugcugaucgcccucagccugcuggccauccucaaggggaucuacaacgucgcgaccugcggccuguucgggcugguguccuuccuccugcugugcggccgcagcugcuccacgaccuacaaggggguguacgagcuccagacccuggagcuggacauggccagccucaacaugugcaugccgcuguccugcaccaagaacaacagccaccacuacaucauggucggcaacgagacgggccuggagcucacccugaccaacaccuccaucaucaaccacaaguucugcaaccugagcgacgcccacaagaagaaccucuacgaccacgcccugauguccaucaucagcacguuccaccuguccauccccaacuucaaccaguacgaggccaugagcugcgacuucaacgggggcaagaucuccgugcaguacaaccucagccacaccuacgcgaucgacgccgccaaccacugcgggaccaucgccaacggcgugcugcagaccuucaugcggauggcguggggcggguccuacaucgcccuggacagcggcaagggguccugggacugcaucaugacgagcuaccaguaccucaucauccagaacaccaccugggaggaccacugccaguucucccgccccagccccaucggcuaccuggggcugcucagccagcggacccgcgacaucuacaucucccggcgccugcugggcacguucaccuggacccucagcgacuccgagggcaacgagacccccgggggcuacugccugacgcgguggaugcugaucgaggccgagcucaagugcuucgggaacaccgccgucgccaagugcaacgagaagcacgacgaggaguucugcgacaugcugcgccuguucgacuucugcaagcaggcgauccggcgccucaagaccccggcccagaugagcauccagcugaucaacaaggccgugaacgcccugaucaacgaccagcucaucaugaagaaccaccuccgggacaucaugggcauccccuacugcaacuacuccaaguacugcuaccugaaccacaccgugacggggaagaccagccugccccgcugcugccuggucuccaacggcagcuaccugaacgagacccacuucuccgacgacaucgagcagcaggccgacaacaugaucaccgagcuccugcagaaggaguacauggaccggcagggcaagacgccgcuggggcugguggaccucuucguguucagcaccuccuucuaccugaucagcaucuuccugcaccucguccgcauccccacccaccggcacgugaucggcaagcccugccccaagccgcaccgccugaaccacauggggaucugcuccugcggccuguacaagcaccccggggugcccgucaaguggaagcgguga

SEQ ID NO: 33202 - RNA, 1473 nt, Artificial Sequence
  derived and/or modified CDS sequence (opt1) from LASV(Lassa virus/H.sapiens-wt/NGA/2018/ISTH_0959;Clade II)__AVV65099__GPCmut8
augggccagaucaucaccuucuuccaggaggugccccacgucaucgaggaggugaugaacaucgugcugaucgcccucagccugcuggccauccucaaggggaucuacaacgucgugaccugcggccuguucgggcugguguccuuccuccugcugugcggccgcagcugcuccacgaccuacaagggggucuacgagcuccagacccuggagcuggacauggcgagccucaacaugugcaugccgcuguccugcaccaagaacaacagccaccacuacaucauggugggcaacgagacgggccuggagcucacccugaccaacaccuccaucaucaaccacaaguucugcaaccugagcgacgcccacaagaagaaccucuacgaccacgcccugauguccaucaucagcacguuccaccuguccauccccaacuucaaccaguacgaggccaugagcugcgacuucaacgggggcaagaucuccgugcaguacaaccucagccacgccuacgcgaucgacgccgccaaccacugcgggaccaucgccaacggcguccugcagaccuucaugcggauggcguggggcggguccuacaucgcccuggacagcggcaagggguccugggacugcaucaugaccagcuaccaguaccucaucauccagaacacgaccugggaggaccacugccaguucucccgccccagccccaucggcuaccuggggcugcucagccagcggacccgcgacaucuacaucucccggcgccugcugggcaccuucacguggacccucagcgacuccgagggcaacgagacccccgggggcuacugccugacccgguggaugcugaucgaggccgagcucaagugcuucgggaacacggccguggccaagugcaacgagaagcacgacgaggaguucugcgacaugcugcgccuguucgacuucugcaagcaggcgauccggcgccucaagaccccggcccagaugagcauccagcugaucaacaaggccgugaacgcccugaucaacgaccagcucaucaugaagaaccaccuccgggacaucaugggcauccccuacugcaacuacuccaaguacugcuaccugaaccacaccgucaccgggaagacgagccugccccgcugcugccugguguccaacggcagcuaccugaacgagacccacuucuccgacgacaucgagcagcaggccgacaacaugaucaccgagcuccugcagaaggaguacaucgaccggcagggcaagaccccgcuggggcugguggaccucuucgucuucagcacguccuucuaccugaucagcaucuuccugcaccucgugaagauccccacccaccgccacgugaucggcaagcccugccccaagccgcaccggcugaaccacauggggaucugcuccugcggccuguacaagcaccccgggguccccgugaaguggaagcgcuga

SEQ ID NO: 33203 - RNA, 1473 nt, Artificial Sequence
  derived and/or modified CDS sequence (opt1) from LASV(LASV003-NIG-2008;Clade II)__AIT17580__GPCmut8
augggccagaucaucaccuucuuccaggaggugccccacgucaucgaggaggugaugaacaucgugcugaucgcccucagccugcuggccauccucaaggggaucuacaacgucgcgaccugcggccuguucgggcugguguccuuccuccugcugugcggccgcagcugcuccacgaccuacaaggggguguacgagcuccagacccuggagcuggacauggccagccucaacaugugcaugccgcuguccugcaccaagaacaacagccaccacuacaucauggucggcaacgagacgggccuggagcucacccugaccaacaccuccaucaucaaccacaaguucugcaaccugagcgacgcccacaagaagaaccucuacgaccacgcccugauguccaucaucagcacguuccaccuguccauccccaacuucaaccaguacgaggccaugagcugcgacuucaacgggggcaagaucuccgugcaguacaaccucagccacaccuacgcgguggacgccgccaaccacugcgggaccaucgccaacggcguccugcagaccuucaugcggauggcguggggcggguccuacaucgcccuggacagcggcaagggguccugggacugcaucaugacgagcuaccaguaccucaucauccagaacaccaccugggaggaccacugccaguucucccgccccagccccaucggcuaccuggggcugcucagccagcggacccgcgacaucuacaucucccggcgccugcugggcacguucaccuggacccucagcgacuccgagagcaacgagaccccgggcggguacugccugacgcgguggaugcugaucgaggccgagcucaagugcuucggcaacaccgccguggccaagugcaacgagaagcacgacgaggaguucugcgacaugcugcgccuguucgacuucugcaagcaggcgauccggcgccucaaggcccccgcccagauguccauccagcugaucaacaaggccgugaacgcccugaucaacgaccagcucaucaugaagaaccaccuccgggacaucauggggauccccuacugcaacuacagcaaguacugcuaccugaaccacaccgucaccggccgcacgucccugccccggugcugccuggugagcaacggguccuaccugaacgagacccacuucagcgacgacaucgagcagcaggcggacaacaugaucaccgagcuccugcagaaggaguacauggaccgccagggcaagaccccgcugggccugguggaccucuucgucuucuccacgagcuucuaccugaucuccaucuuccugcaccucgugaagauccccacccaccggcacgugaucgggaagcccugccccaagccgcaccgccugaaccacaugggcaucugcagcugcgggcuguacaagcaccccggcguccccgugaaguggaagcgguga

SEQ ID NO: 33204 - RNA, 1473 nt, Artificial Sequence
  derived and/or modified CDS sequence (opt1) from LASV(LASV035-NIG-2009;Clade II)__AIT17588__GPCmut8
augggccagaucaucaccuucuuccaggaggugccccacgucaucgaggaggugaugaacaucgugcugaucgcccucagccugcuggccauccucaaggggaucuacaacgucgcgaccugcggccuguucgggcugguguccuuccuccugcugugcggccgcagcugcuccacgaccuacaaggggguguacgagcuccagacccuggagcuggacauggccagccucaacaugugcaugccgcuguccugcaccaagaacaacagccaccacuacaucauggucggcaacgagacgggccuggagcucacccugaccaacaccuccaucaucaaccacaaguucugcaaccugagcgacgcccacaagaagaaccucuacgaccacgcccugauguccaucaucagcacguuccaccuguccauccccaacuucaaccaguacgaggccaugagcugcgacuucaacgggggcaagaucuccgugcaguacaaccucagccacgcguacgccguggacgccgccaaccacugcgggaccaucgcgaacggcguccugcagaccuucaugcggauggccuggggcggguccuacaucgcccuggacagcggcaagggguccugggacugcaucaugaccagcuaccaguaccucaucauccagaacacgaccugggaggaccacugccaguucucccgccccagccccaucggcuaccuggggcugcucagccagcggacccgcgacaucuacaucucccggcgccugcugggcaccuucacguggacccucagcgacuccgagggcaacgagacccccgggggcuacugccugacccgguggaugcugaucgaggccgagcucaagugcuucgggaacacggccguggcgaagugcaacgagaagcacgacgaggaguucugcgacaugcugcgccuguucgacuucugcaagcaggccauccggcgccucaaggccccggcccagaugagcauccagcugaucaacaaggccgugaacgcgcugaucaacgaccagcucaucaugaagaaccaccuccgggacaucaugggcauccccuacugcaacuacuccaaguacugcuaccugaaccacaccgucaccgggaagaccagccugccccgcugcugccugguguccaacggcagcuaccugaacgagacgcacuucuccgacgacaucgagcagcaggccgacaacaugaucaccgagcuccugcagaaggaguacaucgaccggcagggcaagaccccgcuggggcugguggaccucuucgucuucagcaccuccuucuaccugaucagcaucuuccugcaccucgugaagauccccacgcaccgccacgugaucggcaagcccugccccaagccgcaccggcugaaccacauggggaucugcuccugcggccuguacaagcaccccgggguccccgugaaguggaagcgcuga

SEQ ID NO: 33205 - RNA, 1473 nt, Artificial Sequence
  derived and/or modified CDS sequence (opt1) from LASV(LASV1000-NIG-2009;Clade II)__AIT17782__GPCmut8
augggccagaucaucaccuucuuccaggaggugccccacgucaucgaggaggugaugaacaucgugcugaucgcccucagccugcuggccauccucaaggggaucuacaacgucgcgaccugcggccuguucgggcugguguccuuccuccugcugugcggccgcagcugcuccacgaccuacaaggggguguacgagcuccagacccuggagcuggacauggccagccucaacaugugcaugccgcuguccugcaccaagaacaacagccaccacuacaucauggucggcaacgagacgggccuggagcucacccugaccaacaccuccaucaucaaccacaaguucugcaaccugagcgacgcccacaagaagaaccucuacgaccacgcccugauguccaucaucagcacguuccaccuguccauccccaacuucaaccaguacgaggccaugagcugcgacuucaacgggggcaagaucuccgugcaguacaaccucagccacaccuacgcgguggacgccgccaaccacugcgggaccaucgccaacggcguccugcagaccuucaugcggauggcguggggcggguccuacaucgcccuggacagcggcaagggguccugggacugcaucaugacgagcuaccaguaccucaucauccagaacaccaccugggaggaccacugccaguucucccgccccagccccaucggcuaccuggggcugcucagccagcggacccgcgacaucuacaucucccggcgccugcugggcacguucaccuggacccucagcgacuccgagggcaacgagacccccgggggcuacugccugacgcgguggaugcugaucgaggccgagcucaagugcuucgggaacaccgccguggccaagugcaacgagaagcacgacgaggaguucugcgacaugcugcgccuguucgacuucugcaagcaggcgaucaagcggcucaagaccccggcccagaugagcauccagcugaucaacaaggccgugaacgcccugaucaacgaccagcucaucaugaagaaccaccuccgcgacaucaugggcauccccuacugcaacuacuccaaguacugcuaccugaaccacaccgucacggggaagaccagccugccccggugcugccugguguccaacggcagcuaccugaacgagacccacuucuccgacgacaucgagcagcaggccgacaacaugaucaccgagcuccugcagaaggaguacaucgaccgccagggcaagacgccgcuggggcugguggaccucuucgucuucagcaccuccuucuaccugaucagcaucuuccugcaccucgugaagauccccacccaccggcacguggucggcaagcccugccccaagccgcaccgccugaaccacauggggaucugcuccugcggccuguacaagcaccccggggugcccgugaaguggaagcgguga

SEQ ID NO: 33206 - RNA, 1473 nt, Artificial Sequence
  derived and/or modified CDS sequence (opt1) from LASV(LASV221-NIG-2010;Clade II)__AIT17624__GPCmut8
augggccagaucaucaccuucuuccaggaggugccccacgucaucgaggaggugaugaacaucgugcugaucgcccucagccugcuggccauccucaaggggaucuacaacgucgcgaccugcggccuguucgggcugguguccuuccuccugcugugcggccgcagcugcuccacgaccuacaaggggguguacgagcuccagacccuggagcuggacauggccagccucaacaugugcaugccgcuguccugcaccaagaacaacagccaccacuacaucauggucggcaacgagacgggccuggagcucacccugaccaacaccuccaucaucaaccacaaguucugcaaccugagcgacgcccacaagaagaaccucuacgaccacgcccugauguccaucaucagcacguuccaccuguccauccccaacuucaaccaguacgaggccaugagcugcgacuucaacgggggcaagaucuccgugcaguacaaccucagccacaccuacgcgaucgacgccgccaaccacugcgggaccaucgccaacggcgugcugcagaccuucaugcggauggcguggggcggguccuacaucgcccuggacagcggcaagggguccugggacugcaucaugacgagcuaccaguaccucaucauccagaacaccaccugggaggaccacugccaguucucccgccccagccccaucggcuaccuggggcugcucagccagcggacccgcgacaucuacaucucccggcgccugcugggcacguucaccuggacccucagcgacuccgagggcaacgagacccccgggggcuacugccugacgcgguggaugcugaucgaggccgagcucaagugcuucgggaacaccgccgucgccaagugcaacgagaagcacgacgaggaguucugcgacaugcugcgccuguucgacuucugcaagcaggcgauccggcgccucaagaccccggcccagaugagcauccagcugaucaacaaggccgugaacgcccugaucaacgaccagcucaucaugaagaaccaccuccgggacaucaugggcauccccuacugcaacuacuccaaguacugcuaccugaaccacaccgugacggggaagaccagccugccccgcugcugccuggucuccaacggcagcuaccugaacgagacccacuucuccgacgacaucgagcagcaggccgacaacaugaucaccgagaugcuccagaaggaguacauggaccggcagggcaagacgccgcuggggcugguggaccuguucguguucagcaccuccuucuaccucaucagcaucuuccugcaccuggucaagauccccacccaccgccacgugaucggcaagcccugccccaagccgcaccggcucaaccacauggggaucugcuccugcggccuguacaagcaccccggggugcccgucaaguggaagcgcuga

SEQ ID NO: 33207 - RNA, 1473 nt, Artificial Sequence
  derived and/or modified CDS sequence (opt1) from LASV(LASV237-NIG-2010;Clade II)__AIT17638__GPCmut8
augggccagaucaucaccuucuuccaggaggugccccacgucaucgaggaggugaugaacaucgugcugaucgcccucagccugcuggccauccucaaggggaucuacaacgucgcgaccugcggccuguucgggcugguguccuuccuccugcugugcggccgcagcugcuccacgaccuacaaggggguguacgagcuccagacccuggagcuggacauggccagccucaacaugugcaugccgcuguccugcaccaagaacaacagccaccacuacaucauggucggcaacgagacgggccuggagcucacccugaccaacaccuccaucaucaaccacaaguucugcaaccugagcgacgcccacaagaaggaccucuacgaccacgcccugauguccaucaucagcacguuccaccuguccauccccaacuucaaccaguacgaggccaugagcugcgacuucaacgggggcaagaucuccgugcaguacaaccucagccacaccuacgcgguggacgccgccaaccacugcgggaccaucgccaacggcguccugcagaccuucaugcggauggcguggggcggguccuacaucgcccuggacagcggcaagggguccugggacugcaucaugacgagcuaccaguaccucaucauccagaacaccaccugggaggaccacugccaguucucccgccccagccccaucggcuaccuggggcugcucagccagcggacccgcgacaucuacaucucccggcgccugcugggcacguucaccuggacccucagcgacuccgagggcaacgagacccccgggggcuacugccugacgcgguggaugcugaucgaggccgagcucaagugcuucgggaacaccgccguggccaagugcaacgagaagcacgacgaggaguucugcgacaugcugcgccuguucgacuucugcaagcaggcgauccggcgccucaagaccccggcccagaugagcauccagcugaucaacaaggccgugaacgcccugaucaacgaccagcucaucaugaagaaccaccuccgggacaucaugggcauccccuacugcaacuacuccaaguacugcuaccugaaccacaccgucacggggaagaccagccugccccgcugcugccugguguccaacggcagcuaccugaacgagacccacuucuccgacgacaucgagcagcaggccgacaacaugaucaccgagcuccugcagaaggaguacauggaccggcagggcaagacgccgcuggggcugguggaccucuucgucuucagcaccuccuucuaccugaucagcaucuuccugcaccucaucaagauccccacccaccgccacaucaccggcaagcccugccccaagccgcaccggcugaaccacauggggaucugcuccugcggccuguacaagcaccccggggugcccgugaaguggaagcgcuga

SEQ ID NO: 33208 - RNA, 1473 nt, Artificial Sequence
  derived and/or modified CDS sequence (opt1) from LASV(LASV253-NIG-2011;Clade II)__AIT17670__GPCmut8
augggccagaucaucaccuucuuccaggaggugccccacgucaucgaggaggugaugaacaucgugcugaucgcccucagccugcuggccauccucaaggggaucuacaacgucgcgaccugcggccuguucgggcugguguccuuccuccugcugugcggccgcagcugcuccacgaccuacaaggggguguacgagcuccagacccuggagcuggacauggccagccucaacaugugcaugccgcuguccugcaccaagaacaacagccaccacuacaucauggucggcaacgagacgggccuggagcucacccugaccaacaccuccaucaucaaccacaaguucugcaaccugagcgacgcccacaagaagaaccucuacgaccacgcccugauguccaucaucagcacguuccaccuguccauccccaacuucaaccaguacgaggccaugagcugcgacuucaacgggggcaagaucuccgugcaguacaaccucagccacaccuacgcgguggacgccgccaaccacugcgggaccaucgccaacggcguccugcagaccuucaugcggauggcguggggcggguccuacaucgcccuggacagcggcaagggguccugggacugcaucaugacgagcuaccaguaccucaucauccagaacaccaccugggaggaccacugccaguucucccgccccagccccaucggcuaccuggggcugcucagccagcggacccgcgacaucuacaucucccggcgccugcugggcacguucaccuggacccucagcgacuccgagggcaacgagacccccgggggcuacugccugacgcgguggaugcugaucgaggccgagcucaagugcuucgggaacaccgccguggccaagugcaacgagaagcacgacgaggaguucugcgacaugcugcgccuguucgacuucugcaagcaggcgauccggcgccucaaggccccggcccagaugagcauccagcugaucaacaaggccgugaacgcccugaucaacgaccagcucaucaugaagaaccaccuccgggacaucaugggcauccccuacugcaacuacuccaaguacugcuaccugaaccacaccgucaccgggcgcacgagccugccccggugcugccugguguccaacggcagcuaccugaacgagacccacuucuccgacgacaucgagcagcaggcggacaacaugaucaccgagcuccugcagaaggaguacaucgaccgccagggcaagaccccgcuggggcugguggaccucuucgucuucagcacguccuucuaccugaucagcaucuuccugcaccucgugaagauccccacccaccggcacaucaucggcaagcccugccccaagccgcaccgccugaaccacauggggaucugcuccugcggccuguacaagcaccccggggugcccgucaaguggaagcgguga

SEQ ID NO: 33209 - RNA, 1473 nt, Artificial Sequence
  derived and/or modified CDS sequence (opt1) from LASV(LASV254-NIG-2011;Clade II)__AIT17674__GPCmut8
augggccagaucaucaccuucuuccaggaggugccccacgucaucgaggaggugaugaacaucgugcugaucgcccucagccugcuggccauccucaaggggaucuacaacgucgcgaccugcggccuguucgggcugguguccuuccuccugcugugcggccgcagcugcuccacgaccuacaaggggguguacgagcuccagacccuggagcuggacaugaccaaccucaacaugugcaugccgcugagcugcacgaagaacaacucccaccacuacaucauggucggcaacgagaccggccuggagcucacccugaccaacacgagcaucaucaaccacaaguucugcaaccuguccgacgcccacaagaagaaccucuacaaccacgcccugaugagcaucaucuccaccuuccaccugagcauccccaacuucaaccaguacgaggccauguccugcgacuucaacgggggcaagaucagcgugcaguacaaccucucccacagcuacgccguggacgcggccaaccacugcgggaccaucgccaacggcguccugcagaccuucaugcggauggccuggggcggguccuacaucgcgcuggacagcggcaaggggaacugggacugcaucaugacguccuaccaguaccucaucauccagaacaccaccugggaggaccacugccaguucagccgccccucccccaucggcuaccuggggcugcucagccagcggacccgcgacaucuacaucagccggcgccugcugggcacguucaccuggacccucuccgacagcgagggcaacgagacccccgggggcuacugccugacgcgguggaugcugaucgaggccgagcucaagugcuucgggaacaccgccguggccaagugcaacgagaagcacgacgaggaguucugcgacaugcugcgccuguucgacuucugcaagcaggccauccggcgccucaagaccccggcgcaggccaacauccagcugaucaacaaggccgugaacgcccugaucaacgaccagcucaucaugaagaaccaccuccgggacaucaugggcauccccuacugcaacuacuccaaguacugcuaccugaaccacaccgucacggggaagaccagccugccccgcugcugccugguguccaacggcagcuaccugaacgagacccacuucuccgacgacaucgagcagcaggccgacaacaugaucaccgagcuccugcagaaggaguacauggaccggcagggcaagacgccgcuggggcugguggaccucuucgucuucagcaccuccuucuaccugaucagcaucuuccugcaccucgugaagauccccacccaccgccacgugaucggcaagcccugccccaagccgcaccggcugaaccacauggggaucugcuccugcggccuguacaagcaccccgggguccccgugaaguggaagcgcuga

SEQ ID NO: 33210 - RNA, 1473 nt, Artificial Sequence
  derived and/or modified CDS sequence (opt1) from LASV(Nig08-A19;Clade III)__ADU56618__GPCmut8
augggccagaucgugaccuucuuccaggaggucccccacgugaucgaggaggugaugaacaucguccugaucgcccucagcauccuggccauccugaaggggcucuacaacaucgcgaccugcggccugaucgggcuggugacguuccuccugcuguccggccgcagcugcuccaugaccuacaaggggguguacgagcuccagacccuggagcugaacaugaacacccucaacaugugcaugccgcugagcugcacgaagaacaacucccaccacuacaucauggucggcaacgagaccggccuggagcucacccugaccaacacgagccugcuccaccacaaguucugcaaccuguccgacgcccacaagaagaaccuguacgaccacacccucaugagcaucaucuccaccuuccaccugagcauccccaacuucaaccaguacgaggccauguccugcgacuucaacgggggcaagaucaccgugcaguacaaccugagccacuccuacgccaucgacgccgcgaaccacugcgggacgguggccaacggcguccuccagaccuucaugcggauggccuggggcgggagcuacaucgcccuggacuccggccgcgggaagugggacugcaucaugaccagcuaccaguaccugaucauccagaacaccacgugggaggaccacugccaguucucccggcccagccccaucggcuaccucgggcugcugucccagcgcacccgggacaucuacaucagccgccggcuccugggcaccuucaccuggacgcugagcgacuccgagggcaacgagacccccgggggcuacugccucacccgcuggaugcugaucgaggcggagcugaagugcuucgggaacaccgccguggccaagugcaacgagaagcacgacgaggaguucugcgacaugcuccggcuguucgacuucugcaagcaggccauccgccggcugaaggccccggcgcagaugagcauccagcucaucaacaaggccgugaacgcccugaucaacgaccagcugaucaugaagaaccaccuccgcgacaucaugggcauccccuacugcaacuacuccaaguacugcuaccugaaccacacgagcaccgggcggaccucccugccccgcugcugccucgucagcaacggcuccuaccugaacgagacccacuucagcgacgacaucgagcagcaggccgacaacaugaucacggagaugcugcagaaggaguaccuggaccggcagggcaagaccccgcucgggcugguggaccuguucguguucuccaccagcuucuaccucaucuccaucuuccugcaccuggucaagauccccacccaccgccacaucgugggcaagcccugccccaagccgcaccggcucaaccacauggggaucugcagcugcggccuguacaagcagcccggggugcccguccgcuggaagcgguga

SEQ ID NO: 33211 - RNA, 1476 nt, Artificial Sequence
  derived and/or modified CDS sequence (opt1) from LASV(G1180-SLE-2010;Clade IV)__AIT17168__GPCmut8
augggccagaucgugaccuucuuccaggaggucccccacgugaucgaggaggugaugaacaucguccugaucgcccucagcauccuggccgugcugaaggggcucuacaacuucgcgaccugcggccugguggggcugcucacguuccugcugcucugcggccgcuccugcaccgccagccgguacaagggggucuacgagcugcagacccuggagcucaacauggagacccugaacaugugcaugccgcuguccugcacgaagaacaacagccaccacuacaucauggugggcaacgagaccggccucgagcugacccugaccaacacguccaucaucaaccacaaguucugcaaccucagcgacgcccacaagaagaaccuguacgaccacgcccugauguccaucaucagcaccuuccaccucuccauccccaacuucaaccaguacgaggccaugagcugcgacuucaacgggggcaagaucuccgugcaguacaaccugagccacuccuacgcgggggacgccgccaaccacugcggcaccgucgccaacggggugcugcagaccuucaugcgcauggcguggggcggcagcuacaucgcccucgacuccgggcacggcagcugggacugcaucaugacguccuaccaguaccugaucauccagaacaccaccugggaggaccacugccaguucagccggcccucccccaucggguaccugggccuccugagccagcgcacccgggacaucuacaucagccgccggcugcucggcacguucaccuggacccuguccgacagcgaggggaaggacaccccgggcggguacugccugacgcgcuggaugcucaucgaggccgagcugaagugcuucggcaacaccgccguggccaagugcaacgagaagcacgacgaggaguucugcgacaugcugcggcuguucgacuucugcaagcaggcgauccagcgccugaaggcccccgcccagauguccauccagcugaucaacaaggccgucaacgcccucaucaacgaccagcugaucaugaagaaccaccuccgggacaucauggggauccccuacugcaacuacagcaaguacugcuaccucaaccacaccaccacgggcaagaccucccugcccaagugcugccuggugagcaacggcuccuaccucaacgagacccacuucagcgacgacaucgagcagcaggcggacaacaugaucaccgagaugcugcagaaggaguacauggagcgccaggggaagacgccgcugggccugguggaccucuucgucuucuccaccagcuucuaccugaucuccaucuuccugcaccucgugaagauccccacccaccggcacaucgugggcaagagcugccccaagccccaccgccugaaccacauggggaucugcuccugcgggcuguacaagcagccgggcguccccgugaaguggaagcgguga

SEQ ID NO: 33212 - RNA, 1476 nt, Artificial Sequence
  derived and/or modified CDS sequence (opt1) from LASV(G1442-SLE-2011;Clade IV)__AIT17180__GPCmut8
augggccagaucgugaccuucuuccaggaggucccccacgugaucgaggaggugaugaacaucguccugaucgcccucagcauccuggccgugcugaaggggcucuacaacguggcgaccugcggccugaucgggcuggucacguuccuccugcugugcggccgcuccugcaccaccacccucuacaaggggguguacgagcugcagacgcuggagcucaacauggagacccugaacaugugcaugccgcugagcugcaccaagaacaacucccaccacuacauccgggugggcaacgagaccggccucgagcugacgcugaccaacaccagcaucaucaaccacaaguucugcaaccucuccgacgcccacaagaagaaccuguacgaccacgcccugaugagcaucaucuccaccuuccaccucagcauccccaacuucaaccaguacgaggccauguccugcgacuucaacgggggcaagaucagcguccaguacaaccugucccacagcuacgccggggacgcggccaaccacugcggcacgguggccaacggggugcugcagaccuucaugcgcauggccuggggcggcuccuacaucgcgcucgacagcgggcggggcaacugggacugcaucaugaccuccuaccaguaccugaucauccagaacaccacgugggacgaccacugccaguucagccgccccucccccaucggguaccugggccuccugagccagcggacccgcgacgucuacaucucccggcgccugcucggcaccuucaccuggacgcugagcgacagcgaggggaaggacaccccgggcggguacugccugacccgguggaugcucaucgaggccgagcugaagugcuucggcaacaccgccguggccaagugcaacgagaagcacgacgaggaguucugcgacaugcugcgccucuucgacuucugcaagcaggccauccagcggcugaaggcgcccgcccagauguccauccagcugaucaacaaggccgugaacgcccucaucaacgaccagcugaucaugaagaaccaccuccgcgacaucauggggauccccuacugcaacuacagcaaguacugcuaccugaacaacacggccaccggcaagaccucccugcccaagugcugccugaucagcaacggcuccuaccucaacgagacccacuucagcgacgacaucgagcaggaggcggacaacaugaucacggagaugcugcagaaggaguacauggagcggcaggggaagaccccgcugggccuggucgaccucuucguguucuccaccagcuucuaccugaucuccaucuuccugcaccucgugaagauccccacccaccgccacaucgucggcaagagcugccccaagccccaccggcugaaccacauggggaucugcuccugcgggcuguacaagcagccgggcgugcccgugcgcuggaagcgguga

SEQ ID NO: 33213 - RNA, 1476 nt, Artificial Sequence
  derived and/or modified CDS sequence (opt1) from LASV(G3010-SLE-2013;Clade IV)__AIT17344__GPCmut8
augggccagaucgugaccuucuuccaggaggucccccacgugaucgaggaggugaugaacaucguccugaucgcccucagcauccuggccgugcugaaggggcucuacaacuucgcgaccugcggccugguggggcuggucacguuccuccugcugugcggccgcuccugcaccaccagccucuacaaggggguguacgagcugcagacccuggagcucaacauggagacgcugaacaugugcaugccgcuguccugcaccaagaacaacagccaccacuacaucauggugggcaacgagaccggccucgagcugacccugacgaacaccuccaucaucaaccacaaguucugcaaccucagcgacgcccacaagaagaaccuguacaaccacgcccugauguccaucaucagcaccuuccaccucuccauccccaacuucaaccaguacgaggccaugagcugcgacuucaacgggggcaagaucuccguccaguacaaccugagccacuccuacgccggggacgcggccagccacugcggcaccguggccaacggggugcugcagacguucaugcggauggccuggggcggcuccuacaucgcgcucgacagcggguacggcaagugggacugcaucaugaccuccuaccaguaccugaucauccagaacaccaccugggaggaccacugccaguucagccgccccucccccaucggguaccugggccuccugagccagcggacgcgcgacaucuacaucagccggcgccugcucggcaccuucaccuggacccuguccgacagcgaggggaaggacacgccgggcggguacugccugacccgguggaugcucaucgaggccgagcugaagugcuucggcaacaccgccgucgccaagugcaacgagaagcacgacgaggaguucugcgacaugcugcgccucuucgacuucugcaagcaggccauccagcggcugaagacccccgcgcagauguccauccagcugaucaacaaggccgugaacgcccucaucaacgaccagcugaucaugaagaaccaccuccgcgacaucauggggauccccuacugcaacuacagcaaguacugcuaccugaaccacacgaccaccggcaagaccucccugcccaagugcugccuggugagcaacggcuccuaccucaacgagacgcacuucagcgacgacaucgagcagcaggccgacaacaugaucaccgagaugcugcagaaggaguacauggagcggcaggggaagaccccgcugggccuggucgaccucuucguguucuccaccagcuucuaccugaucuccaucuuccugcaccucgugaagauccccacgcaccgccacaucgucggcaagagcugccccaagccccaccggcugaaccacauggggaucugcuccugcgggcuguacaagcagccgggcgugcccgugcgcuggaagcgguga

SEQ ID NO: 33214 - RNA, 1476 nt, Artificial Sequence
  derived and/or modified CDS sequence (opt1) from LASV(G502-SLE-2009;Clade IV)__AIT17126__GPCmut8
augggccagaucgugaccuucuuccaggaggucccccacgugaucgaggaggugaugaacaucguccugaucgcccucagcauccuggccgugcugaaggggcucuacaacuucgcgaccugcggccugguggggcugcucacguuccugcugcucugcggccgcuccugcaccaccgggcuguacaagggcgucuacgagcugcagacccucgagcugaacauggagacgcugaacaugugcaugccgcucagcugcaccaagaacaacucccaccacuacaucauggugggcaacgagaccgggcuggagcugacccucacgaacaccagcaucaucaaccacaaguucugcaaccuguccgacgcccacaagaagaaccuguacgaccacgcccucaugagcaucaucuccaccuuccaccugagcauccccaacuucaaccaguacgaggccauguccugcgacuucaacggcgggaagaucagcgugcaguacaaccugucccacagcuacgccggcgacgcggccgaccacugcgggaccgucgccaacggcgugcuccagacguucaugcggauggccuggggcggguccuacaucgcgcuggacagcggccgcgggcggugggacugcaucaugaccuccuaccaguaccugaucauccagaacaccaccugggaggaccacugccaguucagccgccccucccccaucggcuaccucggccugcugagccagcggacgcgcgacaucuacaucucccggcgccuccuggggaccuucaccuggacccugagcgacagcgagggcaaggacacgcccgggggcuacugccucacccgguggaugcugaucgaggccgagcugaagugcuucgggaacaccgccguggccaagugcaacgagaagcacgacgaggaguucugcgacaugcuccgccuguucgacuucugcaagcaggccauccagcggcugaaggcgccggcccagauguccauccagcucaucaacaaggccgucaacgcccugaucaacgaccagcuggugaugaagaaccaccuccgcgacaucaugggcauccccuacugcaacuacagccgguacugcuaccugaaccacaccacgaccggccgcaccucccugcccaagugcugccucgugagcaacggguccuaccugaacgagacccacuucagcgacgacaucgagcagcaggccgacaacaugaucacggagaugcugcagaaggaguacauggagcggcagggcaagaccccgcuggggcucgucgaccuguucguguucuccaccagcuucuaccugaucuccaucuuccuccaccuggugaagauccccacccaccgccacaucgucggcaagagcugccccaagccccaccggcugaaccacauggggaucugcuccugcggccucuacaagcagccgggcgugcccgugaaguggaagcgcuga

SEQ ID NO: 33215 - RNA, 1476 nt, Artificial Sequence
  derived and/or modified CDS sequence (opt1) from LASV(G733-SLE-2010;Clade IV)__AIT17154__GPCmut8
augggccagaucgugaccuucuuccaggaggucccccacgugaucgaggaggugaugaacaucguccugaucgcccucagcauccuggccgugcugaaggggcucuacaacuucgcgaccugcggcaucguggggcuggucuccuuccugcuccugugcggccgcagcugcacgaccucccuguacaaggggguguacgagcuccagacccuggagcugaacauggagacccucaacaugugcaugccgcugagcugcacgaagaacaacucccaccacuacaucauggugggcaacgagaccggccuggagcucacccugaccaacacgagcaucaucaaccacaaguucugcaaccuguccgacgcccacaagaagaaccucuacgaccacgcccugaugagcaucaucuccaccuuccaccugagcauccccaacuucaaccaguacgaggccauguccugcgacuucaacgggggcaagaucagcguccaguacaaccucucccacagcuacgccggggacgcggccaaccacugcggcaccaucgccaacggggugcugcagaccuucaugcggauggccuggggcggcuccuacaucgcgcuggacagcgggcgcgaccggugggacugcaucaugacguccuaccaguaccucaucauccagaacaccaccugggaggaccacugccaguucagccgccccucccccaucggcuaccuggggcugcucagccagcggacccgcgacaucuacaucagccggcgccugcugggcacguucaccuggacccucuccgacagcgagggcaaggacacccccgggggcuacugccugacgcgguggaugcugaucgaggccgagcucaagugcuucgggaacaccgccguggccaagugcaacgagaagcacgacgaggaguucugcgacaugcugcgccuguucgacuucugcaagcaggccauccagcggcucaaggcgccggcccagauguccauccagcugaucaacaaggccgucaacgcccugaucaacgaccagcucaucaugaagaaccaccuccgcgacaucaugggcauccccuacugcaacuacagcaaguacugcuaccugaaccacaccaccacggggaagaccucccugcccaagugcugccuggugagcaacggcuccuaccugaacgagacccacuucagcgacgacaucgagcagcaggccgacaacaugaucaccgagaugcuccagaaggaguacauggagcggcagggcaagacgccgcuggggcugguggaccuguucgucuucuccaccagcuucuaccucaucuccaucuuccugcaccuggugaagauccccacccaccgccacguggucggcaagagcugccccaagccccaccggcucaaccacauggggaucugcuccugcggccuguacgggcagccgggcgugcccgugaaguggaagcgcuga

SEQ ID NO: 33216 - RNA, 1476 nt, Artificial Sequence
  derived and/or modified CDS sequence (opt1) from MOPV/LASV reassortant(IGS-1;Clade IV)__AFY05576__GPCmut8
augggccagaucgugaccuucuuccaggaggucccccacgugaucgaggaggugaugaacaucguccugaucgcccucagcgugcuggccgugcugaaggggcucuacaacuucgcgaccugcggccuggucgggcuggugacguuccuccugcugugcggccgcuccugcaccaccagccucuacaaggggguguacgagcugcagacccuggagcucaacauggagacgcugaacaugugcaugccgcuguccugcaccaagaacaacagccaccacuacaucauggucggcaacgagaccggccucgagcugacccugacgaacaccuccaucaucaaccacaaguucugcaaccucagcgacgcccacaagaagaaccuguacgaccacgcccugauguccaucaucagcaccuuccaccucuccauccccaacuucaaccaguacgaggccaugagcugcgacuucaacgggggcaagaucuccgugcaguacaaccugagccacuccuacgccggggacgcggccaaccacugcggcaccguggccaacgggguccugcagacguucaugcggauggccuggggcggcagcuacaucgcgcucgacuccgggcgcggcaacugggacugcaucaugaccagcuaccaguaccugaucauccagaacaccaccugggaggaccacugccaguucucccggcccagccccaucggguaccugggccuccugucccagcgcacgcgggacaucuacaucagccgccggcugcucggcaccuucaccuggacccugagcgacuccgagggggaggacacgccgggcggguacugccugacccgcuggaugcucaucgaggccgagcugaagugcuucggcaacaccgccguggccaagugcaacgagaagcacgacgaggaguucugcgacaugcugcggcuguucgacuucugcaagcaggccauccagcgccugaaggcgcccgcccagaugagcauccagcugaucaacaaggccgugaacgcccucaucaacgaccagcugaucaugaagaaccaccuccgggacaucauggggauccccuacugcaacuacuccaaguacugcuaccucaaccacaccacgaccggccgcaccagccugcccaagugcugccuggucuccaacggcagcuaccucaacgagacccacuucuccgacgacaucgagcagcaggccgacaacaugaucacggagaugcugcagaaggaguacauggagcggcaggggaagaccccgcugggccugguggaccucuucguguucagcaccuccuucuaccugaucagcaucuuccugcaccucgucaagauccccacccaccgccacaucguggggaaguccugccccaagccccaccggcugaaccacaugggcaucugcagcugcgggcuguacaagcagccgggcgugcccgucaaguggaagcgcuga

SEQ ID NO: 33217 - RNA, 1476 nt, Artificial Sequence
  derived and/or modified CDS sequence (opt1) from LASV(LM765-SLE-2012;Clade IV)__AIT17814__GPCmut8
augggccagaucgugaccuucuuccaggaggucccccacgugaucgaggaggugaugaacaucguccugaucgcccucagcauccuggccgugcugaaggggcucuacaacuucgcgaccugcggccugguggggcuggucacguuccuccugcugugcggccgcuccugcaccaccagccucuacaaggggguguacgagcugcagacccuggagcucaacauggagacgcugaacaugugcaugccgcuguccugcaccaagaacaacagccaccacuacaucauggugggcaacgagaccggccucgagcugacccugacgaacaccuccaucaucgaccacaaguucugcaaccucagcgacgcccaccggaagaaccuguacgaccacgcccugauguccaucaucagcaccuuccaccucuccauccccaacuucaaccaguacgaggccaugagcugcgacuucaacgggggcaagaucuccguccaguacaaccugagccacuccuacgccaaggacgcggccgaccacugcgggaccguggccaacggcgugcugcagacguucaugcgcauggccuggggcgggagcuacaucgcgcucgacuccggccgggggcgcugggacugcaucaugaccagcuaccaguaccugaucauccagaacaccaccugggaggaccacugccaguucucccggcccagccccaucggcuaccuggggcuccugucccagcgcacgcgggacaucuacaucagccgccggcugcucggcaccuucaccuggacccugagcgacuccgagggcaaggacacgcccgggggcuacugccugacccgcuggaugcucaucgaggccgagcugaagugcuucgggaacaccgccgucgccaagugcaacgagaagcacgacgaggaguucugcgacaugcugcggcuguucgacuucugcaagcaggccauccagcgccugaaggcgccggcccagaugagcauccagcugaucaacaaggccgugaacgcccucaucaacgaccagcugaucaugaagaaccaccuccgggacaucaugggcauccccuacugcaacuacuccaaguacugcuaccucaaccacaccacgaccgggaagaccagccugcccaagugcugccugguguccaacggcagcuaccucaacgagacccacuucuccgacgacaucgagcagcaggccgacaacaugaucacggagaugcugcagaaggaguacauggagcgccagggcaagaccccgcuggggcuggucgaccucuucguguucagcaccuccuucuaccugaucagcaucuuccugcaccucgugaagauccccacccaccggcacaucgucggcaagcccugccccaagccgcaccgccugaaccacauggggaucugcuccugcggccuguacaagcagcccggggugcccgugaaguggaagcgguga

SEQ ID NO: 33218 - RNA, 1476 nt, Artificial Sequence
  derived and/or modified CDS sequence (opt1) from LASV(LM776-SLE-2012;Clade IV)__AIT17824__GPCmut8
augggccagaucgugaccuucuuccaggaggucccccacgugaucgaggaggugaugaacaucguccugaucgcccucagcauccuggccgugcugaaggggcucuacaacuucgcgaccugcggccugguggggcuggucacguuccuccugcugugcggccgcuccugcaccaccagcguguacaaggggguguacgagcuccagacccuggagcugaacauggagacgcucaacaugugcaugccgcuguccugcaccaagaacaacagccaccacuacaucauggucggcaacgagaccggccuggagcucacccugacgaacaccuccaucaucaaccacaaguucugcaaccugagcgacgcccacaagaagaaccucuacgaccacgcccugauguccaucaucagcaccuuccaccuguccauccccaacuucaaccaguacgaggccaugagcugcgacuucaacgggggcaagaucuccgugcaguacaaccucagccacuccuacgccggggacgcggccaaccacugcggcaccguggccaacgggguccugcagacguucaugcggauggccuggggcggcagcuacaucgcgcuggacuccgggcacggcaagugggacugcaucaugaccagcuaccaguaccucaucauccagaacaccaccugggaggaccacugccaguucucccgccccagccccaucggguaccugggccugcucucccagcggacgcgcgacaucuacaucagccggcgccugcugggcaccuucaccuggacccucagcgacuccgaggggaaggacacgccgggcggguacugccugacccgguggaugcugaucgaggccgagcucaagugcuucggcaacaccgccguggccaagugcaacgagaagcacgacgaggaguucugcgacaugcugcgccuguucgacuucugcaagcaggccauccagcggcucaaggcgcccgcccagaugagcauccagcugaucaacaaggccgugaacgcccugaucaacgaccagcucaucaugaagaaccaccuccgcgacaucauggggauccccuacugcaacuacuccaaguacugcuaccugaaccacaccacgaccggcaagaccagccugcccaagugcugccuggucuccaacggcagcuaccugaacgagacccacuucuccgacgacaucgagcagcaggccgacaacaugaucacggagaugcuccagaaggaguacauggagcggcaggggaagaccccgcugggccugguggaccuguucguguucagcaccuccuucuaccucaucagcaucuuccugcaccuggucaagauccccacccaccgccacaucguggggaaguccugccccaagccccaccggcucaaccacaugggcaucugcagcugcgggcuguacaagcagccgggcgugcccguccgcuggaagcgguga

SEQ ID NO: 33219 - RNA, 1476 nt, Artificial Sequence
  derived and/or modified CDS sequence (opt1) from LASV(Mad39;Clade IV)__ANH09722__GPCmut8
augggccagaucgugaccuucuuccaggaggucccccacgugaucgaggaggugaugaacaucguccugaucgcccucagcauccuggccgugcugaaggggcucuacaacguggcgaccugcggccugaucgggcuggucacguuccuccugcugugcggccgcuccugcaccaccacccucuacaaggggguguacgagcugcaggcccuggagcucaacauggagacgcugaacaugugcaugccgcugagcugcaccaagaacaacucccaccacuacauccgggugggcaacgagaccggccucgagcugacccugacgaacaccagccucaucaaccacaaguucugcaaccuguccgacgcccacaagaagaaccuguacgaccacgcccucaugagcaucaucuccaccuuccaccugagcauccccaacuucaaccaguacgaggccauguccugcgacuucaacgacgggaagaucagcguccaguacaaccugucccacaccuacgcgggcgacacggccaaccacugcgggaccguggccaacggcgugcuccagaccuucaugcgcauggccuggggcgggagcuacaucgcgcuggacuccggccgcgggggcugggacugcaucaugaccagcuaccaguaccugaucauccagaacacgaccugggaggaccacugccaguucucccggcccagccccaucggguaccucggccugcugucccagcggacccgcgacaucuacaucagccggcgccuccugggcaccuucacguggacccuguccgacagcgaggggaaggacaccccgggcggguacugccucacccgguggaugcugaucgaggccgagcugaagugcuucggcaacacggccgucgccaagugcaacgagaagcacgacgaggaguucugcgacaugcuccgccuguucgacuucugcaagcaggccauccagcggcugaaggcgcccgcccagaugagcauccagcucaucaacaaggccgugaacgcccugaucaacgaccagcugaucaugaagaaccaccuccgcgacaucauggggauccccuacugcaacuacuccaaguacugcuaccugaaccacaccgugaccggcaagaccagccugcccaagugcugccucgucuccaacggcagcuaccugaacgagacgcacuucuccgacgacaucgagcagcaggccgacaacaugaucaccgagaugcugcagaaggaguacauggagcggcaggggaagaccccgcugggccucguggaccuguucguguucagcaccuccuucuaccugaucagcaucuuccuccaccuggucaagauccccacgcaccgccacgugguggggaagcccugccccaagccgcaccggcugaaccacaugggcaucugcuccugcggguucuacaagcagcccggcguccccgugcgcuggaagcgguga

SEQ ID NO: 33220 - RNA, 1476 nt, Artificial Sequence
  derived and/or modified CDS sequence (opt1) from LASV(Z0947-SLE-2011;Clade IV)__AIT17840__GPCmut8
augggccagaucgugaccuucuuccaggaggucccccacgugaucgaggaggugaugaacaucguccugaucgcccucagcauccuggccgugcugaaggggcucuacaacuucgcgaccugcggccugguggggcuggucacguuccuccugcugugcggccgcuccugcaccaucagccucuacaaggggguguacgagcugcagacccuggagcucaacauggagacccugaacaugugcaugccgcuguccugcacgaagaacaacagccaccacuacaucauggugggcaacgagaccggccucgagcugacccugaccaacacguccaucaucaaccacaaguucugcaaccucagcgacgcccacaagaagaaccuguacgaccacgcccugauguccaucaucagcaccuuccaccucuccauccccaacuucaaccaguacgaggccaugagcugcgacuucaacgggggcaagaucuccguccaguacaaccugagccacuccuacgccggggacgcggccaaccacugcggcaccguggccaacggggugcugcagaccuucaugcggauggccuggggcggcagcuacaucgcgcucgacuccgggcgcgaccggugggacugcaucaugacgagcuaccaguaccugaucauccagaacaccaccugggaggaccacugccaguucucccgccccagccccaucggcuaccuggggcuccugucccagcggacccgcgacaucuacaucagccggcgccugcucggcacguucaccuggacccugagcgacuccgagggcaaggacacccccgggggcuacugccugacgcgguggaugcucaucgaggccgagcugaagugcuucgggaacaccgccgucgccaagugcaacgagaagcacgacgaggaguucugcgacaugcugcgccucuucgacuucugcaagcaggccauccagcggcugaaggcgccggcccagaugagcauccagcugaucaacaaggccgugaacgcccucaucaacgaccagcugaucaugaagaaccaccuccgcgacaucaugggcauccccuacugcaacuacuccaaguacugcuaccugaaccacaccaccacggggaagaccagccugcccaagugcugccugguguccaacggcagcuaccucaacgagacccacuucuccgacgacaucgagcagcaggccgacaacaugaucaccgagaugcugcagaaggaguacauggagcggcagggcaagacgccgcuggggcuggucgaccucuucguguucagcaccuccuucuaccugaucagcaucuuccugcaccucgugaagauccccacccaccgccacaucgucggcaagcccugccccaagccgcaccggcugaaccacauggggaucugcuccugcggccuguacaagcagcccggggugcccgugaaguggaagcgcuga

SEQ ID NO: 33221 - RNA, 1476 nt, Artificial Sequence
  derived and/or modified CDS sequence (opt4) from LASV(Josiah;Clade IV)__NP_694870__GPCmut8
augggccagaucgugaccuucuuccaggaggugccccacgugaucgaggaggugaugaacaucgugcugaucgcccugagcgugcuggccgugcugaagggccuguacaacuucgccaccugcggccuggugggccuggugaccuuccugcugcugugcggcagaagcugcaccaccagccuguacaagggcguguacgagcugcagacccuggagcugaacauggagacccugaacaugugcaugccccugagcugcaccaagaacaacagccaccacuacaucauggugggcaacgagaccggccuggagcugacccugaccaacaccagcaucaucaaccacaaguucugcaaccugagcgacgcccacaagaagaaccuguacgaccacgcccugaugagcaucaucagcaccuuccaccugagcauccccaacuucaaccaguacgaggccaugagcugcgacuucaacggcggcaagaucagcgugcaguacaaccugagccacagcuacgccggcgacgccgccaaccacugcggcaccguggccaacggcgugcugcagaccuucaugagaauggccuggggcggcagcuacaucgcccuggacagcggcagaggcaacugggacugcaucaugaccagcuaccaguaccugaucauccagaacaccaccugggaggaccacugccaguucagcagacccagccccaucggcuaccugggccugcugagccagagaaccagagacaucuacaucagcagaagacugcugggcaccuucaccuggacccugagcgacagcgagggcaaggacacccccggcggcuacugccugaccagauggaugcugaucgaggccgagcugaagugcuucggcaacaccgccguggccaagugcaacgagaagcacgacgaggaguucugcgacaugcugagacuguucgacuucugcaagcaggccauccagagacugaaggcccccgcccagaugagcauccagcugaucaacaaggccgugaacgcccugaucaacgaccagcugaucaugaagaaccaccugagagacaucaugggcauccccuacugcaacuacagcaaguacugcuaccugaaccacaccaccaccggcagaaccagccugcccaagugcugccuggugagcaacggcagcuaccugaacgagacccacuucagcgacgacaucgagcagcaggccgacaacaugaucaccgagaugcugcagaaggaguacauggagagacagggcaagaccccccugggccugguggaccuguucguguucagcaccagcuucuaccugaucagcaucuuccugcaccuggugaagauccccacccacagacacaucgugggcaagagcugccccaagccccacagacugaaccacaugggcaucugcagcugcggccuguacaagcagcccggcgugcccgugaaguggaagagauga

SEQ ID NO: 33222 - RNA, 1473 nt, Artificial Sequence
  derived and/or modified CDS sequence (opt4) from LASV(LP;Clade I)__AAF86701__GPCmut8
augggccagaucaucaccuucuuccaggaggugccccacgugaucgaggaggugaugaacaucgugcugaucgcccugagccugcuggccauccugaagggccuguacaacaucgccaccugcggcaucaucggccugguggccuuccuguuccugugcggcaagagcugcagccugacccugaagggcggcuacgagcugcagacccuggagcugaacauggagacccugaacaugugcaugccccugagcugcaccaagaacagcagccaccacuacaucagagugggcaacgagaccggccuggagcugacccugaccaacaccagcaucaucaaccacaaguucugcaaccugagcgacgcccacaagaagaaccuguacgaccacgcccugaugagcaucaucagcaccuuccaccugagcauccccaacuucaaccaguacgaggccaugagcugcgacuucaacggcggcaagaucagcgugcaguacaaccugagccacagcuacgccggcgacgccgccgagcacugcggcaccguggccaacggcgugcugcagaccuucaugagaauggccuggggcggcagauacaucgcccuggacagcggcaagggcaacugggacugcaucaugaccagcuaccaguaccugaucauccagaacaccaccugggaggaccacugccaguucagcagacccagccccaucggcuaccugggccugcugagccagagaaccagagacaucuacaucagcagaagacugcugggcaccuucaccuggacccugagcgacagcgagggcaacgagacccccggcggcuacugccugaccagauggaugcugaucgaggccgagcugaagugcuucggcaacaccgccguggccaagugcaacgagaagcacgacgaggaguucugcgacaugcugagacuguucgacuucugcaagcaggccaucagaagacugaaggcccccgcccagaugagcauccagcugaucaacaaggccgugaacgcccugaucaacgaccagcugaucaugaagaaccaccugagagacaucaugggcauccccuacugcaacuacagcaaguacugcuaccugaaccacaccagcagcggcagaaccagccugcccaagugcugccugaucagcaacggcagcuaccugaacgagacccaguucagcgacgacaucgagcagcaggccgacaacaugaucaccgagaugcugcagaaggaguacaucgagagacagggcaagaccccccugggccugguggacaucuucaucuucagcaccagcuucuaccugaucagcaucuuccugcaccugaucaagauccccacccacagacacaucgugggcaagcccugccccaagccccacagacugaaccacaugggcgugugcagcugcggccuguacaagcaccccggcgugcccaccaaguggaagagauga

SEQ ID NO: 33223 - RNA, 1473 nt, Artificial Sequence
  derived and/or modified CDS sequence (opt4) from LASV(803213;Clade II)__AAF86703__GPCmut8
augggccagaucaucaccuucuuccaggaggugccccacgugaucgaggaggugaugaacaucgugcugaucgcccugagccugcuggccauccugaagggcaucuacaacguggccaccugcggccuguucggccugaucagcuuccugcugcugugcggcagaagcugcagcgugaccuacaagggcguguacgagcugcagacccuggagcugaacauggccaaccugaacaugugcaugccccugagcugcaccaagaacaacagccaccacuacaucauggugggcaacgagaccggccuggagcugacccugaccaacaccagcaucaucaaccacaaguucugcaaccugagcgacgcccacaagaagaaccuguacgaccacgcccugaugagcaucaucagcaccuuccaccugagcauccccaacuucaaccaguacgaggccaugagcugcgacuucaacggcggcaagaucagcgugcaguacaaccugagccacagcuucgccguggacgccgccaaccacugcggcaccaucgccaacggcgugcugcagaccuucaugagaauggccuggggcggcagcuacaucgcccuggacagcggcaagggcaacugggacugcaucaugaccagcuaccaguaccugaucauccagaacaccaccugggaggaccacugccaguucagcagacccagccccaucggcuaccugggccugcugagccagagaaccagagacaucuacaucagcagaagacugcugggcaccuucaccuggacccugagcgacagcgagggcaacgaggcccccggcggcuacugccugaccagauggaugcugaucgaggccgagcugaagugcuucggcaacaccgccguggccaagugcaacgagaagcacgacgaggaguucugcgacaugcugagacuguucgacuucugcaagcaggccaucaagagacugaagacccccgcccagaugagcauccagcugaucaacaaggccgugaacgcccugaucaacgaccagcugaucaugaagaaccaccugagagacaucaugggcauccccuacugcaacuacagcagauacugcuaccugaaccacaccgugaccggcaagaccagccugcccagaugcugccuggugagcaacggcagcuaccugaacgagacccacuucagcgacgacaucgagcagcaggccgacaacaugaucaccgagaugcugcagaaggaguacauggacagacagggcaagaccccccugggccugguggaccuguucguguucagcaccagcuucuaccugaucagcaucuuccugcaccuggugaagauccccacccacagacacaucgugggcaagcccugccccaagccccacagacugaaccacaugggcaucugcagcugcggccuguacaagcaccccggcgugcccgugaaguggaagagauga

SEQ ID NO: 33224 - RNA, 1473 nt, Artificial Sequence
  derived and/or modified CDS sequence (opt4) from LASV(GA391;Clade III)__CAA36645__GPCmut8
augggccagaucgugaccuucuuccaggaggugccccacgugaucgaggaggugaugaacaucgugcugaucgcccugagcauccuggccauccugaagggccuguacaacguggccaccugcggccugaucggccuggugaccuuccugcugcugagcggcagaagcugcagccugaucuacaagggcaccuacgagcugcagacccuggagcugaacauggagacccugaacaugugcaugccccugagcugcaccaagaacaacagccaccacuacaucagagugggcaacgagaccggccuggagcugacccugaccaacaccagcauccugaaccacaaguucugcaaccugagcgacgcccacaagagaaaccuguacgaccacagccugaugagcaucaucagcaccuuccaccugagcauccccaacuucaaccaguacgaggccaugagcugcgacuucaacggcggcaagaucaccgugcaguacaaccugagccacagcuucgccguggacgccgccggccacugcggcacccuggccaacggcgugcugcagaccuucaugagaauggccuggggcggcagcuacaucgcccuggacagcggcagaggcaacugggacugcaucaugaccagcuaccaguaccugaucauccagaacaccaccugggacgaccacugccaguucagcagacccagccccaucggcuaccugggccugcugagccagagaaccagagacaucuacaucagcagaagacugcugggcaccuucaccuggacccugagcgacagcgagggcaacgagacccccggcggcuacugccugaccagauggaugcugaucgaggccgagcugaagugcuucggcaacaccgccguggccaagugcaacgagaagcacgacgaggaguucugcgacaugcugagacuguucgacuucugcaagcaggccaucagaagacugaagacccccgcccagaugagcauccagcugaucaacaaggccgugaacgcccugaucaacgaccagcugaucaugaagaaccaccugagagacaucaugggcauccccuacugcaacuacagcagauacugcuaccugaaccacaccagcaccggcaagaccagccugcccagaugcugccugaucagcaacggcagcuaccugaacgagaccaaguucagcgacgacaucgagcagcaggccgacaacaugaucaccgagaugcugcagaaggaguacaucgacagacagggcaagaccccccugggccugguggaccuguucguguucagcaccagcuucuaccugaucagcaucuuccugcaccuggugaagauccccacccacagacacaucgugggcaagcccugccccaagccccacagacugaaccacaugggcaucugcagcugcggccuguacaagcagcccggcgugcccgugagauggaagagauga

SEQ ID NO: 33225 - RNA, 1476 nt, Artificial Sequence
  derived and/or modified CDS sequence (opt4) from LASV(AV;Clade V)__CCA30314__GPCmut8
augggccagaucgugaccuucuuccaggaggugccccacgugaucgaggaggugaugaacaucgugcugaucgcccugagcauccuggccgugcugaagggccuguacaacaucgccaccugcggccugaucggccugaucaccuuccugcugcugugcggcagaagcugcagcagcaaccuguacaagggcguguacgagcugcagagccuggaccugaacauggagacccugaacaugugcaugccccugagcugcaccaagaacaacagccaccacuacaucagagugggcaacgacaccggccuggagcugacccugaccaacaccagcauccugaaccacaaguucugcaaccugagcgacgcccacaagaaggaccuguacgaccacgcccugaugagcaucaucagcaccuuccaccugagcauccccaacuucaaccaguacgaggccaugagcugcgacuucaacggcggcaagaucagcgugcaguacaaccugagccacagcuacgccaucgacgccgccaaccacugcggcaccguggccaacggcauccugcagaccuucaugagaauggccuggggcggcagcuacaucgcccuggacagcggcagaggcaacugggacugcaucaugaccagcuaccaguaccugaucauccagaacaccaccugggagaaccacugccaguucagcagacccagccccaucggcuaccugggccugcugagccagagaaccagagacaucuacaucagcagaagacugcugggcaccuucaccuggacccugagcgacagcgagggcaacgccacccccggcggcuacugccugaccagauggaugcugaucgaggccgagcugaagugcuucggcaacaccgccguggccaagugcaacgagaagcacgacgaggaguucugcgacaugcugagacuguucgacuucugcaagcaggccaucagcagacugaagagccccgcccagaugagcauccagcugaucaacaaggccgugaacgcccugaucaacgaccagcugaucaugaagaaccaccugagagacaucaugggcauccccuacugcaacuacagcaaguacugcuaccugaaccacaccaucaccggcaagaccagccugcccaagugcugccuggugagcaacggcagcuaccugaacgagacccacuucagcgacgacaucgagcagcaggccgacaacaugaucaccgagaugcugcagaaggaguacauggagagacagggcaagaccccccugggccugguggaccuguucguguucagcaccagcuucuaccugaucagcaucuuccugagacuggugaagauccccacccacagacacaucgugggcaagcccugccccaagccccacagacugaaccacaugggcaucugcagcugcggccuguacaagcagcccggcgugcccgugagauggaagagauga

SEQ ID NO: 33226 - RNA, 1473 nt, Artificial Sequence
  derived and/or modified CDS sequence (opt4) from LASV(Togo/2016/7082;Clade VI)__AMR44577__GPCmut8
augggccagaucaucaccuucuuccaggaggugccccacgugaucgaggaggugaugaacaucgugcugaucgcccugagccugcuggccauccugaagggcguguacaacguggccaccugcggcaucaucggccuggugaccuuccuguuccugugcggcagaagcugcagccugaucuacaagggcagcuacgagcugcagacccuggagcugaacauggagacccugaacaugugcaugccccugagcugcaccaagaacagcagccaccacuacaucagagugggcaacgagaccggccuggagcugacccugaccaacaccagcaucaucaaccacaaguucugcaaccugagcgacgcccacaagagaaaccuguacgaccacgcccugaugagcauccugagcaccuuccaccugagcauccccaacuucaaccaguacgaggccaugagcugcgacuucaacggcggcaagaucagcgugcaguacaaccugagccacgccuacgccguggacgccgccgagcacugcggcaccguggccaacggcgugcugcagaccuucaugagaauggccuggggcggcagcuacaucgcccuggacagcggcagaggcaacugggacugcaucaugaccagcuaccaguaccugaucauccagaacaccaccugggaggaccacugccaguucagcagacccagccccaucggcuaccugggccugcugagccagagaaccagagacaucuacaucagcagaagacugcugggcaccuucaccuggacccugagcgacagcgagggcaacgagacccccggcggcuacugccugaccagauggaugcugaucgaggccgagcugaagugcuucggcaacaccgccguggccaagugcaacgagaagcacgacgaggaguucugcgacaugcugagacuguucgacuucugcaagcaggccauccagagacugaagagccccgcccagaugagcauccagcugaucaacaaggccgugaacgcccugaucaacgaccagcugaucaugaagaaccaccugagagacaugaugggcauccccuacugcaacuacagcaaguacugcuaccugaaccacaccagcagcggcagaaccagccugcccaagugcugccuggugagcaacggcagcuaccugaacgagacccacuucagcgacgacaucgagcagcaggccgacaacaugaucaccgagaugcugcagaaggaguacaucgacagacagggcaagaccccccugggccugguggaccuguucguguucagcaccagcuucuaccugaucagcaucuuccugcaccugaucaagauccccacccacagacacaucgugggcaagcccugccccaagccccacagacugaaccacaugggcaucugcagcugcggccuguacaagcagcccggcgugcccaccagauggaagagauga

SEQ ID NO: 33227 - RNA, 1473 nt, Artificial Sequence
  derived and/or modified CDS sequence (opt4) from LASV(KAK-428;Clade n.d. (VII))__ANH09740__GPCmut8
augggccagaucgugaccuucuuccaggaggugccccacgugaucgaggaggugaugaacaucgugcugaucgcccugagccugcuggccauccugaagggccuguacaacuucgccaccugcggcgugaucggccugaucaccuuccugcugcugugcggcagaagcugcagcgccaccuacaagggccaguacgagcugcagacccuggagcugaacauggagagccugaacaugugcaugccccugagcugcaccaagaacaacagccaccacuacaucagagccggcaacaacaccggccuggagcugacccugaccaacaccagcaucaucagccacaaguucugcaaccugagcgacgcccacaagaagaaccuguacgaccacacccugaugagcaucaucaccaccuuccaccugagcauccccaacuucaaccaguacgaggccaugagcugcgacuucaacggcggcaagaucagcauccaguacaaccugagccacagcuacgccggcgacgccgcccagcacugcggcaccguggccaacggcgugcugcagaccuucaugagaauggccuggggcggcagcuaccuggcccuggacagcggcagaagaggcugggacugcaucaucagcagcuaccaguaccugaucauccagaacaccaccugggacgaccacugccaguucagcagacccagccccaucggcuaccugggcuucgugagccagaagaccagagacaucuacaucagcagaagacugcugggcaccuucaccuggacccugagcgacagcgagggccacgacaugcccggcggcuacugccugaccagauggaugcugaucgaggccgaccugaagugcuucggcaacaccgccguggccaagugcaacgagaagcacgacgaggaguucugcgacauguggagacuguucgacuucugcaagcaggccauccagagacugaaggcccccgcccagaugaacauccagcugaucaacaaggccgugaacgcccugaucaacgaccagcugaugaugaagaaccaccugagagacaucaugggcauccccuacugcaacuacagcaaguucugcuaccugaacaacaccaccaccggcagaaccagccugcccagaugcugccugaucagcaacggcagcuaccugaacgagacccacuucagcgacgacaucgagcagcaggccgacaacaugaucaccgagaugcugcagaaggaguacauggacagacagggcaagaccccccugggccugguggaccuguucguguucagcaccagcuucuaccugaucaccaucuuccugcaccuggugaagauccccacccacagacacaucgugggcaagcccugccccaagccccacagacugaaccacaugggcaucugcagcugcggccuguacaagcagcccggcgugcccgugagauggaagagauga

SEQ ID NO: 33228 - RNA, 1473 nt, Artificial Sequence; identical to SEQ ID NO: 33222
  derived and/or modified CDS sequence (opt4) from LASV(Pinneo-NIG-1969;Clade I)__AIT17836__GPCmut8

SEQ ID NO: 33229 - RNA, 1473 nt, Artificial Sequence
  derived and/or modified CDS sequence (opt4) from LASV(ISTH0009-NIG-2011;Clade II)__AIT17404__GPCmut8
augggccagaucaucaccuucuuccaggaggugccccacgugaucgaggaggugaugaacaucgugcugaucgcccugagccugcuggccauccugaagggcaucuacaacguggccaccugcggccuguucggccuggugagcuuccugcugcugugcggcagaagcugcagcaccaccuacaagggcguguacgagcugcagacccuggagcuggacauggccagccugaacaugugcaugccccugagcugcaccaagaacaacagccaccacuacaucauggugggcaacgagaccggccuggagcugacccugaccaacaccagcaucaucaaccacaaguucugcaaccugagcgacgcccacaagaagaaccuguacgaccacgcccugaugagcaucaucagcaccuuccaccugagcauccccaacuucaaccaguacgaggccaugagcugcgacuucaacggcggcaagaucagcgugcaguacaaccugagccacgccuacgccguggacgccgccaaccacugcggcaccaucgccaacggcgugcugcagaccuucaugagaauggccuggggcggcagcuacaucgcccuggacagcggcaagggcagcugggacugcaucaugaccagcuaccaguaccugaucauccagaacaccaccugggaggaccacugccaguucagcagacccagccccaucggcuaccugggccugcugagccagagaaccagagacaucuacaucagcagaagacugcugggcaccuucaccuggacccugagcgacagcgagggcaacgagacccccggcggcuacugccugaccagauggaugcugaucgaggccgagcugaagugcuucggcaacaccgccguggccaagugcaacgagaagcacgacgaggaguucugcgacaugcugagacuguucgacuucugcaagcaggccaucagaagacugaagacccccgcccagaugagcauccagcugaucaacaaggccgugaacgcccugaucaacgaccagcugaucaugaagaaccaccugagagacaucaugggcauccccuacugcaacuacagcaaguacugcuaccugaaccacaccgugaccggcaagaccagccugcccagaugcugccuggugagcaacggcagcuaccugaacgagacccacuucagcgacgacaucgagcagcaggccgacaacaugaucaccgagcugcugcagaaggaguacauggacagacagggcaagaccccccugggccugguggaccuguucguguucagcaccagcuucuaccugaucagcaucuuccugcaccugaucaagauccccacccacagacacaucaccggcaagcccugccccaagccccacagacugaaccacaugggcaucugcagcugcggccuguacaagcaccccggcgugcccgugaaguggaagagauga

SEQ ID NO: 33230 - RNA, 1473 nt, Artificial Sequence
  derived and/or modified CDS sequence (opt4) from LASV(ISTH2010-NIG-2012;Clade II)__AIT17482__GPCmut8
augggccagaucaucaccuucuuccaggaggugccccacgugaucgaggaggugaugaacaucgugcugaucgcccugagccugcuggccauccugaagggcaucuacaacguggccaccugcggccuguucggccuggugagcuuccugcugcugugcggcagaagcugcagcaccaccuacaagggcguguacgagcugcagacccuggagcuggacauggccagccugaacaugugcaugccccugagcugcaccaagaacaacagccaccacuacaucauggugggcaacgagaccggccuggagcugacccugaccaacaccagcaucaucaaccacaaguucugcaaccugagcgacgcccacaagaagaaccuguacgaccacgcccugaugagcaucaucagcaccuuccaccugagcauccccaacuucaaccaguacgaggccaugagcugcgacuucaacggcggcaagaucagcgugcaguacaaccugagccacgccuacgccguggacgccgccaaccacugcggcaccaucgccaacggcgugcugcagaccuucaugagaauggccuggggcggcagcuacaucgcccuggacagcggcaagggcagcugggacugcaucaugaccagcuaccaguaccugaucauccagaacaucaccugggaggaccacugccaguucagcagacccagccccaucggcuaccugggccugcugagccagagaaccagagacaucuacaucagcagaagacugcugggcaccuucaccuggacccugagcgacagcgagggcaacgagacccccggcggcuacugccugaccagauggaugcugaucgaggccgagcugaagugcuucggcaacaccgccguggccaagugcaacgagaagcacgacgaggaguucugcgacaugcugagacuguucgacuucugcaagcaggccaucagaagacugaagacccccgcccagaugagcauccagcugaucaacaaggccgugaacgcccugaucaacgaccagcugaucaugaagaaccaccugagagacaucaugggcauccccuacugcaacuacagcaaguacugcuaccugaaccacaccgugaccggcaagaccagccugcccagaugcugccuggugagcaacggcagcuaccugaacgagacccacuucagcgacgacaucgagcagcaggccgacaacaugaucaccgagcugcugcagaaggaguacaucgacagacagggcaagaccccccugggccugguggaccuguucguguucagcaccagcuucuaccugaucagcaucuuccugcaccuggugaagauccccacccacagacacguggugggcaagcccugccccaagccccacagacugaaccacaugggcaucugcagcugcggccuguacaagcaccccggcgugcccgugaaguggaagagauga

SEQ ID NO: 33231 - RNA, 1473 nt, Artificial Sequence
  derived and/or modified CDS sequence (opt4) from LASV(Lassa virus/H.sapiens-wt/NGA/2015/ISTH_0543;Clade II)__AVO03639__GPCmut8
augggccagaucaucaccuucuuccaggaggugccccacgugaucgaggaggugaugaacaucgugcugaucgcccugagccugcuggccauccugaagggcaucuacaacguggccaccugcggccuguucggccuggugagcuuccugcugcugugcggcagaagcugcagcaccaccuacaagggcguguacgagcugcagacccuggagcuggacauggccaaccugaacaugugcaugccccugagcugcaccaagaacaacagccaccacuacaucauggugggcaacgagaccggccuggagcugacccugaccaacaccagcaucaucaaccacaaguucugcaaccugagcgacgcccacaagaagaaccuguacgaccacgcccugaugagcaucaucagcaccuuccaccugagcauccccaacuucaaccaguacgaggccaugagcugcgacuucaacggcggcaagaucagcgugcaguacaaccugagccacaccuacgccguggacgccgccaaccacugcggcaccaucgccaacggcgugcugcagaccuucaugagaauggccuggggcggcagcuacaucgcccuggacagcggcaagggcagcugggacugcaucaugaccagcuaccaguaccuggugauccagaacaccaccugggaggaccacugccaguucagcagacccagccccaucggcuaccugggccugcugagccagagaaccagagacaucuacaucagcagaagacugcugggcaccuucaccuggacccugagcgacagcgagggcaacgagacccccggcggcuacugccugaccagauggaugcugaucgaggccgagcugaagugcuucggcaacaccgccguggccaagugcaacgagaagcacgacgaggaguucugcgacaugcugagacuguucgacuucugcaagcaggccaucagaagacugaagacccccgcccagaugagcauccagcugaucaacaaggccgugaacgcccugaucaacgaccagcugaucaugaagaaccaccugagagacaucaugggcauccccuacugcaacuacagcaaguacugcuaccugaaccacaccgugaccggcaagaccagccugcccagaugcugccuggugagcaacggcagcuaccugaacgagacccacuucagcgacgacaucgagcagcaggccgacaacaugaucaccgagcugcugcagaaggaguacaucgacagacagggcaagaccccccugggccugguggaccuguucguguucagcaccagcuucuaccugaucagcaucuuccugcaccuggugaagauccccacccacagacacaucaccggcaagcccugccccaagccccacagacugaaccacaugggcaucugcagcugcggccuguacaagcaccccggcgugcccgugaaguggaagagauga

SEQ ID NO: 33232 - RNA, 1473 nt, Artificial Sequence
  derived and/or modified CDS sequence (opt4) from LASV(Lassa virus/H.sapiens-wt/NGA/2016/ISTH_0009;Clade II)__AVO03571__GPCmut8
augggccagaucaucaccuucuuccaggaggugccccacgugaucgaggaggugaugaacaucgugcugaucgcccugagccugcuggccauccugaagggcaucuacaacguggccaccugcggccugcugggccuggugagcuuccugcugcugugcggcagaagcugcagcaccaccuacaagggcguguacgagcugcagacccuggagcuggacauggccagccugaacaugugcaugccccugagcugcaccaagaacaacagccaccacuacaucauggugggcaacgagaccggccuggagcugacccugaccaacaccagcaucaucaaccacaaguucugcaaccugagcgacgcccacaagaagaaccuguacgaccacgcccugaugagcaucaucagcaccuuccaccugagcauccccaacuucaaccaguacgaggccaugagcugcgacuucaacggcggcagaaucagcgugcaguacaaccugagccacagcuacgccguggacgccgccaaccacugcggcaccaucgccaacggcgugcugcagaccuucaugagaauggccuggggcggcagcuacaucgcccuggacagcggcaagggcagcugggacugcaucaugaccagcuaccaguaccugaucauccagaacaccaccugggaggaccacugccaguucagcagacccagccccaucggcuaccugggccugcugagccagagaaccagagacaucuacaucagcagaagacugcugggcaccuucaccuggacccugagcgacagcgagggcaacgagacccccggcggcuacugccugaccagauggaugcugaucgaggccgagcugaagugcuucggcaacaccgccguggccaagugcaacgagaagcacgacgaggaguucugcgacaugcugagacuguucgacuucugcaagcaggccaucagaagacugaagacccccgcccagaugagcauccagcugaucaacaaggccgugaacgcccugaucaacgaccagcugaucaugaagaaccaccugagagacaucaugggcauccccuacugcaacuacagcaaguacugcuaccugaaccacaccgugaccggcaagaccagccugcccagaugcugccuggugagcaacggcagcuaccugaacgagacccacuucagcgacgacaucgagcagcaggccgacaacaugaucaccgagcugcugcagaaggaguacaucgacagacagggcaagaccccccugggccugguggaccuguucguguucagcaccagcuucuaccugaucagcaucuuccugcaccuggugaagauccccacccacagacacaucaccggcaagcccugccccaagccccacagacugaaccacaugggcaucugcagcugcggccuguacaaccaccccggcgugcccgugaaguggaagagauga

SEQ ID NO: 33233 - RNA, 1473 nt, Artificial Sequence
  derived and/or modified CDS sequence (opt4) from LASV(Lassa virus/H.sapiens-wt/NGA/2016/ISTH_0017;Clade II)__AVO03567__GPCmut8
augggccagaucaucaccuucuuccaggaggugccccacgugaucgaggaggugaugaacaucgugcugaucgcccugagccugcuggccauccugaagggcaucuacaacguggccaccugcggccuguucggccuggugagcuuccugcugcugugcggcagaagcugcagcaccaccuacaagggcguguacgagcugcagacccuggagcuggacauggccagccugaacaugugcaugccccugagcugcaccaagaacaacagccaccacuacaucauggugggcaacgagaccggccuggagcugacccugaccaacaccagcaucaucaaccacaaguucugcaaccugagcgacgcccacaagaagaaccuguacgaccacgcccugaugagcaucaucagcaccuuccaccugagcauccccaacuucaaccaguacgaggccaugagcugcgacuucaacggcggcaagaucagcgugcaguacaaccugagccacaccuacgccaucgacgccgccaaccacugcggcaccaucgccaacggcgugcugcagaccuucaugagaauggccuggggcggcagcuacaucgcccuggacagcggcaagggcagcugggacugcaucaugaccagcuaccaguaccugaucauccagaacaccaccugggaggaccacugccaguucagcagacccagccccaucggcuaccugggccugcugagccagagaaccagagacaucuacaucagcagaagacugcugggcaccuucaccuggacccugagcgacagcgagggcaacgagacccccggcggcuacugccugaccagauggaugcugaucgaggccgagcugaagugcuucggcaacaccgccguggccaagugcaacgagaagcacgacgaggaguucugcgacaugcugagacuguucgacuucugcaagcaggccaucagaagacugaagacccccgcccagaugagcauccagcugaucaacaaggccgugaacgcccugaucaacgaccagcugaucaugaagaaccaccugagagacaucaugggcauccccuacugcaacuacagcaaguacugcuaccugaaccacaccgugaccggcaagaccagccugcccagaugcugccuggugagcaacggcagcuaccugaacgagacccacuucagcgacgacaucgagcagcaggccgacaacaugaucaccgagcugcugcagaaggaguacauggacagacagggcaagaccccccugggccugguggaccuguucguguucagcaccagcuucuaccugaucagcaucuuccugcaccuggugagaauccccacccacagacacgugaucggcaagcccugccccaagccccacagacugaaccacaugggcaucugcagcugcggccuguacaagcaccccggcgugcccgugaaguggaagagauga

SEQ ID NO: 33234 - RNA, 1473 nt, Artificial Sequence
  derived and/or modified CDS sequence (opt4) from LASV(Lassa virus/H.sapiens-wt/NGA/2018/ISTH_0959;Clade II)__AVV65099__GPCmut8
augggccagaucaucaccuucuuccaggaggugccccacgugaucgaggaggugaugaacaucgugcugaucgcccugagccugcuggccauccugaagggcaucuacaacguggugaccugcggccuguucggccuggugagcuuccugcugcugugcggcagaagcugcagcaccaccuacaagggcguguacgagcugcagacccuggagcuggacauggccagccugaacaugugcaugccccugagcugcaccaagaacaacagccaccacuacaucauggugggcaacgagaccggccuggagcugacccugaccaacaccagcaucaucaaccacaaguucugcaaccugagcgacgcccacaagaagaaccuguacgaccacgcccugaugagcaucaucagcaccuuccaccugagcauccccaacuucaaccaguacgaggccaugagcugcgacuucaacggcggcaagaucagcgugcaguacaaccugagccacgccuacgccaucgacgccgccaaccacugcggcaccaucgccaacggcgugcugcagaccuucaugagaauggccuggggcggcagcuacaucgcccuggacagcggcaagggcagcugggacugcaucaugaccagcuaccaguaccugaucauccagaacaccaccugggaggaccacugccaguucagcagacccagccccaucggcuaccugggccugcugagccagagaaccagagacaucuacaucagcagaagacugcugggcaccuucaccuggacccugagcgacagcgagggcaacgagacccccggcggcuacugccugaccagauggaugcugaucgaggccgagcugaagugcuucggcaacaccgccguggccaagugcaacgagaagcacgacgaggaguucugcgacaugcugagacuguucgacuucugcaagcaggccaucagaagacugaagacccccgcccagaugagcauccagcugaucaacaaggccgugaacgcccugaucaacgaccagcugaucaugaagaaccaccugagagacaucaugggcauccccuacugcaacuacagcaaguacugcuaccugaaccacaccgugaccggcaagaccagccugcccagaugcugccuggugagcaacggcagcuaccugaacgagacccacuucagcgacgacaucgagcagcaggccgacaacaugaucaccgagcugcugcagaaggaguacaucgacagacagggcaagaccccccugggccugguggaccuguucguguucagcaccagcuucuaccugaucagcaucuuccugcaccuggugaagauccccacccacagacacgugaucggcaagcccugccccaagccccacagacugaaccacaugggcaucugcagcugcggccuguacaagcaccccggcgugcccgugaaguggaagagauga

SEQ ID NO: 33235 - RNA, 1473 nt, Artificial Sequence
  derived and/or modified CDS sequence (opt4) from LASV(LASV003-NIG-2008;Clade II)__AIT17580__GPCmut8
augggccagaucaucaccuucuuccaggaggugccccacgugaucgaggaggugaugaacaucgugcugaucgcccugagccugcuggccauccugaagggcaucuacaacguggccaccugcggccuguucggccuggugagcuuccugcugcugugcggcagaagcugcagcaccaccuacaagggcguguacgagcugcagacccuggagcuggacauggccagccugaacaugugcaugccccugagcugcaccaagaacaacagccaccacuacaucauggugggcaacgagaccggccuggagcugacccugaccaacaccagcaucaucaaccacaaguucugcaaccugagcgacgcccacaagaagaaccuguacgaccacgcccugaugagcaucaucagcaccuuccaccugagcauccccaacuucaaccaguacgaggccaugagcugcgacuucaacggcggcaagaucagcgugcaguacaaccugagccacaccuacgccguggacgccgccaaccacugcggcaccaucgccaacggcgugcugcagaccuucaugagaauggccuggggcggcagcuacaucgcccuggacagcggcaagggcagcugggacugcaucaugaccagcuaccaguaccugaucauccagaacaccaccugggaggaccacugccaguucagcagacccagccccaucggcuaccugggccugcugagccagagaaccagagacaucuacaucagcagaagacugcugggcaccuucaccuggacccugagcgacagcgagagcaacgagacccccggcggcuacugccugaccagauggaugcugaucgaggccgagcugaagugcuucggcaacaccgccguggccaagugcaacgagaagcacgacgaggaguucugcgacaugcugagacuguucgacuucugcaagcaggccaucagaagacugaaggcccccgcccagaugagcauccagcugaucaacaaggccgugaacgcccugaucaacgaccagcugaucaugaagaaccaccugagagacaucaugggcauccccuacugcaacuacagcaaguacugcuaccugaaccacaccgugaccggcagaaccagccugcccagaugcugccuggugagcaacggcagcuaccugaacgagacccacuucagcgacgacaucgagcagcaggccgacaacaugaucaccgagcugcugcagaaggaguacauggacagacagggcaagaccccccugggccugguggaccuguucguguucagcaccagcuucuaccugaucagcaucuuccugcaccuggugaagauccccacccacagacacgugaucggcaagcccugccccaagccccacagacugaaccacaugggcaucugcagcugcggccuguacaagcaccccggcgugcccgugaaguggaagagauga

SEQ ID NO: 33236 - RNA, 1473 nt, Artificial Sequence
  derived and/or modified CDS sequence (opt4) from LASV(LASV035-NIG-2009;Clade II)__AIT17588__GPCmut8
augggccagaucaucaccuucuuccaggaggugccccacgugaucgaggaggugaugaacaucgugcugaucgcccugagccugcuggccauccugaagggcaucuacaacguggccaccugcggccuguucggccuggugagcuuccugcugcugugcggcagaagcugcagcaccaccuacaagggcguguacgagcugcagacccuggagcuggacauggccagccugaacaugugcaugccccugagcugcaccaagaacaacagccaccacuacaucauggugggcaacgagaccggccuggagcugacccugaccaacaccagcaucaucaaccacaaguucugcaaccugagcgacgcccacaagaagaaccuguacgaccacgcccugaugagcaucaucagcaccuuccaccugagcauccccaacuucaaccaguacgaggccaugagcugcgacuucaacggcggcaagaucagcgugcaguacaaccugagccacgccuacgccguggacgccgccaaccacugcggcaccaucgccaacggcgugcugcagaccuucaugagaauggccuggggcggcagcuacaucgcccuggacagcggcaagggcagcugggacugcaucaugaccagcuaccaguaccugaucauccagaacaccaccugggaggaccacugccaguucagcagacccagccccaucggcuaccugggccugcugagccagagaaccagagacaucuacaucagcagaagacugcugggcaccuucaccuggacccugagcgacagcgagggcaacgagacccccggcggcuacugccugaccagauggaugcugaucgaggccgagcugaagugcuucggcaacaccgccguggccaagugcaacgagaagcacgacgaggaguucugcgacaugcugagacuguucgacuucugcaagcaggccaucagaagacugaaggcccccgcccagaugagcauccagcugaucaacaaggccgugaacgcccugaucaacgaccagcugaucaugaagaaccaccugagagacaucaugggcauccccuacugcaacuacagcaaguacugcuaccugaaccacaccgugaccggcaagaccagccugcccagaugcugccuggugagcaacggcagcuaccugaacgagacccacuucagcgacgacaucgagcagcaggccgacaacaugaucaccgagcugcugcagaaggaguacaucgacagacagggcaagaccccccugggccugguggaccuguucguguucagcaccagcuucuaccugaucagcaucuuccugcaccuggugaagauccccacccacagacacgugaucggcaagcccugccccaagccccacagacugaaccacaugggcaucugcagcugcggccuguacaagcaccccggcgugcccgugaaguggaagagauga

SEQ ID NO: 33237 - RNA, 1473 nt, Artificial Sequence
  derived and/or modified CDS sequence (opt4) from LASV(LASV1000-NIG-2009;Clade II)__AIT17782__GPCmut8
augggccagaucaucaccuucuuccaggaggugccccacgugaucgaggaggugaugaacaucgugcugaucgcccugagccugcuggccauccugaagggcaucuacaacguggccaccugcggccuguucggccuggugagcuuccugcugcugugcggcagaagcugcagcaccaccuacaagggcguguacgagcugcagacccuggagcuggacauggccagccugaacaugugcaugccccugagcugcaccaagaacaacagccaccacuacaucauggugggcaacgagaccggccuggagcugacccugaccaacaccagcaucaucaaccacaaguucugcaaccugagcgacgcccacaagaagaaccuguacgaccacgcccugaugagcaucaucagcaccuuccaccugagcauccccaacuucaaccaguacgaggccaugagcugcgacuucaacggcggcaagaucagcgugcaguacaaccugagccacaccuacgccguggacgccgccaaccacugcggcaccaucgccaacggcgugcugcagaccuucaugagaauggccuggggcggcagcuacaucgcccuggacagcggcaagggcagcugggacugcaucaugaccagcuaccaguaccugaucauccagaacaccaccugggaggaccacugccaguucagcagacccagccccaucggcuaccugggccugcugagccagagaaccagagacaucuacaucagcagaagacugcugggcaccuucaccuggacccugagcgacagcgagggcaacgagacccccggcggcuacugccugaccagauggaugcugaucgaggccgagcugaagugcuucggcaacaccgccguggccaagugcaacgagaagcacgacgaggaguucugcgacaugcugagacuguucgacuucugcaagcaggccaucaagagacugaagacccccgcccagaugagcauccagcugaucaacaaggccgugaacgcccugaucaacgaccagcugaucaugaagaaccaccugagagacaucaugggcauccccuacugcaacuacagcaaguacugcuaccugaaccacaccgugaccggcaagaccagccugcccagaugcugccuggugagcaacggcagcuaccugaacgagacccacuucagcgacgacaucgagcagcaggccgacaacaugaucaccgagcugcugcagaaggaguacaucgacagacagggcaagaccccccugggccugguggaccuguucguguucagcaccagcuucuaccugaucagcaucuuccugcaccuggugaagauccccacccacagacacguggugggcaagcccugccccaagccccacagacugaaccacaugggcaucugcagcugcggccuguacaagcaccccggcgugcccgugaaguggaagagauga

SEQ ID NO: 33238 - RNA, 1473 nt, Artificial Sequence
  derived and/or modified CDS sequence (opt4) from LASV(LASV221-NIG-2010;Clade II)__AIT17624__GPCmut8
augggccagaucaucaccuucuuccaggaggugccccacgugaucgaggaggugaugaacaucgugcugaucgcccugagccugcuggccauccugaagggcaucuacaacguggccaccugcggccuguucggccuggugagcuuccugcugcugugcggcagaagcugcagcaccaccuacaagggcguguacgagcugcagacccuggagcuggacauggccagccugaacaugugcaugccccugagcugcaccaagaacaacagccaccacuacaucauggugggcaacgagaccggccuggagcugacccugaccaacaccagcaucaucaaccacaaguucugcaaccugagcgacgcccacaagaagaaccuguacgaccacgcccugaugagcaucaucagcaccuuccaccugagcauccccaacuucaaccaguacgaggccaugagcugcgacuucaacggcggcaagaucagcgugcaguacaaccugagccacaccuacgccaucgacgccgccaaccacugcggcaccaucgccaacggcgugcugcagaccuucaugagaauggccuggggcggcagcuacaucgcccuggacagcggcaagggcagcugggacugcaucaugaccagcuaccaguaccugaucauccagaacaccaccugggaggaccacugccaguucagcagacccagccccaucggcuaccugggccugcugagccagagaaccagagacaucuacaucagcagaagacugcugggcaccuucaccuggacccugagcgacagcgagggcaacgagacccccggcggcuacugccugaccagauggaugcugaucgaggccgagcugaagugcuucggcaacaccgccguggccaagugcaacgagaagcacgacgaggaguucugcgacaugcugagacuguucgacuucugcaagcaggccaucagaagacugaagacccccgcccagaugagcauccagcugaucaacaaggccgugaacgcccugaucaacgaccagcugaucaugaagaaccaccugagagacaucaugggcauccccuacugcaacuacagcaaguacugcuaccugaaccacaccgugaccggcaagaccagccugcccagaugcugccuggugagcaacggcagcuaccugaacgagacccacuucagcgacgacaucgagcagcaggccgacaacaugaucaccgagaugcugcagaaggaguacauggacagacagggcaagaccccccugggccugguggaccuguucguguucagcaccagcuucuaccugaucagcaucuuccugcaccuggugaagauccccacccacagacacgugaucggcaagcccugccccaagccccacagacugaaccacaugggcaucugcagcugcggccuguacaagcaccccggcgugcccgugaaguggaagagauga

SEQ ID NO: 33239 - RNA, 1473 nt, Artificial Sequence
  derived and/or modified CDS sequence (opt4) from LASV(LASV237-NIG-2010;Clade II)__AIT17638__GPCmut8
augggccagaucaucaccuucuuccaggaggugccccacgugaucgaggaggugaugaacaucgugcugaucgcccugagccugcuggccauccugaagggcaucuacaacguggccaccugcggccuguucggccuggugagcuuccugcugcugugcggcagaagcugcagcaccaccuacaagggcguguacgagcugcagacccuggagcuggacauggccagccugaacaugugcaugccccugagcugcaccaagaacaacagccaccacuacaucauggugggcaacgagaccggccuggagcugacccugaccaacaccagcaucaucaaccacaaguucugcaaccugagcgacgcccacaagaaggaccuguacgaccacgcccugaugagcaucaucagcaccuuccaccugagcauccccaacuucaaccaguacgaggccaugagcugcgacuucaacggcggcaagaucagcgugcaguacaaccugagccacaccuacgccguggacgccgccaaccacugcggcaccaucgccaacggcgugcugcagaccuucaugagaauggccuggggcggcagcuacaucgcccuggacagcggcaagggcagcugggacugcaucaugaccagcuaccaguaccugaucauccagaacaccaccugggaggaccacugccaguucagcagacccagccccaucggcuaccugggccugcugagccagagaaccagagacaucuacaucagcagaagacugcugggcaccuucaccuggacccugagcgacagcgagggcaacgagacccccggcggcuacugccugaccagauggaugcugaucgaggccgagcugaagugcuucggcaacaccgccguggccaagugcaacgagaagcacgacgaggaguucugcgacaugcugagacuguucgacuucugcaagcaggccaucagaagacugaagacccccgcccagaugagcauccagcugaucaacaaggccgugaacgcccugaucaacgaccagcugaucaugaagaaccaccugagagacaucaugggcauccccuacugcaacuacagcaaguacugcuaccugaaccacaccgugaccggcaagaccagccugcccagaugcugccuggugagcaacggcagcuaccugaacgagacccacuucagcgacgacaucgagcagcaggccgacaacaugaucaccgagcugcugcagaaggaguacauggacagacagggcaagaccccccugggccugguggaccuguucguguucagcaccagcuucuaccugaucagcaucuuccugcaccugaucaagauccccacccacagacacaucaccggcaagcccugccccaagccccacagacugaaccacaugggcaucugcagcugcggccuguacaagcaccccggcgugcccgugaaguggaagagauga

SEQ ID NO: 33240 - RNA, 1473 nt, Artificial Sequence
  derived and/or modified CDS sequence (opt4) from LASV(LASV253-NIG-2011;Clade II)__AIT17670__GPCmut8
augggccagaucaucaccuucuuccaggaggugccccacgugaucgaggaggugaugaacaucgugcugaucgcccugagccugcuggccauccugaagggcaucuacaacguggccaccugcggccuguucggccuggugagcuuccugcugcugugcggcagaagcugcagcaccaccuacaagggcguguacgagcugcagacccuggagcuggacauggccagccugaacaugugcaugccccugagcugcaccaagaacaacagccaccacuacaucauggugggcaacgagaccggccuggagcugacccugaccaacaccagcaucaucaaccacaaguucugcaaccugagcgacgcccacaagaagaaccuguacgaccacgcccugaugagcaucaucagcaccuuccaccugagcauccccaacuucaaccaguacgaggccaugagcugcgacuucaacggcggcaagaucagcgugcaguacaaccugagccacaccuacgccguggacgccgccaaccacugcggcaccaucgccaacggcgugcugcagaccuucaugagaauggccuggggcggcagcuacaucgcccuggacagcggcaagggcagcugggacugcaucaugaccagcuaccaguaccugaucauccagaacaccaccugggaggaccacugccaguucagcagacccagccccaucggcuaccugggccugcugagccagagaaccagagacaucuacaucagcagaagacugcugggcaccuucaccuggacccugagcgacagcgagggcaacgagacccccggcggcuacugccugaccagauggaugcugaucgaggccgagcugaagugcuucggcaacaccgccguggccaagugcaacgagaagcacgacgaggaguucugcgacaugcugagacuguucgacuucugcaagcaggccaucagaagacugaaggcccccgcccagaugagcauccagcugaucaacaaggccgugaacgcccugaucaacgaccagcugaucaugaagaaccaccugagagacaucaugggcauccccuacugcaacuacagcaaguacugcuaccugaaccacaccgugaccggcagaaccagccugcccagaugcugccuggugagcaacggcagcuaccugaacgagacccacuucagcgacgacaucgagcagcaggccgacaacaugaucaccgagcugcugcagaaggaguacaucgacagacagggcaagaccccccugggccugguggaccuguucguguucagcaccagcuucuaccugaucagcaucuuccugcaccuggugaagauccccacccacagacacaucaucggcaagcccugccccaagccccacagacugaaccacaugggcaucugcagcugcggccuguacaagcaccccggcgugcccgugaaguggaagagauga

SEQ ID NO: 33241 - RNA, 1473 nt, Artificial Sequence
  derived and/or modified CDS sequence (opt4) from LASV(LASV254-NIG-2011;Clade II)__AIT17674__GPCmut8
augggccagaucaucaccuucuuccaggaggugccccacgugaucgaggaggugaugaacaucgugcugaucgcccugagccugcuggccauccugaagggcaucuacaacguggccaccugcggccuguucggccuggugagcuuccugcugcugugcggcagaagcugcagcaccaccuacaagggcguguacgagcugcagacccuggagcuggacaugaccaaccugaacaugugcaugccccugagcugcaccaagaacaacagccaccacuacaucauggugggcaacgagaccggccuggagcugacccugaccaacaccagcaucaucaaccacaaguucugcaaccugagcgacgcccacaagaagaaccuguacaaccacgcccugaugagcaucaucagcaccuuccaccugagcauccccaacuucaaccaguacgaggccaugagcugcgacuucaacggcggcaagaucagcgugcaguacaaccugagccacagcuacgccguggacgccgccaaccacugcggcaccaucgccaacggcgugcugcagaccuucaugagaauggccuggggcggcagcuacaucgcccuggacagcggcaagggcaacugggacugcaucaugaccagcuaccaguaccugaucauccagaacaccaccugggaggaccacugccaguucagcagacccagccccaucggcuaccugggccugcugagccagagaaccagagacaucuacaucagcagaagacugcugggcaccuucaccuggacccugagcgacagcgagggcaacgagacccccggcggcuacugccugaccagauggaugcugaucgaggccgagcugaagugcuucggcaacaccgccguggccaagugcaacgagaagcacgacgaggaguucugcgacaugcugagacuguucgacuucugcaagcaggccaucagaagacugaagacccccgcccaggccaacauccagcugaucaacaaggccgugaacgcccugaucaacgaccagcugaucaugaagaaccaccugagagacaucaugggcauccccuacugcaacuacagcaaguacugcuaccugaaccacaccgugaccggcaagaccagccugcccagaugcugccuggugagcaacggcagcuaccugaacgagacccacuucagcgacgacaucgagcagcaggccgacaacaugaucaccgagcugcugcagaaggaguacauggacagacagggcaagaccccccugggccugguggaccuguucguguucagcaccagcuucuaccugaucagcaucuuccugcaccuggugaagauccccacccacagacacgugaucggcaagcccugccccaagccccacagacugaaccacaugggcaucugcagcugcggccuguacaagcaccccggcgugcccgugaaguggaagagauga

SEQ ID NO: 33242 - RNA, 1473 nt, Artificial Sequence
  derived and/or modified CDS sequence (opt4) from LASV(Nig08-A19;Clade III)__ADU56618__GPCmut8
augggccagaucgugaccuucuuccaggaggugccccacgugaucgaggaggugaugaacaucgugcugaucgcccugagcauccuggccauccugaagggccuguacaacaucgccaccugcggccugaucggccuggugaccuuccugcugcugagcggcagaagcugcagcaugaccuacaagggcguguacgagcugcagacccuggagcugaacaugaacacccugaacaugugcaugccccugagcugcaccaagaacaacagccaccacuacaucauggugggcaacgagaccggccuggagcugacccugaccaacaccagccugcugcaccacaaguucugcaaccugagcgacgcccacaagaagaaccuguacgaccacacccugaugagcaucaucagcaccuuccaccugagcauccccaacuucaaccaguacgaggccaugagcugcgacuucaacggcggcaagaucaccgugcaguacaaccugagccacagcuacgccaucgacgccgccaaccacugcggcaccguggccaacggcgugcugcagaccuucaugagaauggccuggggcggcagcuacaucgcccuggacagcggcagaggcaagugggacugcaucaugaccagcuaccaguaccugaucauccagaacaccaccugggaggaccacugccaguucagcagacccagccccaucggcuaccugggccugcugagccagagaaccagagacaucuacaucagcagaagacugcugggcaccuucaccuggacccugagcgacagcgagggcaacgagacccccggcggcuacugccugaccagauggaugcugaucgaggccgagcugaagugcuucggcaacaccgccguggccaagugcaacgagaagcacgacgaggaguucugcgacaugcugagacuguucgacuucugcaagcaggccaucagaagacugaaggcccccgcccagaugagcauccagcugaucaacaaggccgugaacgcccugaucaacgaccagcugaucaugaagaaccaccugagagacaucaugggcauccccuacugcaacuacagcaaguacugcuaccugaaccacaccagcaccggcagaaccagccugcccagaugcugccuggugagcaacggcagcuaccugaacgagacccacuucagcgacgacaucgagcagcaggccgacaacaugaucaccgagaugcugcagaaggaguaccuggacagacagggcaagaccccccugggccugguggaccuguucguguucagcaccagcuucuaccugaucagcaucuuccugcaccuggugaagauccccacccacagacacaucgugggcaagcccugccccaagccccacagacugaaccacaugggcaucugcagcugcggccuguacaagcagcccggcgugcccgugagauggaagagauga

SEQ ID NO: 33243 - RNA, 1476 nt, Artificial Sequence
  derived and/or modified CDS sequence (opt4) from LASV(G1180-SLE-2010;Clade IV)__AIT17168__GPCmut8
augggccagaucgugaccuucuuccaggaggugccccacgugaucgaggaggugaugaacaucgugcugaucgcccugagcauccuggccgugcugaagggccuguacaacuucgccaccugcggccuggugggccugcugaccuuccugcugcugugcggcagaagcugcaccgccagcagauacaagggcguguacgagcugcagacccuggagcugaacauggagacccugaacaugugcaugccccugagcugcaccaagaacaacagccaccacuacaucauggugggcaacgagaccggccuggagcugacccugaccaacaccagcaucaucaaccacaaguucugcaaccugagcgacgcccacaagaagaaccuguacgaccacgcccugaugagcaucaucagcaccuuccaccugagcauccccaacuucaaccaguacgaggccaugagcugcgacuucaacggcggcaagaucagcgugcaguacaaccugagccacagcuacgccggcgacgccgccaaccacugcggcaccguggccaacggcgugcugcagaccuucaugagaauggccuggggcggcagcuacaucgcccuggacagcggccacggcagcugggacugcaucaugaccagcuaccaguaccugaucauccagaacaccaccugggaggaccacugccaguucagcagacccagccccaucggcuaccugggccugcugagccagagaaccagagacaucuacaucagcagaagacugcugggcaccuucaccuggacccugagcgacagcgagggcaaggacacccccggcggcuacugccugaccagauggaugcugaucgaggccgagcugaagugcuucggcaacaccgccguggccaagugcaacgagaagcacgacgaggaguucugcgacaugcugagacuguucgacuucugcaagcaggccauccagagacugaaggcccccgcccagaugagcauccagcugaucaacaaggccgugaacgcccugaucaacgaccagcugaucaugaagaaccaccugagagacaucaugggcauccccuacugcaacuacagcaaguacugcuaccugaaccacaccaccaccggcaagaccagccugcccaagugcugccuggugagcaacggcagcuaccugaacgagacccacuucagcgacgacaucgagcagcaggccgacaacaugaucaccgagaugcugcagaaggaguacauggagagacagggcaagaccccccugggccugguggaccuguucguguucagcaccagcuucuaccugaucagcaucuuccugcaccuggugaagauccccacccacagacacaucgugggcaagagcugccccaagccccacagacugaaccacaugggcaucugcagcugcggccuguacaagcagcccggcgugcccgugaaguggaagagauga

SEQ ID NO: 33244 - RNA, 1476 nt, Artificial Sequence
  derived and/or modified CDS sequence (opt4) from LASV(G1442-SLE-2011;Clade IV)__AIT17180__GPCmut8
augggccagaucgugaccuucuuccaggaggugccccacgugaucgaggaggugaugaacaucgugcugaucgcccugagcauccuggccgugcugaagggccuguacaacguggccaccugcggccugaucggccuggugaccuuccugcugcugugcggcagaagcugcaccaccacccuguacaagggcguguacgagcugcagacccuggagcugaacauggagacccugaacaugugcaugccccugagcugcaccaagaacaacagccaccacuacaucagagugggcaacgagaccggccuggagcugacccugaccaacaccagcaucaucaaccacaaguucugcaaccugagcgacgcccacaagaagaaccuguacgaccacgcccugaugagcaucaucagcaccuuccaccugagcauccccaacuucaaccaguacgaggccaugagcugcgacuucaacggcggcaagaucagcgugcaguacaaccugagccacagcuacgccggcgacgccgccaaccacugcggcaccguggccaacggcgugcugcagaccuucaugagaauggccuggggcggcagcuacaucgcccuggacagcggcagaggcaacugggacugcaucaugaccagcuaccaguaccugaucauccagaacaccaccugggacgaccacugccaguucagcagacccagccccaucggcuaccugggccugcugagccagagaaccagagacguguacaucagcagaagacugcugggcaccuucaccuggacccugagcgacagcgagggcaaggacacccccggcggcuacugccugaccagauggaugcugaucgaggccgagcugaagugcuucggcaacaccgccguggccaagugcaacgagaagcacgacgaggaguucugcgacaugcugagacuguucgacuucugcaagcaggccauccagagacugaaggcccccgcccagaugagcauccagcugaucaacaaggccgugaacgcccugaucaacgaccagcugaucaugaagaaccaccugagagacaucaugggcauccccuacugcaacuacagcaaguacugcuaccugaacaacaccgccaccggcaagaccagccugcccaagugcugccugaucagcaacggcagcuaccugaacgagacccacuucagcgacgacaucgagcaggaggccgacaacaugaucaccgagaugcugcagaaggaguacauggagagacagggcaagaccccccugggccugguggaccuguucguguucagcaccagcuucuaccugaucagcaucuuccugcaccuggugaagauccccacccacagacacaucgugggcaagagcugccccaagccccacagacugaaccacaugggcaucugcagcugcggccuguacaagcagcccggcgugcccgugagauggaagagauga

SEQ ID NO: 33245 - RNA, 1476 nt, Artificial Sequence
  derived and/or modified CDS sequence (opt4) from LASV(G3010-SLE-2013;Clade IV)__AIT17344__GPCmut8
augggccagaucgugaccuucuuccaggaggugccccacgugaucgaggaggugaugaacaucgugcugaucgcccugagcauccuggccgugcugaagggccuguacaacuucgccaccugcggccuggugggccuggugaccuuccugcugcugugcggcagaagcugcaccaccagccuguacaagggcguguacgagcugcagacccuggagcugaacauggagacccugaacaugugcaugccccugagcugcaccaagaacaacagccaccacuacaucauggugggcaacgagaccggccuggagcugacccugaccaacaccagcaucaucaaccacaaguucugcaaccugagcgacgcccacaagaagaaccuguacaaccacgcccugaugagcaucaucagcaccuuccaccugagcauccccaacuucaaccaguacgaggccaugagcugcgacuucaacggcggcaagaucagcgugcaguacaaccugagccacagcuacgccggcgacgccgccagccacugcggcaccguggccaacggcgugcugcagaccuucaugagaauggccuggggcggcagcuacaucgcccuggacagcggcuacggcaagugggacugcaucaugaccagcuaccaguaccugaucauccagaacaccaccugggaggaccacugccaguucagcagacccagccccaucggcuaccugggccugcugagccagagaaccagagacaucuacaucagcagaagacugcugggcaccuucaccuggacccugagcgacagcgagggcaaggacacccccggcggcuacugccugaccagauggaugcugaucgaggccgagcugaagugcuucggcaacaccgccguggccaagugcaacgagaagcacgacgaggaguucugcgacaugcugagacuguucgacuucugcaagcaggccauccagagacugaagacccccgcccagaugagcauccagcugaucaacaaggccgugaacgcccugaucaacgaccagcugaucaugaagaaccaccugagagacaucaugggcauccccuacugcaacuacagcaaguacugcuaccugaaccacaccaccaccggcaagaccagccugcccaagugcugccuggugagcaacggcagcuaccugaacgagacccacuucagcgacgacaucgagcagcaggccgacaacaugaucaccgagaugcugcagaaggaguacauggagagacagggcaagaccccccugggccugguggaccuguucguguucagcaccagcuucuaccugaucagcaucuuccugcaccuggugaagauccccacccacagacacaucgugggcaagagcugccccaagccccacagacugaaccacaugggcaucugcagcugcggccuguacaagcagcccggcgugcccgugagauggaagagauga

SEQ ID NO: 33246 - RNA, 1476 nt, Artificial Sequence
  derived and/or modified CDS sequence (opt4) from LASV(G502-SLE-2009;Clade IV)__AIT17126__GPCmut8
augggccagaucgugaccuucuuccaggaggugccccacgugaucgaggaggugaugaacaucgugcugaucgcccugagcauccuggccgugcugaagggccuguacaacuucgccaccugcggccuggugggccugcugaccuuccugcugcugugcggcagaagcugcaccaccggccuguacaagggcguguacgagcugcagacccuggagcugaacauggagacccugaacaugugcaugccccugagcugcaccaagaacaacagccaccacuacaucauggugggcaacgagaccggccuggagcugacccugaccaacaccagcaucaucaaccacaaguucugcaaccugagcgacgcccacaagaagaaccuguacgaccacgcccugaugagcaucaucagcaccuuccaccugagcauccccaacuucaaccaguacgaggccaugagcugcgacuucaacggcggcaagaucagcgugcaguacaaccugagccacagcuacgccggcgacgccgccgaccacugcggcaccguggccaacggcgugcugcagaccuucaugagaauggccuggggcggcagcuacaucgcccuggacagcggcagaggcagaugggacugcaucaugaccagcuaccaguaccugaucauccagaacaccaccugggaggaccacugccaguucagcagacccagccccaucggcuaccugggccugcugagccagagaaccagagacaucuacaucagcagaagacugcugggcaccuucaccuggacccugagcgacagcgagggcaaggacacccccggcggcuacugccugaccagauggaugcugaucgaggccgagcugaagugcuucggcaacaccgccguggccaagugcaacgagaagcacgacgaggaguucugcgacaugcugagacuguucgacuucugcaagcaggccauccagagacugaaggcccccgcccagaugagcauccagcugaucaacaaggccgugaacgcccugaucaacgaccagcuggugaugaagaaccaccugagagacaucaugggcauccccuacugcaacuacagcagauacugcuaccugaaccacaccaccaccggcagaaccagccugcccaagugcugccuggugagcaacggcagcuaccugaacgagacccacuucagcgacgacaucgagcagcaggccgacaacaugaucaccgagaugcugcagaaggaguacauggagagacagggcaagaccccccugggccugguggaccuguucguguucagcaccagcuucuaccugaucagcaucuuccugcaccuggugaagauccccacccacagacacaucgugggcaagagcugccccaagccccacagacugaaccacaugggcaucugcagcugcggccuguacaagcagcccggcgugcccgugaaguggaagagauga

SEQ ID NO: 33247 - RNA, 1476 nt, Artificial Sequence
  derived and/or modified CDS sequence (opt4) from LASV(G733-SLE-2010;Clade IV)__AIT17154__GPCmut8
augggccagaucgugaccuucuuccaggaggugccccacgugaucgaggaggugaugaacaucgugcugaucgcccugagcauccuggccgugcugaagggccuguacaacuucgccaccugcggcaucgugggccuggugagcuuccugcugcugugcggcagaagcugcaccaccagccuguacaagggcguguacgagcugcagacccuggagcugaacauggagacccugaacaugugcaugccccugagcugcaccaagaacaacagccaccacuacaucauggugggcaacgagaccggccuggagcugacccugaccaacaccagcaucaucaaccacaaguucugcaaccugagcgacgcccacaagaagaaccuguacgaccacgcccugaugagcaucaucagcaccuuccaccugagcauccccaacuucaaccaguacgaggccaugagcugcgacuucaacggcggcaagaucagcgugcaguacaaccugagccacagcuacgccggcgacgccgccaaccacugcggcaccaucgccaacggcgugcugcagaccuucaugagaauggccuggggcggcagcuacaucgcccuggacagcggcagagacagaugggacugcaucaugaccagcuaccaguaccugaucauccagaacaccaccugggaggaccacugccaguucagcagacccagccccaucggcuaccugggccugcugagccagagaaccagagacaucuacaucagcagaagacugcugggcaccuucaccuggacccugagcgacagcgagggcaaggacacccccggcggcuacugccugaccagauggaugcugaucgaggccgagcugaagugcuucggcaacaccgccguggccaagugcaacgagaagcacgacgaggaguucugcgacaugcugagacuguucgacuucugcaagcaggccauccagagacugaaggcccccgcccagaugagcauccagcugaucaacaaggccgugaacgcccugaucaacgaccagcugaucaugaagaaccaccugagagacaucaugggcauccccuacugcaacuacagcaaguacugcuaccugaaccacaccaccaccggcaagaccagccugcccaagugcugccuggugagcaacggcagcuaccugaacgagacccacuucagcgacgacaucgagcagcaggccgacaacaugaucaccgagaugcugcagaaggaguacauggagagacagggcaagaccccccugggccugguggaccuguucguguucagcaccagcuucuaccugaucagcaucuuccugcaccuggugaagauccccacccacagacacguggugggcaagagcugccccaagccccacagacugaaccacaugggcaucugcagcugcggccuguacggccagcccggcgugcccgugaaguggaagagauga

SEQ ID NO: 33248 - RNA, 1476 nt, Artificial Sequence
  derived and/or modified CDS sequence (opt4) from MOPV/LASV reassortant(IGS-1;Clade IV)__AFY05576__GPCmut8
augggccagaucgugaccuucuuccaggaggugccccacgugaucgaggaggugaugaacaucgugcugaucgcccugagcgugcuggccgugcugaagggccuguacaacuucgccaccugcggccuggugggccuggugaccuuccugcugcugugcggcagaagcugcaccaccagccuguacaagggcguguacgagcugcagacccuggagcugaacauggagacccugaacaugugcaugccccugagcugcaccaagaacaacagccaccacuacaucauggugggcaacgagaccggccuggagcugacccugaccaacaccagcaucaucaaccacaaguucugcaaccugagcgacgcccacaagaagaaccuguacgaccacgcccugaugagcaucaucagcaccuuccaccugagcauccccaacuucaaccaguacgaggccaugagcugcgacuucaacggcggcaagaucagcgugcaguacaaccugagccacagcuacgccggcgacgccgccaaccacugcggcaccguggccaacggcgugcugcagaccuucaugagaauggccuggggcggcagcuacaucgcccuggacagcggcagaggcaacugggacugcaucaugaccagcuaccaguaccugaucauccagaacaccaccugggaggaccacugccaguucagcagacccagccccaucggcuaccugggccugcugagccagagaaccagagacaucuacaucagcagaagacugcugggcaccuucaccuggacccugagcgacagcgagggcgaggacacccccggcggcuacugccugaccagauggaugcugaucgaggccgagcugaagugcuucggcaacaccgccguggccaagugcaacgagaagcacgacgaggaguucugcgacaugcugagacuguucgacuucugcaagcaggccauccagagacugaaggcccccgcccagaugagcauccagcugaucaacaaggccgugaacgcccugaucaacgaccagcugaucaugaagaaccaccugagagacaucaugggcauccccuacugcaacuacagcaaguacugcuaccugaaccacaccaccaccggcagaaccagccugcccaagugcugccuggugagcaacggcagcuaccugaacgagacccacuucagcgacgacaucgagcagcaggccgacaacaugaucaccgagaugcugcagaaggaguacauggagagacagggcaagaccccccugggccugguggaccuguucguguucagcaccagcuucuaccugaucagcaucuuccugcaccuggugaagauccccacccacagacacaucgugggcaagagcugccccaagccccacagacugaaccacaugggcaucugcagcugcggccuguacaagcagcccggcgugcccgugaaguggaagagauga

SEQ ID NO: 33249 - RNA, 1476 nt, Artificial Sequence
  derived and/or modified CDS sequence (opt4) from LASV(LM765-SLE-2012;Clade IV)__AIT17814__GPCmut8
augggccagaucgugaccuucuuccaggaggugccccacgugaucgaggaggugaugaacaucgugcugaucgcccugagcauccuggccgugcugaagggccuguacaacuucgccaccugcggccuggugggccuggugaccuuccugcugcugugcggcagaagcugcaccaccagccuguacaagggcguguacgagcugcagacccuggagcugaacauggagacccugaacaugugcaugccccugagcugcaccaagaacaacagccaccacuacaucauggugggcaacgagaccggccuggagcugacccugaccaacaccagcaucaucgaccacaaguucugcaaccugagcgacgcccacagaaagaaccuguacgaccacgcccugaugagcaucaucagcaccuuccaccugagcauccccaacuucaaccaguacgaggccaugagcugcgacuucaacggcggcaagaucagcgugcaguacaaccugagccacagcuacgccaaggacgccgccgaccacugcggcaccguggccaacggcgugcugcagaccuucaugagaauggccuggggcggcagcuacaucgcccuggacagcggcagaggcagaugggacugcaucaugaccagcuaccaguaccugaucauccagaacaccaccugggaggaccacugccaguucagcagacccagccccaucggcuaccugggccugcugagccagagaaccagagacaucuacaucagcagaagacugcugggcaccuucaccuggacccugagcgacagcgagggcaaggacacccccggcggcuacugccugaccagauggaugcugaucgaggccgagcugaagugcuucggcaacaccgccguggccaagugcaacgagaagcacgacgaggaguucugcgacaugcugagacuguucgacuucugcaagcaggccauccagagacugaaggcccccgcccagaugagcauccagcugaucaacaaggccgugaacgcccugaucaacgaccagcugaucaugaagaaccaccugagagacaucaugggcauccccuacugcaacuacagcaaguacugcuaccugaaccacaccaccaccggcaagaccagccugcccaagugcugccuggugagcaacggcagcuaccugaacgagacccacuucagcgacgacaucgagcagcaggccgacaacaugaucaccgagaugcugcagaaggaguacauggagagacagggcaagaccccccugggccugguggaccuguucguguucagcaccagcuucuaccugaucagcaucuuccugcaccuggugaagauccccacccacagacacaucgugggcaagcccugccccaagccccacagacugaaccacaugggcaucugcagcugcggccuguacaagcagcccggcgugcccgugaaguggaagagauga

SEQ ID NO: 33250 - RNA, 1476 nt, Artificial Sequence
  derived and/or modified CDS sequence (opt4) from LASV(LM776-SLE-2012;Clade IV)__AIT17824__GPCmut8
augggccagaucgugaccuucuuccaggaggugccccacgugaucgaggaggugaugaacaucgugcugaucgcccugagcauccuggccgugcugaagggccuguacaacuucgccaccugcggccuggugggccuggugaccuuccugcugcugugcggcagaagcugcaccaccagcguguacaagggcguguacgagcugcagacccuggagcugaacauggagacccugaacaugugcaugccccugagcugcaccaagaacaacagccaccacuacaucauggugggcaacgagaccggccuggagcugacccugaccaacaccagcaucaucaaccacaaguucugcaaccugagcgacgcccacaagaagaaccuguacgaccacgcccugaugagcaucaucagcaccuuccaccugagcauccccaacuucaaccaguacgaggccaugagcugcgacuucaacggcggcaagaucagcgugcaguacaaccugagccacagcuacgccggcgacgccgccaaccacugcggcaccguggccaacggcgugcugcagaccuucaugagaauggccuggggcggcagcuacaucgcccuggacagcggccacggcaagugggacugcaucaugaccagcuaccaguaccugaucauccagaacaccaccugggaggaccacugccaguucagcagacccagccccaucggcuaccugggccugcugagccagagaaccagagacaucuacaucagcagaagacugcugggcaccuucaccuggacccugagcgacagcgagggcaaggacacccccggcggcuacugccugaccagauggaugcugaucgaggccgagcugaagugcuucggcaacaccgccguggccaagugcaacgagaagcacgacgaggaguucugcgacaugcugagacuguucgacuucugcaagcaggccauccagagacugaaggcccccgcccagaugagcauccagcugaucaacaaggccgugaacgcccugaucaacgaccagcugaucaugaagaaccaccugagagacaucaugggcauccccuacugcaacuacagcaaguacugcuaccugaaccacaccaccaccggcaagaccagccugcccaagugcugccuggugagcaacggcagcuaccugaacgagacccacuucagcgacgacaucgagcagcaggccgacaacaugaucaccgagaugcugcagaaggaguacauggagagacagggcaagaccccccugggccugguggaccuguucguguucagcaccagcuucuaccugaucagcaucuuccugcaccuggugaagauccccacccacagacacaucgugggcaagagcugccccaagccccacagacugaaccacaugggcaucugcagcugcggccuguacaagcagcccggcgugcccgugagauggaagagauga

SEQ ID NO: 33251 - RNA, 1476 nt, Artificial Sequence
  derived and/or modified CDS sequence (opt4) from LASV(Mad39;Clade IV)__ANH09722__GPCmut8
augggccagaucgugaccuucuuccaggaggugccccacgugaucgaggaggugaugaacaucgugcugaucgcccugagcauccuggccgugcugaagggccuguacaacguggccaccugcggccugaucggccuggugaccuuccugcugcugugcggcagaagcugcaccaccacccuguacaagggcguguacgagcugcaggcccuggagcugaacauggagacccugaacaugugcaugccccugagcugcaccaagaacaacagccaccacuacaucagagugggcaacgagaccggccuggagcugacccugaccaacaccagccugaucaaccacaaguucugcaaccugagcgacgcccacaagaagaaccuguacgaccacgcccugaugagcaucaucagcaccuuccaccugagcauccccaacuucaaccaguacgaggccaugagcugcgacuucaacgacggcaagaucagcgugcaguacaaccugagccacaccuacgccggcgacaccgccaaccacugcggcaccguggccaacggcgugcugcagaccuucaugagaauggccuggggcggcagcuacaucgcccuggacagcggcagaggcggcugggacugcaucaugaccagcuaccaguaccugaucauccagaacaccaccugggaggaccacugccaguucagcagacccagccccaucggcuaccugggccugcugagccagagaaccagagacaucuacaucagcagaagacugcugggcaccuucaccuggacccugagcgacagcgagggcaaggacacccccggcggcuacugccugaccagauggaugcugaucgaggccgagcugaagugcuucggcaacaccgccguggccaagugcaacgagaagcacgacgaggaguucugcgacaugcugagacuguucgacuucugcaagcaggccauccagagacugaaggcccccgcccagaugagcauccagcugaucaacaaggccgugaacgcccugaucaacgaccagcugaucaugaagaaccaccugagagacaucaugggcauccccuacugcaacuacagcaaguacugcuaccugaaccacaccgugaccggcaagaccagccugcccaagugcugccuggugagcaacggcagcuaccugaacgagacccacuucagcgacgacaucgagcagcaggccgacaacaugaucaccgagaugcugcagaaggaguacauggagagacagggcaagaccccccugggccugguggaccuguucguguucagcaccagcuucuaccugaucagcaucuuccugcaccuggugaagauccccacccacagacacguggugggcaagcccugccccaagccccacagacugaaccacaugggcaucugcagcugcggcuucuacaagcagcccggcgugcccgugagauggaagagauga

SEQ ID NO: 33252 - RNA, 1476 nt, Artificial Sequence
  derived and/or modified CDS sequence (opt4) from LASV(Z0947-SLE-2011;Clade IV)__AIT17840__GPCmut8
augggccagaucgugaccuucuuccaggaggugccccacgugaucgaggaggugaugaacaucgugcugaucgcccugagcauccuggccgugcugaagggccuguacaacuucgccaccugcggccuggugggccuggugaccuuccugcugcugugcggcagaagcugcaccaucagccuguacaagggcguguacgagcugcagacccuggagcugaacauggagacccugaacaugugcaugccccugagcugcaccaagaacaacagccaccacuacaucauggugggcaacgagaccggccuggagcugacccugaccaacaccagcaucaucaaccacaaguucugcaaccugagcgacgcccacaagaagaaccuguacgaccacgcccugaugagcaucaucagcaccuuccaccugagcauccccaacuucaaccaguacgaggccaugagcugcgacuucaacggcggcaagaucagcgugcaguacaaccugagccacagcuacgccggcgacgccgccaaccacugcggcaccguggccaacggcgugcugcagaccuucaugagaauggccuggggcggcagcuacaucgcccuggacagcggcagagacagaugggacugcaucaugaccagcuaccaguaccugaucauccagaacaccaccugggaggaccacugccaguucagcagacccagccccaucggcuaccugggccugcugagccagagaaccagagacaucuacaucagcagaagacugcugggcaccuucaccuggacccugagcgacagcgagggcaaggacacccccggcggcuacugccugaccagauggaugcugaucgaggccgagcugaagugcuucggcaacaccgccguggccaagugcaacgagaagcacgacgaggaguucugcgacaugcugagacuguucgacuucugcaagcaggccauccagagacugaaggcccccgcccagaugagcauccagcugaucaacaaggccgugaacgcccugaucaacgaccagcugaucaugaagaaccaccugagagacaucaugggcauccccuacugcaacuacagcaaguacugcuaccugaaccacaccaccaccggcaagaccagccugcccaagugcugccuggugagcaacggcagcuaccugaacgagacccacuucagcgacgacaucgagcagcaggccgacaacaugaucaccgagaugcugcagaaggaguacauggagagacagggcaagaccccccugggccugguggaccuguucguguucagcaccagcuucuaccugaucagcaucuuccugcaccuggugaagauccccacccacagacacaucgugggcaagcccugccccaagccccacagacugaaccacaugggcaucugcagcugcggccuguacaagcagcccggcgugcccgugaaguggaagagauga

SEQ ID NO: 33253 - RNA, 1476 nt, Artificial Sequence
  derived and/or modified CDS sequence (opt5) from LASV(Josiah;Clade IV)__NP_694870__GPCmut8
augggccagaucgugaccuucuuucaagaggucccccacguuauugaagaggugaugaacaucgugcugauugcccucagcguccuggcugugcuuaaggggcuguacaauuucgccacaugcggacucguuggccuggugacguuucuucugcucugugggagauccugcaccacaucucuguauaaaggagucuacgaacugcagacccucgagcugaacauggaaacacuuaauauguguaugccucugagcugcaccaagaacaauucccaucacuauaucauggugggcaacgagacagggcucgagcugacccuuacgaauaccucuauuaucaaccauaaauucuguaaucugagcgacgcgcacaagaaaaaccucuacgaucaugcucugauguccaucauuucuacauuucaccugagcaucccgaauuucaaccaguaugaagccauguccugcgacuuuaauggaggcaagauuagcguucaguacaaccucucucacuccuaugccggcgaugcugccaaucauugugggaccguggcuaacggaguccugcaaacauucaugcggauggccuggggcgggagcuacaucgcgcuugacucuggacgcggcaacugggauugcauuaugaccuccuaccaguaucugaucauucagaauacgacaugggaggaccacugucaguuuagcagacccucuccuaucggguaccucggacugcuuucccaacggacccgcgauaucuauauuagcagacggcugcucggcacauucaccuggacccuguccgacucugaaggcaaggauacacccgggggauacugccugacgcgcuggaugcucaucgaggccgagcugaaauguuuuggcaacaccgcuguggccaagugcaaugaaaaacaugacgaggaguucugcgauaugcuuagacuguuugacuucuguaagcaggcuauucagcggcucaaagccccugcgcagaugagcauccaacugauuaacaaggccgugaaugcucuuaucaacgaucagcugaucaugaagaaucaccuccgcgacauuauggggauccccuauugcaacuacuccaaauauuguuaccugaaucacacaaccacaggaagaaccagccugccuaagugcugucucgucucuaacggcuccuaccugaaugaaacgcauuucagcgacgauauugaacagcaagccgacaacaugaucacagagaugcuucagaaagaguauauggaacggcaggggaagaccccgcugggacucguugaucuguuuguguucucuaccagcuuuuaccugauuuccaucuuccuucaccucgugaaaauccccacacaucgccacauugucggcaagucuugcccuaaaccccauagacugaaucacaugggcaucuguagcugcgggcuguauaagcagccuggagugcccguuaaguggaaacgguga

SEQ ID NO: 33254 - RNA, 1473 nt, Artificial Sequence
  derived and/or modified CDS sequence (opt5) from LASV(LP;Clade I)__AAF86701__GPCmut8
augggccagaucauuaccuucuuucaagaggugccccacgucaucgaagagguuaugaacauugugcugaucgcccucagccugcuugcuauucugaaggggcucuacaauaucgccacaugcggaaucauuggccugguggcguuccuuuuucugugugggaaauccugcucucucacgcugaagggaggcuaugaacugcagacccucgagcugaacauggaaacacuuaauauguguaugccucugagcugcaccaaaaacuccucucaucacuacaucagagucgggaaugagacaggacucgagcugacccuuacaaacaccagcauuaucaaucauaaguucuguaaccuguccgacgcucacaaaaagaaucucuaugaucaugcccugaugucuauuaucagcacguuucaccuguccauuccgaacuucaaucaguacgaagccaugagcugcgacuuuaacggcggcaagaucucugugcaguauaaucucucccacagcuacgcuggggaugccgcugagcauuguggaaccguugccaacggcgugcugcaaacauucaugcggauggcguggggagggcgcuauaucgcccuugacucuggcaaagggaauugggauugcauuaugaccuccuaccaguaccugaucauucagaacacaaccugggaagaccacugucaguuuagcagacccucuccuaucggauaucucggccugcuuucccaacggacgcgcgauauuuacaucagcagacggcugcucggcacauucaccuggacacuguccgacucugaggggaacgagacccccggaggcuauugccugacccgcuggaugcucaucgaagcugagcugaaguguuuugggaauacagccgucgcuaaaugcaacgaaaagcaugaugaggaguucugcgacaugcuuagacuguuugauuucuguaaacaggccauucggcgccucaaggcgccugcccagaugagcauccagcugauuaauaaggcugugaacgcccuuaucaaugaccaacugauuaugaaaaaccaccucagagauaucaugggaauccccuacugcaauuauuccaaguacuguuaucugaaccacacgagcucuggccggaccucccugccuaaaugcugucucauuagcaaugggucuuaccugaacgaaacacaguucagcgacgacaucgagcagcaagcugauaauaugauuaccgaaaugcuucagaaggaguacaucgaacgccagggaaaaacaccgcugggccucguugacauuuuuaucuucuccaccucuuuuuaucugauuagcaucuuccugcaucuuaucaagauucccacgcacagacauaucgugggcaaaccuugccccaagccucaccggcucaaccauaugggggucuguuccugcggacuguacaagcaccccggcgugccgacaaaauggaagcgcuga

SEQ ID NO: 33255 - RNA, 1473 nt, Artificial Sequence
  derived and/or modified CDS sequence (opt5) from LASV(803213;Clade II)__AAF86703__GPCmut8
augggccagaucauuaccuucuuucaagaggugccccacgucaucgaagagguuaugaacauugugcugaucgcccucagccugcuugcuauucugaaggggaucuacaauguggccacaugcggacucuucggccugaucuccuuucuucugcucugugggagaucuugcagcgucacguauaaaggaguguacgaacugcagacccuggagcucaacauggcgaaucugaacauguguaugccucuuuccugcacaaagaauaacucucaucacuauauuaugguuggcaaugaaaccgggcuggagcucacacugaccaacacaagcaucauuaaucauaaauucuguaaccuuuccgacgcucacaagaaaaaucuguacgaucaugcccucaugucuaucauuagcaccuuucaccuguccaucccgaacuucaaucaguaugaggccaugagcugcgacuuuaacggaggcaagauuucugugcaguacaaucugucccacagcuucgcugucgaugccgcuaaccauuguggcacgaucgccaacggggugcuccaaaccuuuaugcggauggcguggggaggcucuuauaucgcccuggacuccgggaagggaaauugggauugcauuaugacaagcuaccaguaccuuaucauucagaacaccacaugggaagaccacugucaguucucucgccccuccccuaucggcuaucuggggcuccugagccaaagaacccgggauauuuacaucucccgcagacuucugggaacguuuacauggacccucucugacagcgagggcaaugaagcucccggcggguauugccugacacgguggaugcugaucgaggccgagcucaaauguuucggaaacaccgcuguugccaagugcaaugaaaaacaugaugaggaauuuugcgacaugcugcgccuuuucgauuucuguaagcaggcgauuaaaagacugaagaccccugcccagauguccauccagcucauuaacaaggcugugaaugcccugaucaacgaccaacuuauuaugaaaaaucaucugcgggauaucaugggcauccccuacugcaacuauagccgcuacuguuaucucaaucacacagucacggggaagaccucucugccuagaugcugucugguguccaacggaagcuaccucaaugagacacacuuuucugacgacauugaacagcaggcugauaacaugaucaccgagaugcugcaaaaagaguacauggaccggcagggcaagacaccgcuugggcugguggaucucuucgucuuuagcaccuccuucuaucugauuucuaucuuucugcaccuuguuaaaauucccacgcaucgccacaucgugggaaagccuugccccaaaccucauagacucaaucacaugggcauuuguagcugcggccuguacaagcaccccggggugccggucaaguggaaacgguga

SEQ ID NO: 33256 - RNA, 1473 nt, Artificial Sequence
  derived and/or modified CDS sequence (opt5) from LASV(GA391;Clade III)__CAA36645__GPCmut8
augggccagaucgugaccuucuuucaagaggucccccacguuauugaagaggugaugaacaucgugcugauugcccucagcauccuggcuauucuuaaggggcuguacaaugucgccacaugcggacucaucggccuggugacguuccuucugcucuccgggagaucuuguagccugaucuauaaaggaaccuacgaacugcagacacucgagcugaacauggaaacccuuaauaugugcaugccucuguccuguacaaagaacaauucucaucacuauauucggguuggcaacgagaccgggcucgagcugacacuuaccaauacgagcauccugaaccauaaauuuugcaaucucuccgacgcgcacaagcgcaaccuguacgaucauucucugaugagcauuaucuccaccuuccaccucagcauuccgaauuuuaaccaguaugaagcuaugucuugugacuucaauggaggcaaaaucacagugcaguacaaccugucccacagcuuugccgucgaugccgcuggccauugcgggacccuugccaauggagugcugcaaacauucaugagaauggcuuggggcgggucuuauauugcccucgacuccggacggggcaacugggauuguaucaugaccagcuaccaguaccugaucauucagaacacgacaugggacgaucacugccaguuuucucgccccuccccuaucggguaucuuggacugcucagccaaagaacccgggacauuuacaucucccgcagacugcugggcacauucaccuggacccucucugauagcgagggcaaugaaacacccgggggauauugucugacgcgguggaugcuuauugaggcggagcugaagugcuuuggcaacaccgccguugcuaaguguaaugaaaaacaugacgaggaguucugcgauaugcuccgccuguuugacuucugcaagcaggccaucagacggcuuaaaaccccugcucagauguccauccagcugauuaacaaggccgugaaugcgcucaucaacgaucaacugauuaugaaaaaucaucugcgcgacaucauggggauucccuacuguaacuauagcagauacugcuaucucaaucacacaucuacaggaaagaccucccugccucgguguugccuuaucagcaacggcucuuaccugaaugaaacgaaguucagcgacgauaucgaacagcaggccgacaacaugauuacagagaugcuccaaaaagaguacaucgaucgccaggggaagaccccgcugggacuggucgaccuuuuuguguucuccaccucuuuuuaucucauuagcaucuuccugcaccuggugaaaauucccacacacagacauaucgucggcaagccuugucccaaaccucaccggcucaaucauaugggcauuugcuccugugggcuguacaagcagcccggaguuccggugagauggaaacgcuga

SEQ ID NO: 33257 - RNA, 1476 nt, Artificial Sequence
  derived and/or modified CDS sequence (opt5) from LASV(AV;Clade V)__CCA30314__GPCmut8
augggccagaucgugaccuucuuucaagaggucccccacguuauugaagaggugaugaacaucgugcugauugcccucagcauccuggcuguccuuaaggggcuguacaauauugccacaugcggacucaucggccugaucacguuccuucugcucugugggagauccugcucuagcaaccuguauaaaggaguguacgaacugcagucccucgaccugaauauggagacccuuaacauguguaugccucugucuugcacaaagaauaacagccaucacuauauucggguuggcaaugauaccgggcucgaacugacacuuaccaacacauccauccugaaucauaaauuuuguaaccucucugacgcgcacaagaaagaucuguacgaccaugcucugaugagcauuaucuccaccuuccaccucagcauuccgaauuuuaaccaguaugaggccaugucuugcgauuucaauggaggcaagaucuccgugcaguacaaccugagccacucuuaugccauugacgcugccaaucauuguggcacggucgcuaacgggauccuucaaaccuuuaugcgcauggccuggggaggcuccuacaucgcgcuggauagcgggagaggaaacugggacugcauuaugacaucuuaccaguaucucaucauucagaauaccacaugggagaaccacugucaguucucccggcccagcccuaucggcuaccuggggcuucugucccaacgcaccagagauauuuauaucucucggcgccuccugggaacguuuacauggacccugagcgacuccgaaggcaaugccacacccggcggguacugccucaccagauggaugcugaucgaggcugaacuuaaguguuucggaaacaccgccguggcuaaaugcaaugagaagcaugaugaggaauuuugcgacaugcugcgccucuucgauuuuuguaaacaggccauuagccggcugaagucuccugcgcagauguccauccagcuuauuaacaaagccguuaaugcucugaucaacgaccaacucauuaugaagaaucaccugagagacaucaugggcauccccuauugcaacuacagcaaguauuguuaccugaaucacacaauuacggggaaaaccucucucccuaagugcugucuggugagcaacggauccuaccuuaaugagacacauuucucugaugacaucgaacagcaggccgauaacaugauuaccgagaugcugcaaaaagaauauauggagcggcagggcaagacaccgcucgggcuggucgaccuguucguguuuagcaccuccuucuaccuuaucagcauuuuucuccgccuggugaaaauccccacgcacagacauauugucggaaagccuugccccaaaccucaccggcugaaucauaugggcaucuguucuugcggccucuauaagcagcccgggguuccggugcgcuggaagagauga

SEQ ID NO: 33258 - RNA, 1473 nt, Artificial Sequence
  derived and/or modified CDS sequence (opt5) from LASV(Togo/2016/7082;Clade VI)__AMR44577__GPCmut8
augggccagaucauuaccuucuuucaagaggugccccacgucaucgaagagguuaugaacauugugcugaucgcccucagccugcuugcuauucugaaggggguguacaaugucgccacaugcggaaucaucggccucgugacguuccuguuucuuugugggagauccugcucucugauuuauaaaggaagcuacgaacuccagacccuggagcugaacauggaaacacucaauauguguaugccucuguccugcaccaagaacucuagccaucacuauauccggguuggcaaugagacagggcuugagcugacccucacaaacaccuccauuaucaaucauaaauucuguaaccugucugacgcgcacaagcgcaaucuuuacgaucaugcucugaugagcauucucuccacguuucaccugagcaucccgaacuucaaucaguaugaagccaugucuugcgacuuuaacggaggcaaaauuuccgugcaguacaaucugagccacgccuaugcugucgaugccgcugagcauuguggcaccguggccaacgggguucuccaaacauucaugagaauggcguggggaggcucuuacaucgcccuggacuccgggcggggaaauugggauugcaucaugaccagcuaccaguaucuuauuauccagaacacaaccugggaagaccacugucaguuuucucgccccuccccuauuggcuaccuggggcuccugagccaaagaacgcgggauaucuauauuucccgcagacuucugggaacauucaccuggacacucucugacagcgagggcaacgagacccccggcggguacugccugacccgguggaugcugaucgaagcugagcucaaguguuuuggaaauacagccguggcuaagugcaacgaaaaacaugaugaggaguucugcgacaugcugcgccuuuuugauuucuguaagcaggccauccagagacugaaauccccugcgcagaugagcauucaacucaucaauaaggccgucaacgcucugauuaaugaccagcuuaucaugaaaaaccaucugcgggauaugaugggcauucccuauugcaauuacucuaaguauuguuaccucaaccacacguccagcgggcgcaccucucugccuaagugcugucuggugagcaauggauccuaccucaacgaaacacacuucucugacgacaucgagcagcaagccgauaauaugaucaccgaaaugcugcagaaagaguauauugacagacagggcaagacaccgcuugggcugguggaucucuuugucuucagcaccuccuuuuaccugaucagcauuuuccugcaccuuaucaaaauucccacgcaucggcacaucguuggaaagccuugccccaaaccucaucgccucaaccacaugggcauuuguucuugcggccuguauaagcagcccggggugccgacaagauggaaacgguga

SEQ ID NO: 33259 - RNA, 1473 nt, Artificial Sequence
  derived and/or modified CDS sequence (opt5) from LASV(KAK-428;Clade n.d. (VII))__ANH09740__GPCmut8
augggccagaucgugaccuucuuucaagaggucccccacguuauugaagaggugaugaacaucgugcugauugcccucagccugcuugcuauccugaaggggcucuacaauuucgccacaugcggagucauuggccugaucacguuucuucugcucugugggagauccugcucugcgaccuauaaaggacaguacgaacugcagacacuggagcucaacauggaaagccugaauauguguaugccucuuuccugcaccaagaacaauucucaucacuauauccgggcuggcaacaauacagggcuggagcucacccugacaaacaccagcauuaucucccauaaauucuguaaucuuucugacgcccacaagaaaaaccuguacgaucauacgcucaugagcauuaucaccacauuucaccuguccauuccgaauuucaaccaguaugaggccaugagcugcgacuuuaauggaggcaagaucucuauucaauacaaccugucccacagcuaugcuggcgaugccgcucagcauugugggaccguggccaauggaguucuccagacauucaugcgcauggcguggggcgggucuuaccuggcccuugacuccggaagacggggcugggauugcaucaucagcucuuaccaguaucugauuauccaaaacaccacgugggacgaucacugucaguuuucccgccccagcccuauuggguaccucggauucgugucccagaagacaagagacaucuauauuucucggcgccugcuuggcaccuuuacauggacccugagcgauuccgaaggccaugacaugcccgggggauacugccucaccagauggaugcugaucgaggcugaucugaaauguuucggcaacacagccgucgcuaagugcaaugaaaaacacgacgaggaguuuugcgauauguggcgccucuucgacuucuguaagcaggccauccaacggcugaaagcgccugcccagaugaacauucagcuuaucaauaaggcugugaacgcccugauuaaugaccaacucaugaugaagaaccaccugagagauaucauggggauucccuauugcaauuacagcaaauuuuguuaucuuaacaauacgaccacaggacggaccucucugccucgcugcugucucaucuccaacggcagcuaccugaaugaaacacauuucucugacgauaucgagcagcaggcugacaacaugauuaccgaaaugcugcagaaggaguacauggauagacaagggaaaacgccgcucggacugguugaccuuuuuguguucagcacauccuuuuaucugaucaccauuuuccuccaccuggucaagauccccacccaucggcacauugugggcaaaccuugccccaagccucaucgccugaaucacaugggcaucuguucuugcgggcuuuacaaacagcccggagugccggucagauggaagcgguga

SEQ ID NO: 33260 - RNA, 1473 nt, Artificial Sequence; identical to SEQ ID NO: 33254
  derived and/or modified CDS sequence (opt5) from LASV(Pinneo-NIG-1969;Clade I)__AIT17836__GPCmut8

SEQ ID NO: 33261 - RNA, 1473 nt, Artificial Sequence
  derived and/or modified CDS sequence (opt5) from LASV(ISTH0009-NIG-2011;Clade II)__AIT17404__GPCmut8
augggccagaucauuaccuucuuucaagaggugccccacgucaucgaagagguuaugaacauugugcugaucgcccucagccugcuugcuauucugaaggggaucuacaauguggccacaugcggacucuucggccuggucuccuuucuucugcucugugggagaucuugcagcacgaccuauaaaggaguguacgaacugcagacacuggagcucgacauggcgucccugaacauguguaugccucuuucuugcaccaagaauaacagccaucacuauaucaugguuggcaaugaaacagggcuggagcucacccugacaaacaccuccauuaucaaucauaaauucuguaaccuuucugaugcucacaagaaaaaucuguacgaccaugcccucaugagcauuaucuccacguuucaccugagcauuccgaacuucaaucaguaugaggccaugucuugcgauuuuaacggaggcaagaucuccgugcaguacaaucugagccacgcuuaugccgucgacgcugccaaccauuguggcaccauugcgaauggggugcuccaaacauucaugcggauggccuggggaggcucuuacaucgcucuggauuccgggaagggaagcugggacugcaucaugaccucuuaccaguaucuuauuauccagaacacaaccugggaagaucacugucaguuuucccgccccagcccuauuggcuaccuggggcuccugucccaaagaacgcgggacaucuauauuucucgcagacuucugggaacauucaccuggacacucagcgauuccgagggcaacgaaacccccggcggguacugccugacccgguggaugcugaucgaggccgagcucaaauguuuuggaaauacagcuguugccaagugcaacgaaaaacaugacgaggaguucugcgauaugcugcgccuuuuugacuucuguaagcaggcgaucagacggcugaaaacgccugcccagaugagcauucagcucaucaauaaggcugugaacgcccugauuaaugaucaacuuaucaugaagaaccaucugcgcgacauuaugggcauccccuauugcaauuacucuaaauauuguuaccucaaccacaccgucacagggaagaccucccugccuagaugcugucuggugagcaauggaucuuaccucaacgaaacacacuucagcgacgauaucgaacagcaggcugacaauaugauuaccgagcugcuucaaaaagaguauauggaucggcagggcaagacgccgcuggggcucguggaccuguuugucuucuccacaucuuuuuaccugaucagcauuuuccuucaccucaucaaaauucccacccaucgccacaucaccggaaagccuugccccaaaccucauagacugaaccacaugggcauuuguuccugcggccuguauaagcaccccgggguuccggugaaguggaaacgguga

SEQ ID NO: 33262 - RNA, 1473 nt, Artificial Sequence
  derived and/or modified CDS sequence (opt5) from LASV(ISTH2010-NIG-2012;Clade II)__AIT17482__GPCmut8
augggccagaucauuaccuucuuucaagaggugccccacgucaucgaagagguuaugaacauugugcugaucgcccucagccugcuugcuauucugaaggggaucuacaauguggccacaugcggacucuucggccuggucuccuuucuucugcucugugggagaucuugcagcacgaccuauaaaggaguguacgaacugcagacacuggagcucgacauggcgucccugaacauguguaugccucuuucuugcaccaagaauaacagccaucacuauaucaugguuggcaaugaaacagggcuggagcucacccugacaaacaccuccauuaucaaucauaaauucuguaaccuuucugaugcucacaagaaaaaucuguacgaccaugcccucaugagcauuaucuccacguuucaccugagcauuccgaacuucaaucaguaugaggccaugucuugcgauuuuaacggaggcaagaucuccgugcaguacaaucugagccacgcuuaugccgucgacgcugccaaccauuguggcaccauugcgaauggggugcuccaaacauucaugcggauggccuggggaggcucuuacaucgcucuggauuccgggaagggaagcugggacugcaucaugaccucuuaccaguaucuuauuauccagaacauuacaugggaagaucacugucaguuuucccgccccagcccuaucggcuaccuggggcuccugucccaaagaacccgggacauuuauaucucucgcagacuucugggaacguucacauggacccucagcgauuccgagggcaacgaaacacccggcggguacugccugacccgguggaugcugaucgaggccgagcucaaauguuuuggaaauaccgcuguugccaagugcaacgaaaaacaugacgaggaguucugcgauaugcugcgccuuuuugacuucuguaagcaggcgauuagacggcugaaaacgccugcccagaugagcauccagcucauuaauaaggcugugaacgcccugaucaaugaucaacuuauuaugaagaaccaucugcgcgacaucaugggcauccccuauugcaauuacucuaaauauuguuaccucaaccacacagucaccgggaagacaucccugccuagaugcugucuggugagcaauggaucuuaccucaacgaaacccacuucagcgacgauauugaacagcaggcugacaauaugaucacagagcugcuucaaaaagaguauauugaucggcagggcaagaccccgcuggggcucguggaccuguuugucuucuccacgucuuuuuaccugaucagcauuuuccuucaccucguuaaaauccccacacaucgccacguggugggaaagccuugccccaaaccucauagacugaaccacaugggcauuuguuccugcggccuguauaagcaccccggggucccggugaaguggaaacgguga

SEQ ID NO: 33263 - RNA, 1473 nt, Artificial Sequence
  derived and/or modified CDS sequence (opt5) from LASV(Lassa virus/H.sapiens-wt/NGA/2015/ISTH_0543;Clade II)__AVO03639__GPCmut8
augggccagaucauuaccuucuuucaagaggugccccacgucaucgaagagguuaugaacauugugcugaucgcccucagccugcuugcuauucugaaggggaucuacaauguggccacaugcggacucuucggccuggucuccuuucuucugcucugugggagaucuugcagcacgaccuauaaaggaguguacgaacugcagacacuggagcucgacauggcgaaccugaauauguguaugccucuuuccugcaccaagaacaauucucaucacuauaucaugguuggcaacgaaacagggcuggagcucacccugacaaauaccagcauuaucaaccauaaauucuguaaucuuuccgaugcucacaagaaaaaccuguacgaccaugcccucaugucuauuaucagcacguuucaccuguccauuccgaauuucaaccaguaugaggccaugagcugcgauuuuaauggaggcaagaucucugugcaguacaaccugucccacaccuaugcugucgacgccgcuaaucauuguggcacaauugccaacggggugcuccaaaccuucaugcggauggcguggggaggcagcuacaucgcccuggauucugggaagggauccugggacugcaucaugacaagcuaccaguaucuuguuauucagaacaccacgugggaagaucacugucaguuuucucgccccuccccuaucggcuaccuggggcuccugagccaaagaacacgggacauuuauaucucccgcagacuucugggaaccuucacauggacccucucugauagcgagggcaaugaaacccccggcggguacugccugacacgguggaugcugauugaggcugagcucaaauguuuuggaaacacggccguggcuaagugcaaugaaaaacaugacgaggaguucugcgauaugcugcgccuuuuugacuucuguaagcaggccaucagacggcugaaaaccccugcgcagauguccauccagcucauuaacaaggccgucaaugcucugaucaacgaucaacuuauuaugaagaaucaucugcgcgacaucaugggcauucccuauugcaacuacagcaaauauuguuaccucaaucacacagugaccgggaagacaucucugccuagaugcugucugguguccaacggaagcuaccucaaugaaacccacuucucugacgauaucgaacagcaggccgacaacaugaucacggagcugcuucaaaaagaguauauugaucggcagggcaagacaccgcuggggcucgucgaccuguuuguuuucagcaccuccuuuuaccugaucucuauuuuccuucaccucgugaaaauccccacccaucgccacauuacaggaaagccuugccccaaaccucauagacugaaucacaugggcaucuguagcugcggccuguauaagcaccccggggugccggucaaguggaaacgguga

SEQ ID NO: 33264 - RNA, 1473 nt, Artificial Sequence
  derived and/or modified CDS sequence (opt5) from LASV(Lassa virus/H.sapiens-wt/NGA/2016/ISTH_0009;Clade II)__AVO03571__GPCmut8
augggccagaucauuaccuucuuucaagaggugccccacgucaucgaagagguuaugaacauugugcugaucgcccucagccugcuugcuauucugaaggggaucuacaauguggccacaugcggacuccugggccuugucuccuuccugcuccugugugggagaucuugcagcacgaccuauaaaggaguguacgaacugcagacacucgagcuggacauggcgucccuuaacauguguaugccucugucuugcaccaagaauaacagccaucacuauaucaugguuggcaaugaaacagggcucgagcugacccuuacaaacaccuccauuaucaaucauaaauuuuguaaccugucugaugcucacaagaaaaaucucuacgaccaugcccugaugagcauuaucuccacguuccaccugagcauuccgaacuuuaaucaguaugaggccaugucuugcgauuucaacggaggccggaucuccgugcaguacaaucucagccacucuuaugcugucgacgccgcuaaccauuguggcaccauugccaauggggugcugcaaacauuuaugcgcauggcguggggaggcuccuacaucgcccuugauagcgggaagggaucuugggacugcaucaugaccuccuaccaguaucugauuauccagaacacaaccugggaagaucacugucaguucagcagacccuccccuauuggcuaccucgggcugcuuucucaacggacgcgcgacaucuauauuagcagacggcugcucggaacauuuaccuggacacuguccgauagcgagggcaacgaaacccccggcggguacugccugacccgcuggaugcucaucgaggcugagcugaaguguuucggaaauacagccguugcuaaaugcaacgaaaagcaugacgaggaauuuugcgauaugcuuagacuguucgacuuuuguaaacaggccauccggcgccucaagacgccugcgcagaugucuauucagcugaucaauaaagccgugaacgcucuuauuaaugaucaacugaucaugaagaaccaccucagagacauuaugggcauccccuauugcaauuacuccaaguauuguuaccugaaccacaccgucacagggaaaaccagccugccucggugcugucucgugucuaauggaagcuaccugaacgagacacauuucuccgacgauaucgaacagcaggccgacaauaugauuaccgagcuucugcaaaaggaguauaucgaucgccagggcaaaacgccgcucgggcugguggaccuguucgucuuuucuaccagcuucuaccuuauuuccaucuuucuccaccugguuaagauucccacacauagacacaucaccggaaaaccuugccccaagccucaucggcugaaccacaugggcauuuguagcugcggccucuauaaucaccccggggugccggugaaauggaagcgcuga

SEQ ID NO: 33265 - RNA, 1473 nt, Artificial Sequence
  derived and/or modified CDS sequence (opt5) from LASV(Lassa virus/H.sapiens-wt/NGA/2016/ISTH_0017;Clade II)__AVO03567__GPCmut8
augggccagaucauuaccuucuuucaagaggugccccacgucaucgaagagguuaugaacauugugcugaucgcccucagccugcuugcuauucugaaggggaucuacaauguggccacaugcggacucuucggccuggucuccuuucuucugcucugugggagaucuugcagcacgaccuauaaaggaguguacgaacugcagacacuggagcucgacauggcgucccugaacauguguaugccucuuucuugcaccaagaauaacagccaucacuauaucaugguuggcaaugaaacagggcuggagcucacccugacaaacaccuccauuaucaaucauaaauucuguaaccuuucugaugcucacaagaaaaaucuguacgaccaugcccucaugagcauuaucuccacguuucaccugagcauuccgaacuucaaucaguaugaggccaugucuugcgauuuuaacggaggcaagaucuccgugcaguacaaucugagccacaccuaugcuauugacgccgcuaaccauuguggcacaaucgccaaugggguccuccaaaccuucaugcggauggcguggggaggcucuuacaucgcccuggauuccgggaagggaagcugggacugcauuaugacaucuuaccaguaucuuaucauucagaacaccacgugggaagaucacugucaguuuucccgccccagcccuaucggcuaccuggggcuccugucccaaagaacacgggacauuuauaucucucgcagacuucugggaaccuucacauggacccucagcgauuccgagggcaacgaaacccccggcggguacugccugacacgguggaugcugaucgaggcugagcucaaauguuuuggaaauacggccguggcuaagugcaacgaaaaacaugacgaggaguucugcgauaugcugcgccuuuuugacuucuguaagcaggccauuagacggcugaaaaccccugcgcagaugagcauccagcucauuaauaaggccguuaacgcucugaucaaugaucaacuuauuaugaagaaccaucugcgcgacaucaugggcauccccuauugcaauuacucuaaauauuguuaccucaaccacacagugaccgggaagacaucccugccuagaugcugucuggucagcaauggaucuuaccucaacgaaacccacuucagcgacgauauugaacagcaggccgacaauaugaucacggagcugcuucaaaaagaguauauggaucggcagggcaagacaccgcuggggcucguggaccuguuuguguucuccaccucuuuuuaccugauuagcaucuuccuucaccucguccgcauucccacccauagacacguuaucggaaaaccuugccccaagccucaucggcugaaccacaugggcauuuguuccugcggccuguauaaacaccccggggugccggugaaguggaagcgcuga

SEQ ID NO: 33266 - RNA, 1473 nt, Artificial Sequence
  derived and/or modified CDS sequence (opt5) from LASV(Lassa virus/H.sapiens-wt/NGA/2018/ISTH_0959;Clade II)__AVV65099__GPCmut8
augggccagaucauuaccuucuuucaagaggugccccacgucaucgaagagguuaugaacauugugcugaucgcccucagccugcuugcuauucugaaggggaucuacaauguggucacaugcggacucuucggccugguguccuuucuucugcucugugggagaucuugcagcacgaccuauaaaggaguuuacgaacugcagacacuggagcucgacauggccucccugaacauguguaugccucuuucuugcaccaagaauaacagccaucacuauaucauggugggcaaugaaacagggcuggagcucacccugacaaacaccuccauuaucaaucauaaauucuguaaccuuucugaugcgcacaagaaaaaucuguacgaccaugcucucaugagcauuaucuccacguuucaccugagcauuccgaacuucaaucaguaugaggccaugucuugcgauuuuaacggaggcaagaucuccguccaguacaaucugagccacgccuaugcuauugacgccgcuaaccauuguggcaccaucgccaauggggugcuccaaacauucaugcggauggcguggggaggcucuuacaucgcccuggauuccgggaagggaagcugggacugcauuaugaccucuuaccaguaucuuaucauucagaacacaaccugggaagaucacugucaguuuucccgccccagcccuaucggcuaccuggggcuccugucccaaagaacgcgggacauuuauaucucucgcagacuucugggaacauucaccuggacacucagcgauuccgagggcaacgaaacccccggcggguacugccugacccgguggaugcugaucgaggcugagcucaaauguuuuggaaauacagccguugcuaagugcaacgaaaaacaugacgaggaguucugcgauaugcugcgccuuuuugacuucuguaagcaggccauuagacggcugaaaacgccugcgcagaugagcauccagcucauuaauaaggccgugaacgcucugaucaaugaucaacuuauuaugaagaaccaucugcgcgacaucaugggcauccccuauugcaauuacucuaaauauuguuaccucaaccacaccgucacagggaagaccucccugccuagaugcugucuggugagcaauggaucuuaccucaacgaaacacacuucagcgacgauauugaacagcaggccgacaauaugaucaccgagcugcuucaaaaagaguauauugaucggcagggcaagacgccgcuggggcucguggaccuguuugucuucuccacaucuuuuuaccugaucagcauuuuccuucaccucguuaaaauccccacccaucgccacgugauuggaaagccuugccccaaaccucauagacugaaccacaugggcaucuguuccugcggccuguauaagcaccccggggugccggucaaguggaaacgguga

SEQ ID NO: 33267 - RNA, 1473 nt, Artificial Sequence
  derived and/or modified CDS sequence (opt5) from LASV(LASV003-NIG-2008;Clade II)__AIT17580__GPCmut8
augggccagaucauuaccuucuuucaagaggugccccacgucaucgaagagguuaugaacauugugcugaucgcccucagccugcuugcuauucugaaggggaucuacaauguggccacaugcggacucuucggccuggucuccuuucuucugcucugugggagaucuugcagcacgaccuauaaaggaguguacgaacugcagacacuggagcucgacauggcgucccugaacauguguaugccucuuucuugcaccaagaauaacagccaucacuauaucaugguuggcaaugaaacagggcuggagcucacccugacaaacaccuccauuaucaaucauaaauucuguaaccuuucugaugcucacaagaaaaaucuguacgaccaugcccucaugagcauuaucuccacguuucaccugagcauuccgaacuucaaucaguaugaggccaugucuugcgauuuuaacggaggcaagaucuccgugcaguacaaucugagccacaccuaugcugucgacgccgcuaaccauuguggcacaauugccaauggggugcuccaaaccuucaugcggauggcguggggaggcucuuacaucgcccuggauuccgggaagggaagcugggacugcaucaugacaucuuaccaguaucuuauuauccagaacaccacgugggaagaucacugucaguuuucccgccccagcccuauuggcuaccuggggcuccugucccaaagaacacgggacaucuauauuucucgcagacuucugggaaccuucacauggacccucagcgauuccgagagcaacgaaacccccggcggcuacugccugacacgguggaugcugaucgaggcugagcucaaauguuuugggaauacggccguugcuaagugcaacgaaaaacaugacgaggaguucugcgauaugcugcgccuuuuugacuucuguaagcaggccaucagacggcugaaagcgccugcccagaugucuauucagcucaucaauaaggcugugaacgcccugauuaaugaucaacuuaucaugaagaaccaucugcgcgacauuaugggaauccccuauugcaauuacuccaaauauuguuaccucaaccacaccgucacaggcagaaccagccugccucggugcugucuggugucuaaugggagcuaccucaacgaaacacacuucuccgacgauaucgaacagcaggcugacaauaugauuaccgagcugcuucaaaaggaguauauggaucgccagggaaaaacgccgcugggccucguggaccuguuugucuucucuaccagcuuuuaccugaucuccauuuuccuucaccucguuaagauccccacacauagacacgugauugggaaaccuugccccaagccucaucggcugaaccacaugggaaucuguagcugcggccuguauaaacaccccggcgugccggucaaguggaagcgcuga

SEQ ID NO: 33268 - RNA, 1473 nt, Artificial Sequence
  derived and/or modified CDS sequence (opt5) from LASV(LASV035-NIG-2009;Clade II)__AIT17588__GPCmut8
augggccagaucauuaccuucuuucaagaggugccccacgucaucgaagagguuaugaacauugugcugaucgcccucagccugcuugcuauucugaaggggaucuacaauguggccacaugcggacucuucggccuggucuccuuucuucugcucugugggagaucuugcagcacgaccuauaaaggaguguacgaacugcagacacuggagcucgacauggcgucccugaacauguguaugccucuuucuugcaccaagaauaacagccaucacuauaucaugguuggcaaugaaacagggcuggagcucacccugacaaacaccuccauuaucaaucauaaauucuguaaccuuucugaugcucacaagaaaaaucuguacgaccaugcccucaugagcauuaucuccacguuucaccugagcauuccgaacuucaaucaguaugaggccaugucuugcgauuuuaacggaggcaagaucuccgugcaguacaaucugagccacgcuuaugccgucgacgcugccaaccauuguggcaccauugcgaauggggugcuccaaacauucaugcggauggccuggggaggcucuuacaucgcucuggauuccgggaagggaagcugggacugcaucaugaccucuuaccaguaucuuauuauccagaacacaaccugggaagaucacugucaguuuucccgccccagcccuauuggcuaccuggggcuccugucccaaagaacgcgggacaucuauauuucucgcagacuucugggaacauucaccuggacacucagcgauuccgagggcaacgaaacccccggcggguacugccugacccgguggaugcugaucgaggccgagcucaaauguuuuggaaauacagcuguugccaagugcaacgaaaaacaugacgaggaguucugcgauaugcugcgccuuuuugacuucuguaagcaggcgaucagacggcugaaagccccugcucagaugagcauucagcucaucaauaaggccgugaacgcucugauuaaugaucaacuuaucaugaagaaccaucugcgcgacauuaugggcauccccuauugcaauuacucuaaauauuguuaccucaaccacacggucaccgggaagacaucccugccuagaugcugucuggugagcaauggaucuuaccucaacgaaacccacuucagcgacgauaucgaacagcaggccgacaauaugauuacagagcugcuucaaaaagaguauaucgaucggcagggcaagaccccgcuggggcucguggaccuguuugucuucuccacgucuuuuuaccugauuagcaucuuccuucaccucguuaaaauucccacacaucgccacgugaucggaaagccuugccccaaaccucauagacugaaccacaugggcauuuguuccugcggccuguauaagcaccccggggugccggucaaguggaaacgguga

SEQ ID NO: 33269 - RNA, 1473 nt, Artificial Sequence
  derived and/or modified CDS sequence (opt5) from LASV(LASV1000-NIG-2009;Clade II)__AIT17782__GPCmut8
augggccagaucauuaccuucuuucaagaggugccccacgucaucgaagagguuaugaacauugugcugaucgcccucagccugcuugcuauucugaaggggaucuacaauguggccacaugcggacucuucggccuggucuccuuucuucugcucugugggagaucuugcagcacgaccuauaaaggaguguacgaacugcagacacuggagcucgacauggcgucccugaacauguguaugccucuuucuugcaccaagaauaacagccaucacuauaucaugguuggcaaugaaacagggcuggagcucacccugacaaacaccuccauuaucaaucauaaauucuguaaccuuucugaugcucacaagaaaaaucuguacgaccaugcccucaugagcauuaucuccacguuucaccugagcauuccgaacuucaaucaguaugaggccaugucuugcgauuuuaacggaggcaagaucuccgugcaguacaaucugagccacaccuaugcugucgacgccgcuaaccauuguggcacaauugccaauggggugcuccaaaccuucaugcggauggcguggggaggcucuuacaucgcccuggauuccgggaagggaagcugggacugcaucaugacaucuuaccaguaucuuauuauccagaacaccacgugggaagaucacugucaguuuucccgccccagcccuauuggcuaccuggggcuccugucccaaagaacacgggacaucuauauuucucgcagacuucugggaaccuucacauggacccucagcgauuccgagggcaacgaaacccccggcggguacugccugacacgguggaugcugaucgaggcugagcucaaauguuuuggaaauacggccguugcuaagugcaacgaaaaacaugacgaggaguucugcgauaugcugcgccuuuuugacuucuguaagcaggccaucaaaagacugaagaccccugcgcagaugagcauucagcucaucaauaaggccgugaacgcucugauuaaugaucaacuuaucaugaaaaaccaucugcgggacauuaugggcauccccuauugcaauuacucuaaguauuguuaccucaaccacacagucaccgggaaaacaucccugccucgcugcugucuggugagcaauggaucuuaccucaacgaaacccacuucagcgacgauaucgaacagcaggccgacaauaugauuacggagcugcuucaaaaggaguauaucgauagacagggcaaaacaccgcuggggcucguggaccuguuugucuucuccaccucuuuuuaccugauuagcaucuuccuucaccucguuaagauucccacccaucggcacguggugggaaaaccuugccccaagccucaucgccugaaccacaugggcaucuguuccugcggccuguauaagcaccccggggucccggugaaauggaagagauga

SEQ ID NO: 33270 - RNA, 1473 nt, Artificial Sequence
  derived and/or modified CDS sequence (opt5) from LASV(LASV221-NIG-2010;Clade II)__AIT17624__GPCmut8
augggccagaucauuaccuucuuucaagaggugccccacgucaucgaagagguuaugaacauugugcugaucgcccucagccugcuugcuauucugaaggggaucuacaauguggccacaugcggacucuucggccuggucuccuuucuucugcucugugggagaucuugcagcacgaccuauaaaggaguguacgaacugcagacacuggagcucgacauggcgucccugaacauguguaugccucuuucuugcaccaagaauaacagccaucacuauaucaugguuggcaaugaaacagggcuggagcucacccugacaaacaccuccauuaucaaucauaaauucuguaaccuuucugaugcucacaagaaaaaucuguacgaccaugcccucaugagcauuaucuccacguuucaccugagcauuccgaacuucaaucaguaugaggccaugucuugcgauuuuaacggaggcaagaucuccgugcaguacaaucugagccacaccuaugcuauugacgccgcuaaccauuguggcacaaucgccaaugggguccuccaaaccuucaugcggauggcguggggaggcucuuacaucgcccuggauuccgggaagggaagcugggacugcauuaugacaucuuaccaguaucuuaucauucagaacaccacgugggaagaucacugucaguuuucccgccccagcccuaucggcuaccuggggcuccugucccaaagaacacgggacauuuauaucucucgcagacuucugggaaccuucacauggacccucagcgauuccgagggcaacgaaacccccggcggguacugccugacacgguggaugcugaucgaggcugagcucaaauguuuuggaaauacggccguggcuaagugcaacgaaaaacaugacgaggaguucugcgauaugcugcgccuuuuugacuucuguaagcaggccauuagacggcugaaaaccccugcgcagaugagcauccagcucauuaauaaggccguuaacgcucugaucaaugaucaacuuauuaugaagaaccaucugcgcgacaucaugggcauccccuauugcaauuacucuaaauauuguuaccucaaccacacagugaccgggaagacaucccugccuagaugcugucuggucagcaauggaucuuaccucaacgaaacccacuucagcgacgauauugaacagcaggccgacaauaugaucacggagaugcugcaaaaagaguauauggaucggcagggcaagacaccgcuugggcugguggaccucuuuguguucuccaccucuuuuuaccugauuagcaucuuccugcaccuugucaaaauucccacccaucgccacguuaucggaaagccuugccccaaaccucauagacucaaccacaugggcauuuguuccugcggccuguauaagcaccccggggugccggugaaguggaaacgguga

SEQ ID NO: 33271 - RNA, 1473 nt, Artificial Sequence
  derived and/or modified CDS sequence (opt5) from LASV(LASV237-NIG-2010;Clade II)__AIT17638__GPCmut8
augggccagaucauuaccuucuuucaagaggugccccacgucaucgaagagguuaugaacauugugcugaucgcccucagccugcuugcuauucugaaggggaucuacaauguggccacaugcggacucuucggccuggucuccuuucuucugcucugugggagaucuugcagcacgaccuauaaaggaguguacgaacugcagacacuggagcucgacauggcgucccugaacauguguaugccucuuucuugcaccaagaauaacagccaucacuauaucaugguuggcaaugaaacagggcuggagcucacccugacaaacaccuccauuaucaaucauaaauucuguaaccuuucugaugcucacaagaaagaccuguacgaucaugcccucaugagcauuaucuccacguuucaccugagcauuccgaauuucaaccaguaugaggccaugucuugcgacuuuaauggaggcaagaucuccgugcaguacaaccugagccacaccuaugcugucgaugccgcuaaucauuguggcacaauugccaacggggugcuccaaaccuucaugcggauggcguggggaggcucuuacaucgcccuggacuccgggaagggaagcugggauugcaucaugacaucuuaccaguaucuuauuauccagaauaccacgugggaagaccacugucaguuuucccgccccagcccuauuggcuaccuggggcuccugucccaaagaacacgggauaucuauauuucucgcagacuucugggaaccuucacauggacccucagcgacuccgagggcaacgaaacccccggcggguacugccugacacgguggaugcugaucgaggcugagcucaaauguuuuggaaacacggccguugcuaagugcaaugaaaaacaugaugaggaguucugcgacaugcugcgccuuuuugauuucuguaagcaggccaucagacggcugaaaaccccugcgcagaugagcauucagcucaucaacaaggccgugaaugcucugauuaacgaccaacuuaucaugaagaaucaucugcgcgacauuaugggcauccccuauugcaacuacucuaaauauuguuaccucaaucacacagucaccgggaagacaucccugccuagaugcugucuggugagcaacggaucuuaccucaaugaaacccacuucagcgaugacaucgaacagcaggccgauaacaugauuacggagcugcuucaaaaagaguauauggaccggcagggcaagacaccgcuggggcucguggaucuguuugucuucuccaccucuuuuuaccugaucagcauuuuccuucaccucaucaaaauucccacccaucgccacaucacaggaaagccuugccccaaaccucauagacugaaucacaugggcauuuguuccugcggccuguauaagcaccccgggguuccggugaaguggaaacgguga

SEQ ID NO: 33272 - RNA, 1473 nt, Artificial Sequence
  derived and/or modified CDS sequence (opt5) from LASV(LASV253-NIG-2011;Clade II)__AIT17670__GPCmut8
augggccagaucauuaccuucuuucaagaggugccccacgucaucgaagagguuaugaacauugugcugaucgcccucagccugcuugcuauucugaaggggaucuacaauguggccacaugcggacucuucggccuggucuccuuucuucugcucugugggagaucuugcagcacgaccuauaaaggaguguacgaacugcagacacuggagcucgacauggcgucccugaacauguguaugccucuuucuugcaccaagaauaacagccaucacuauaucaugguuggcaaugaaacagggcuggagcucacccugacaaacaccuccauuaucaaucauaaauucuguaaccuuucugaugcucacaagaaaaaucuguacgaccaugcccucaugagcauuaucuccacguuucaccugagcauuccgaacuucaaucaguaugaggccaugucuugcgauuuuaacggaggcaagaucuccgugcaguacaaucugagccacaccuaugcugucgacgccgcuaaccauuguggcacaauugccaauggggugcuccaaaccuucaugcggauggcguggggaggcucuuacaucgcccuggauuccgggaagggaagcugggacugcaucaugacaucuuaccaguaucuuauuauccagaacaccacgugggaagaucacugucaguuuucccgccccagcccuauuggcuaccuggggcuccugucccaaagaacacgggacaucuauauuucucgcagacuucugggaaccuucacauggacccucagcgauuccgagggcaacgaaacccccggcggguacugccugacacgguggaugcugaucgaggcugagcucaaauguuuuggaaauacggccguugcuaagugcaacgaaaaacaugacgaggaguucugcgauaugcugcgccuuuuugacuucuguaagcaggccaucagacggcugaaagcgccugcccagaugagcauucagcucaucaauaaggcugugaacgcccugauuaaugaucaacuuaucaugaagaaccaucugcgcgacauuaugggcauccccuauugcaauuacucuaaauauuguuaccucaaccacaccgucacagggagaaccucccugccucggugcugucuggugagcaauggaucuuaccucaacgaaacacacuucagcgacgauaucgaacagcaggcugacaauaugauuaccgagcugcuucaaaaggaguauaucgaucgccagggcaaaacgccgcuggggcucguggaccuguuugucuucuccacaucuuuuuaccugauuagcaucuuccuucaccucguuaagauucccacccauagacacaucauuggaaaaccuugccccaagccucaucggcugaaccacaugggcaucuguuccugcggccuguauaaacaccccggggugccggugaaguggaagcgcuga

SEQ ID NO: 33273 - RNA, 1473 nt, Artificial Sequence
  derived and/or modified CDS sequence (opt5) from LASV(LASV254-NIG-2011;Clade II)__AIT17674__GPCmut8
augggccagaucauuaccuucuuucaagaggugccccacgucaucgaagagguuaugaacauugugcugaucgcccucagccugcuugcuauucugaaggggaucuacaauguggccacaugcggacucuucggccuggucuccuuucuucugcucugugggagaucuugcagcacgaccuauaaaggaguguacgaacugcagacacuggagcucgacaugaccaaccugaauauguguaugccucuuuccugcacaaagaacaauucucaucacuauaucaugguuggcaacgaaaccgggcuggagcucacacugaccaauacgagcauuaucaaccauaaauucuguaaucuuuccgaugcgcacaagaaaaaccuguacaaucaugcucucaugucuauuaucagcaccuuucaccuguccauuccgaacuucaaucaguaugaggccaugagcugcgacuuuaacggaggcaagaucucugugcaguacaaucugucccacagcuaugccgucgaugcugccaaccauuguggcacaauugcuaacggggugcuccaaaccuucaugcggauggccuggggaggcucuuacaucgcgcuggacuccgggaagggaaauugggauugcaucaugacaagcuaccaguaucuuauuauccagaacaccacgugggaagaccacugucaguuuucucgccccuccccuauuggcuaccuggggcuccugagccaaagaacacgggauaucuauauuucccgcagacuucugggaaccuucacauggacccucucugacagcgagggcaaugaaacccccggcggguacugccugacacgguggaugcugaucgaggccgagcucaaauguuuuggaaacacggcuguugccaagugcaaugaaaaacaugaugaggaguucugcgacaugcugcgccuuuuugauuucuguaagcaggcuaucagacggcugaaaaccccugcccaggcgaacauucagcucaucaauaaggccgugaacgcucugauuaaugaccaacuuaucaugaagaaccaucugcgcgauauuaugggcauccccuauugcaauuacuccaaauauuguuaccucaaccacacagucaccgggaagacaagccugccuagaugcugucuggugucuaauggauccuaccucaacgaaacccacuucagcgacgacaucgaacagcaggccgauaauaugauuacggagcugcuucaaaaagaguauauggaccggcagggcaagacaccgcuggggcucguggaucuguuugucuucucuaccagcuuuuaccugaucuccauuuuccuucaccucguuaaaauccccacccaucgccacgugauuggaaagccuugccccaaaccucauagacugaaccacaugggcaucuguucuugcggccuguauaagcaccccggggugccggucaaguggaaacgguga

SEQ ID NO: 33274 - RNA, 1473 nt, Artificial Sequence
  derived and/or modified CDS sequence (opt5) from LASV(Nig08-A19;Clade III)__ADU56618__GPCmut8
augggccagaucgugaccuucuuucaagaggucccccacguuauugaagaggugaugaacaucgugcugauugcccucagcauccuggcuauucuuaaggggcuguacaauaucgccacaugcggacucaucggccuggucacguuccuucugcucuccgggagaucuuguagcaugaccuauaaaggaguguacgaacugcagacacuggagcucaacaugaauacccugaacaugugcaugccucuuuccuguacaaagaauaacucucaucacuauauuaugguuggcaaugaaaccgggcuggagcucacacugaccaacacgagccuucugcaucacaaauuuugcaaucucuccgacgcgcauaagaaaaaccuguacgaucacacccugaugucuaucauuagcacauuccaccucuccaucccgaauuuuaaccaguaugaggcuaugagcugugacuucaauggaggcaagauuaccgugcaguacaaccugucucauuccuaugccaucgaugccgcuaaucacugcggcacagucgccaacggggugcuucaaaccuuuaugcggauggcuuggggaggcagcuacauugcccuggacucugggcgcggaaagugggauuguaucaugacguccuaccaguaucucaucauucagaacacaaccugggaagaccauugccaguucagcagacccucuccuaucggcuaccuggggcuucugucccaacggacacgcgauauuuauaucagcagacggcuccugggaaccuuuaccuggacacuguccgacucugagggcaaugaaacgcccggcggguacugucucacccgcuggaugcugauugaggcggagcuuaaaugcuucggaaacacagccguugcuaaguguaaugaaaaacacgaugaggaauuuugcgacaugcugagacucuucgauuuuugcaagcaggccauccggcgccugaaagcuccugcccagaugagcauccagcuuauuaacaaggcggugaaugcccugaucaacgaccaacucauuaugaagaaucaccugagagauaucaugggcauucccuauuguaacuacuccaaauauugcuaccugaaucauaccagcacagggcggaccucucucccucgcuguugccuggucuccaacggaagcuaccuuaaugagacgcacuucucugacgacaucgaacagcaggcugauaacaugaucacagagaugcugcaaaaggaguaucucgacagacagggcaaaaccccgcuggggcugguggaucuuuucguguuuagcaccuccuucuaccucauuucuaucuuucugcaucuggucaagauucccacacaccggcauaucguuggaaaaccuugucccaagccucaccgccucaaucacaugggcauuugcagcuguggccuguauaaacagcccggggugccggugagauggaagcgguga

SEQ ID NO: 33275 - RNA, 1476 nt, Artificial Sequence
  derived and/or modified CDS sequence (opt5) from LASV(G1180-SLE-2010;Clade IV)__AIT17168__GPCmut8
augggccagaucgugaccuucuuucaagaggucccccacguuauugaagaggugaugaacaucgugcugauugcccucagcauccuggcuguccuuaaggggcuguacaauuucgccacaugcggacucgugggccugcuuacguuucugcuccugugugggagauccugcaccgcgucucgguauaaaggaguuuacgaacugcagacacucgagcugaacauggaaacccuuaauauguguaugccucugagcugcacaaagaacaauucccaucacuauauuauggugggcaacgagaccgggcucgagcugacacuuaccaauacgucuaucaucaaccauaaauucuguaaucugagcgacgcucacaagaaaaaccucuacgaucaugcccugauguccauuaucucuaccuuucaccugagcauuccgaauuucaaccaguaugaagccauguccugcgacuuuaauggaggcaagaucagcguccaguacaaccucucucacuccuaugcuggcgaugccgcuaaucauugugggacaguggccaacggaguucugcaaaccuucaugcgcauggcguggggcgggagcuacauugcccuugacucuggacacggcuccugggauugcaucaugacaagcuaccaguaucugauuauccagaacaccacgugggaggaccauugucaguuuucuagacccuccccuaucggguaccucggacugcuuagccaacggacacgcgauauuuauaucuccagacggcugcucggcaccuucacauggacccugucugacagcgaaggcaaggauacccccgggggauacugccugacacgcuggaugcucauugaggcugagcugaaauguuuuggcaauacggccguggcuaagugcaacgaaaaacacgacgaggaguucugcgauaugcuuagacuguuugacuucuguaagcaggccauccagcggcucaaagcgccugcccagauguccauucaacugaucaauaaggcugucaacgcccuuaucaaugaucagcugauuaugaagaaccaccuccgcgacaucauggggauucccuauugcaauuacagcaaauauuguuaccugaaccauaccacaaccggaaagacaucucugccuaaaugcugucucguguccaauggcagcuaccugaacgaaacccacuucucugacgauaucgaacagcaagcugacaauaugauuacggagaugcuucagaaggaguauauggaaagacaggggaaaacaccgcugggacucguggaucuguuugucuucagcaccuccuuuuaccugaucucuaucuuccuucaucucguuaagauucccacccaccggcauaucgugggcaaaagcugcccuaagccccaccgccugaaccacaugggcauuuguuccugcgggcuguauaagcagccuggagugcccgucaaauggaagagauga

SEQ ID NO: 33276 - RNA, 1476 nt, Artificial Sequence
  derived and/or modified CDS sequence (opt5) from LASV(G1442-SLE-2011;Clade IV)__AIT17180__GPCmut8
augggccagaucgugaccuucuuucaagaggucccccacguuauugaagaggugaugaacaucgugcugauugcccucagcauccuggcuguccuuaaggggcuguacaauguggccacaugcggacucauuggccugguuacguuccuucugcucugugggagauccugcaccacaacccuguauaaaggaguguacgaacugcagacacucgagcugaacauggaaacccuuaauauguguaugccucugucuugcacaaagaacaauagccaucacuauauccgggucggcaacgagaccgggcucgagcugacgcuuaccaauacauccaucauuaaccauaaauuuuguaaucugucugacgcgcacaagaaaaaccucuacgaucaugcucugaugagcaucauuuccaccuuccaccugucuaucccgaauuuuaaccaguaugaagccaugagcugcgacuucaauggaggcaagauuuccgugcaguacaaccucagccacucuuaugccggcgaugcugccaaucauugugggacaguugcuaacggagugcugcaaaccuuuaugcgcauggccuggggcggguccuacaucgcgcuugacagcggaagaggcaacugggauugcauuaugacgucuuaccaguaucugaucauccagaauacaaccugggacgaucacugucaguucucccggcccagcccuauuggguaccucggacugcuuucucaacgcacaagagacgucuauaucucccggcgccugcucggcaccuuuaccuggacacugagcgauuccgagggcaaggacacgcccgggggauacugccugaccagauggaugcucauugaagccgagcugaaauguuucggcaacacagcuguggccaagugcaaugagaaacaugaugaagaguuuugcgacaugcuucggcuguucgauuuuuguaagcaggcuauccagcgccucaaagccccugcgcagaugucuauucaacugaucaacaaggccgugaaugcucuuaucaacgaccagcugauuaugaagaaucaccucagagacaucauggggauucccuauugcaacuacagcaaauauuguuaccugaauaacaccgccacaggaaagaccucccugccuaaaugcugucucaucagcaauggcucuuaccugaacgaaacgcacuucuccgaugacauugagcaggaagcugauaauaugaucacagagaugcuucaaaaggaguauauggaacggcaggggaaaaccccgcugggacucgucgaccuguucguuuuuagcaccucuuucuaccugaucagcauuuuucuucaucucgugaagauccccacacaccgccauauugugggcaaauccugcccuaagccccacagacugaaccauaugggcaucuguucuugcgggcuguauaagcagccuggaguccccgugcgguggaaacgcuga

SEQ ID NO: 33277 - RNA, 1476 nt, Artificial Sequence
  derived and/or modified CDS sequence (opt5) from LASV(G3010-SLE-2013;Clade IV)__AIT17344__GPCmut8
augggccagaucgugaccuucuuucaagaggucccccacguuauugaagaggugaugaacaucgugcugauugcccucagcauccuggcuguccuuaaggggcuguacaauuucgccacaugcggacucgugggccugguuacguuucuucugcucugugggagauccugcaccacaucucuguauaaaggaguguacgaacugcagacccucgagcugaacauggaaacacuuaauauguguaugccucugagcugcaccaagaacaauucccaucacuauauuauggucggcaacgagacagggcucgagcugacccuuacgaauaccucuaucaucaaccauaaauucuguaaucugagcgacgcgcacaagaaaaaccucuacaaucaugcucugauguccauuaucucuacauuucaccugagcauuccgaacuucaaucaguaugaagccauguccugcgauuuuaacggaggcaagaucagcgugcaguacaaucucucucacuccuaugccggcgacgcugccagccauugugggaccguugcuaacggagugcugcaaacauucaugcggauggccuggggcgggucuuacauugcgcuugauuccggauacggcaagugggacugcaucaugaccagcuaucaguaccugauuauccagaacacgacaugggaggaucacugucaguuuucucgccccuccccuaucggguaucucggacugcuuagccaaagaacccgggacauuuacaucucccgcagacugcucggcacauucaccuggacccugucugauagcgaaggcaaagacacacccgggggauauugccugacgcgguggaugcucauugaggccgagcugaaguguuuuggcaauaccgcugucgccaaaugcaacgaaaagcaugaugaggaguucugcgacaugcuucgccuguuugauuucuguaaacaggcuauccagagacucaagaccccugcccagauguccauucaacugaucaauaaggcggugaacgcccuuaucaaugaccagcugauuaugaaaaaccaccuccgggauaucauggggauucccuacugcaauuauagcaaguacuguuaccugaaccacacaacaaccggaaaaacgucucugccuaagugcugucucguguccaauggcagcuaucugaacgaaacacauuucucugacgacaucgaacagcaagcugauaauaugauuaccgagaugcuucagaaagaguacauggaacgccaggggaagaccccgcugggacucgucgaccuguuuguuuucagcacauccuuuuaucugaucucuaucuuccuucaccucgugaaaauucccacccauagacacaucgugggcaagagcugcccuaagccccaucggcugaaccacaugggcauuuguuccugcgggcuguacaaacagccuggaguccccgugcgcuggaagagauga

SEQ ID NO: 33278 - RNA, 1476 nt, Artificial Sequence
  derived and/or modified CDS sequence (opt5) from LASV(G502-SLE-2009;Clade IV)__AIT17126__GPCmut8
augggccagaucgugaccuucuuucaagaggucccccacguuauugaagaggugaugaacaucgugcugauugcccucagcauccuggcuguccuuaaggggcuguacaauuucgccacaugcggacucgugggccugcuuacguuucugcuccugugugggagauccugcaccacaggacuguauaaaggcguuuacgaacuccagacccuggagcuuaacauggaaacacugaauauguguaugccucucucuugcaccaagaacaauagccaucacuauauuaugguggggaacgagacaggacuggagcuuacccugacgaauaccuccaucaucaaccauaaauucuguaaucucucugacgcgcacaagaaaaaccuguacgaucaugcucugaugagcauuaucuccacauuucaccucucuauuccgaauuucaaccaguaugaagccaugagcugcgacuuuaauggcggcaagaucuccguccaguacaaccugagccacucuuaugccggggaugcugccgaccauuguggaaccguggcuaauggcguucuucaaacauucaugcggauggccuggggaggguccuacauugcgcuggauagcggccgcgggagaugggacugcaucaugaccucuuaccaguaucucauuauccagaacacgacaugggaggaucacugucaguuuucccggcccagcccuaucggauaccugggccuucugucucaacgcaccagagacauuuauaucucccggcgccuccugggcacauucaccuggacccugagcgauuccgaagggaaggacacacccggaggcuacugccucacgagauggaugcugauugaggccgagcuuaaauguuuugggaacaccgcuguggccaagugcaaugaaaaacaugaugaggaguucugcgacaugcugcggcucuuugauuucuguaagcaggcuauccagcgccugaaagccccugcgcagaugucuauucaacuuaucaacaaggccgucaaugcucugaucaacgaccagcucgugaugaagaaucaccugagagacauuaugggaauccccuauugcaacuacagccgguauuguuaccugaaucacacaaccacaggccgcaccucccucccuaaaugcugucuggugagcaacgggucuuaccuuaaugaaacgcauuucuccgaugacauugaacagcaagccgauaacaugaucacagagaugcugcagaaggaguauauggaaagacagggaaaaaccccgcucggccuggucgaccuguuuguuuucagcaccucuuuuuaccuuauuagcaucuuccuccaccuggugaagauccccacacaucggcacauugugggcaaauccugcccuaagccccaucgccugaaucacauggggaucuguucuugcggacucuauaaacagccuggcguccccgugaaguggaagagauga

SEQ ID NO: 33279 - RNA, 1476 nt, Artificial Sequence
  derived and/or modified CDS sequence (opt5) from LASV(G733-SLE-2010;Clade IV)__AIT17154__GPCmut8
augggccagaucgugaccuucuuucaagaggucccccacguuauugaagaggugaugaacaucgugcugauugcccucagcauccuggcuguccuuaaggggcuguacaauuucgccacaugcggaauugugggccucguuuccuuucugcuucugugugggagaucuugcacgaccagccucuauaaaggaguguacgaacugcagacacuggagcucaacauggaaacccugaauauguguaugccucuuuccugcacaaagaacaauucucaucacuauaucauggucggcaacgagaccgggcuggagcucacacugaccaauacgagcaucauuaaccauaaauucuguaaucuuuccgacgcgcacaagaaaaaccuguacgaucaugcucucaugucuaucauuagcaccuuucaccuguccaucccgaauuucaaccaguaugaagccaugagcugcgacuuuaauggaggcaagauuucugugcaguacaaccugucccacagcuaugccggcgaugcugccaaucauugugggacaaucgcuaacggaguucuccaaaccuucaugcggauggccuggggcgggucuuacauugcgcuggacuccggacgcgauagaugggacugcaucaugacaagcuaccaguaucuuaucauucagaacaccacgugggaggaucacugucaguuuucucggcccuccccuaucggcuaccuggggcuccugagccaacgcacaagagacauuuauaucucccggcgccuucugggaaccuucacauggacccucucugauagcgaaggcaaggacacccccggcggguacugccugacaagauggaugcugauugaggccgagcucaaauguuuuggaaauacggcuguggccaagugcaacgaaaaacaugaugaggaguucugcgacaugcugcggcuuuuugauuucuguaagcaggcuauccagcgccugaaagccccugcgcagauguccauccaacucauuaauaaggccgucaacgcucugaucaaugaccagcuuauuaugaagaaccaccugagagacaucaugggcauucccuauugcaauuacagcaaauauuguuaccucaaccacaccacaaccgggaagacaucucugccuaaaugcugucugguguccaauggaagcuaccucaacgaaacccauuucucugaugacaucgaacagcaagccgauaauaugaucacggagaugcugcagaaggaguauauggaacggcagggcaaaacaccgcuugggcugguggaccucuuugucuucagcaccuccuuuuaccugauuucuaucuuccugcaccuuguuaagauucccacccaucgccacguggugggaaaaagcugcccuaagccccauagacucaaccacaugggcaucuguuccugcggccuguaugggcagccuggaguccccgugaaguggaaacgguga

SEQ ID NO: 33280 - RNA, 1476 nt, Artificial Sequence
  derived and/or modified CDS sequence (opt5) from MOPV/LASV reassortant(IGS-1;Clade IV)__AFY05576__GPCmut8
augggccagaucgugaccuucuuucaagaggucccccacguuauugaagaggugaugaacaucgugcugauugcccucagcguccuggcugugcuuaaggggcuguacaauuucgccacaugcggacucguuggccuggugacguuucuucugcucugugggagauccugcaccacaucucuguauaaaggagucuacgaacugcagacccucgagcugaacauggaaacacuuaauauguguaugccucugagcugcaccaagaacaauucccaucacuauaucauggugggcaacgagacagggcucgagcugacccuuacgaauaccucuauuaucaaccauaaauucuguaaucugagcgacgcgcacaagaaaaaccucuacgaucaugcucugauguccaucauuucuacauuucaccugagcaucccgaauuucaaccaguaugaagccauguccugcgacuuuaauggaggcaagauuagcguucaguacaaccucucucacuccuaugccggcgaugcugccaaucauugugggaccguggcuaacggaguccugcaaacauucaugcggauggccuggggcgggagcuacaucgcgcuugacucuggacgcggcaacugggauugcauuaugaccuccuaccaguaucugaucauucagaauacgacaugggaggaccacugucaguuuagcagacccucuccuaucggguaccucggacugcuuucccaacggacccgcgauaucuauauuagcagacggcugcucggcacauucaccuggacccuguccgacucugaaggcgaggauacacccgggggauacugccugacgcgcuggaugcucaucgaggccgaacugaaguguuuuggcaacaccgcuguggccaaaugcaaugagaagcaugacgaagaguucugcgauaugcuuagacuguuugacuucuguaaacaggcuauucagcggcucaaggccccugcgcagaugagcauccaacugauuaacaaagccgugaaugcucuuaucaacgaucagcugaucaugaagaaucaccuccgcgacauuauggggauccccuauugcaacuacuccaaguauuguuaccugaaucacacaaccacaggaagaaccagccugccuaaaugcugucucgucucuaacggcuccuaccugaaugaaacgcauuucagcgacgauauugagcagcaagccgacaacaugaucacagagaugcuucagaaggaauauauggagcggcaggggaaaaccccgcugggacucguugaucuguuuguguucucuaccagcuuuuaccugauuuccaucuuccuucaccucgugaagauccccacacaucgccacauugucggcaaaucuugcccuaagccccauagacugaaucacaugggcaucuguagcugcgggcuguauaaacagccuggagugcccguuaaguggaagcgguga

SEQ ID NO: 33281 - RNA, 1476 nt, Artificial Sequence
  derived and/or modified CDS sequence (opt5) from LASV(LM765-SLE-2012;Clade IV)__AIT17814__GPCmut8
augggccagaucgugaccuucuuucaagaggucccccacguuauugaagaggugaugaacaucgugcugauugcccucagcauccuggcuguccuuaaggggcuguacaauuucgccacaugcggacucgugggccugguuacguuucuucugcucugugggagauccugcaccacaucucuguauaaaggaguguacgaacugcagacccucgagcugaacauggaaacacuuaauauguguaugccucugagcugcaccaagaacaauucccaucacuauauuauggucggcaacgagacagggcucgagcugacccuuacgaauaccucuaucaucgaccauaaauucuguaaccugagcgaugcgcaccggaagaaucucuacgaccaugcucugauguccauuaucucuacauuucaccugagcauuccgaacuucaaucaguaugaagccauguccugcgauuuuaacggaggcaaaaucagcgugcaguacaaucucucucacuccuaugccaaggacgcugccgaucauuguggcaccguugcuaacggggugcugcaaacauucaugcgcauggccuggggaggcagcuacauugcgcuugacucugggagaggacggugggauugcaucaugaccuccuaccaguaucugauuauccagaauacgacaugggaggaccacugucaguuuagccgccccucuccuaucggcuaccucgggcugcuuucccaaagaacccgggauauuuauaucagccgcagacugcucggaacauucaccuggacccuguccgacucugaaggcaaggauacacccggcggguacugccugacgcgguggaugcucauugaggccgagcugaaauguuuuggaaacaccgcugucgccaagugcaacgaaaaacaugacgaggaguucugcgauaugcuucgccuguuugacuucuguaagcaggcuauccagagacucaaagccccugcgcagaugagcauucaacugaucaauaaggccgugaacgcucuuaucaaugaccagcugauuaugaagaaccaccuccgggauaucaugggcauucccuauugcaauuacuccaaauauuguuaccugaaccacacaaccacagggaagaccagccugccuaaaugcugucucgugucuaauggauccuaccugaacgaaacgcauuucagcgacgauaucgaacagcaagccgacaauaugauuacagagaugcuucagaaggaguauauggaacgccagggcaaaaccccgcuggggcucgucgaucuguuuguuuucucuaccagcuuuuaccugaucuccaucuuccuucaccucgugaagauucccacacauagacacaucgugggaaaaccuugccccaagccucaucggcugaaccacaugggcauuuguucuugcggccuguauaagcagcccggggucccggugaaauggaagcgcuga

SEQ ID NO: 33282 - RNA, 1476 nt, Artificial Sequence
  derived and/or modified CDS sequence (opt5) from LASV(LM776-SLE-2012;Clade IV)__AIT17824__GPCmut8
augggccagaucgugaccuucuuucaagaggucccccacguuauugaagaggugaugaacaucgugcugauugcccucagcauccuggcuguccuuaaggggcuguacaauuucgccacaugcggacucgugggccugguuacguuucuucugcucugugggagauccugcaccacaucuguguauaaaggagucuacgaacugcagacccuggagcucaacauggaaacacugaauauguguaugccucuuagcugcaccaagaacaauucccaucacuauauuauggugggcaacgagacagggcuggagcucacccugacgaauaccucuaucaucaaccauaaauucuguaaucuuagcgacgcgcacaagaaaaaccuguacgaucaugcucucauguccauuaucucuacauuucaccugagcauuccgaauuucaaccaguaugaagccauguccugcgacuuuaauggaggcaagaucagcguucaguacaaccugucucacuccuaugccggcgaugcugccaaucauugugggaccguggcuaacggaguccuccaaacauucaugcggauggccuggggcgggagcuacauugcgcuggacucuggacacggcaagugggauugcaucaugaccuccuaccaguaucuuauuauccagaacacgacaugggaggaccauugucaguuuagccgccccucuccuaucggguaccugggacuccugucccaaagaacccgggauauuuauaucagccgcagacuucugggcacauucaccuggacccucuccgacucugaaggcaaagauacacccgggggauacugccugacgcgguggaugcugauugaggccgagcucaaguguuuuggcaauaccgcuguggccaaaugcaacgaaaagcacgacgaggaguucugcgauaugcugcgccuuuuugacuucuguaaacaggcuauccagagacugaaggccccugcgcagaugagcauucaacucaucaauaaggccgugaacgcucugaucaaugaucagcuuauuaugaaaaaccaucugcgggacaucauggggauucccuauugcaauuacuccaaguauuguuaccucaaccacacaaccacaggaaaaaccagccugccuaagugcugucuggucucuaauggcuccuaccucaacgaaacgcacuucagcgacgauaucgaacagcaagccgacaauaugauuacagagaugcugcagaaagaguauauggaacgccaggggaagaccccgcuuggacugguugaucucuuuguguucucuaccagcuuuuaccugaucuccaucuuccugcaucuugugaaaauucccacacacagacauaucgucggcaagucuugcccuaagccccaccggcucaaccacaugggcauuuguagcugcgggcuguauaaacagccuggagugcccguucgcuggaagagauga

SEQ ID NO: 33283 - RNA, 1476 nt, Artificial Sequence
  derived and/or modified CDS sequence (opt5) from LASV(Mad39;Clade IV)__ANH09722__GPCmut8
augggccagaucgugaccuucuuucaagaggucccccacguuauugaagaggugaugaacaucgugcugauugcccucagcauccuggcuguccuuaaggggcuguacaauguggccacaugcggacucauuggccugguuacguuccuucugcucugugggagauccugcaccacaacccuguauaaaggaguguacgaacugcaggcgcucgagcugaacauggaaacacuuaauauguguaugccucugucuugcaccaagaacaauagccaucacuauauccgggucggcaacgagacagggcucgagcugacccuuacgaauaccucccugaucaaccauaaauuuuguaaucucucugacgcucacaagaaaaaccuguacgaucaugcccugaugagcauuaucuccacauuccaccucucuauuccgaauuuuaaccaguaugaagccaugagcugcgacuucaaugauggaaagaucuccgugcaguacaaccugagccacaccuaugcuggcgacacagccaaucauuguggcaccguugcuaacggggugcuucaaacguuuaugcgcauggccuggggaggcucuuacauugcgcuggauuccgggagaggaggcugggacugcaucaugacaagcuaccaguaucucauuauccagaacaccacaugggaggaucacugucaguucucucggcccuccccuaucggguaccugggacuucugagccaacgcaccagagacauuuauaucucucggcgccuccugggcaccuuuacauggacgcuguccgauagcgaaggcaaggacacccccgggggauacugccucacaagauggaugcugauugaggccgagcuuaaauguuucggcaauaccgcugucgccaagugcaacgaaaaacaugaugaggaauuuugcgacaugcugcgccucuucgauuuuuguaagcaggcuauccagcggcugaaagccccugcgcagauguccauucaacuuaucaauaaggccgugaacgcucugaucaaugaccagcucauuaugaagaaccaccugagagacaucauggggauucccuauugcaauuacucuaaauauuguuaccugaaccacacagugaccggaaagacgagccucccuaaaugcugucuggucuccaauggcagcuaccuuaacgagacacauuucucugaugacaucgaacagcaagccgauaauaugauuaccgagaugcugcagaaggaguauauggaacggcaggggaaaaccccgcucggacugguugaccuguucguguuuuccaccagcuucuaccuuaucucuaucuuucuccaccuggugaagauucccacacaucgccacgucgugggcaaaccuugccccaagccucauagacugaaccacaugggcaucuguagcugcggguucuauaagcagcccggaguuccggugcgguggaaacgcuga

SEQ ID NO: 33284 - RNA, 1476 nt, Artificial Sequence
  derived and/or modified CDS sequence (opt5) from LASV(Z0947-SLE-2011;Clade IV)__AIT17840__GPCmut8
augggccagaucgugaccuucuuucaagaggucccccacguuauugaagaggugaugaacaucgugcugauugcccucagcauccuggcuguccuuaaggggcuguacaauuucgccacaugcggacucgugggccugguuacguuucuucugcucugugggagauccugcaccauuucucuguauaaaggaguguacgaacugcagacacucgagcugaacauggaaacccuuaauauguguaugccucugagcugcacaaagaacaauucccaucacuauaucauggucggcaacgagaccgggcucgagcugacacuuaccaauacgucuaucauuaaccauaaauucuguaaucugagcgacgcgcacaagaaaaaccucuacgaucaugcucugauguccaucauuucuaccuuucaccugagcaucccgaauuucaaccaguaugaagccauguccugcgacuuuaauggaggcaagauuagcgugcaguacaaccucucucacuccuaugccggcgaugcugccaaucauugugggacaguugcuaacggagugcugcaaaccuucaugcggauggccuggggcgggagcuacaucgcgcuugacucuggacgcgauagaugggacugcauuaugacauccuaccaguaucugaucauccagaacaccacgugggaggaucacugucaguuuagccggcccucuccuauuggcuaccucgggcugcuuucccaacgcacaagagacaucuauauuagccggcgccugcucggaaccuucacauggacccuguccgauucugaaggcaaggacacccccggcggguacugccugacaagauggaugcucaucgaggccgagcugaaauguuuuggaaauacggcugucgccaagugcaacgaaaaacaugaugaggaguucugcgacaugcuucggcuguuugauuucuguaagcaggcuauucagcgccucaaagccccugcgcagaugagcauccaacugaucaauaaggccgugaacgcucuuauuaaugaccagcugaucaugaagaaccaccucagagacauuaugggcauccccuauugcaauuacuccaaauauuguuaccugaaccacaccacaaccgggaagacaagccugccuaaaugcugucucgugucuaauggauccuaccugaacgaaacccauuucagcgaugacauugaacagcaagccgauaauaugaucacggagaugcuucagaaggaguauauggaacggcagggcaaaacaccgcuggggcucgucgaccuguuuguuuucucuaccagcuuuuaccugaucuccauuuuccuucaccucgugaagauccccacccaucgccacauugugggaaaaccuugccccaagccucauagacugaaccacaugggcaucuguucuugcggccuguauaagcagcccggggucccggugaaauggaagcgguga

SEQ ID NO: 33285 - RNA, 1717 nt, Artificial Sequence
  mRNA product Design a-1 (hSL-A64-N5) comprising derived and/or modified sequence from LASV(Josiah;Clade IV)__NP_694870__GPCmut8 (opt1)
aggagagucccgcagucggcguccagcggcucugcuuguucgugugugugucguugcaggccuuauucaagcuuaccaugggccagaucgugaccuucuuccaggaggucccccacgugaucgaggaggugaugaacaucguccugaucgcccucagcgugcuggccgugcugaaggggcucuacaacuucgcgaccugcggccuggucgggcuggugacguuccuccugcugugcggccgcuccugcaccaccagccucuacaaggggguguacgagcugcagacccuggagcucaacauggagacgcugaacaugugcaugccgcuguccugcaccaagaacaacagccaccacuacaucauggucggcaacgagaccggccucgagcugacgcugaccaacaccuccaucaucaaccacaaguucugcaaccucagcgacgcccacaagaagaaccuguacgaccacgcccugauguccaucaucagcaccuuccaccucuccauccccaacuucaaccaguacgaggccaugagcugcgacuucaacgggggcaagaucuccgugcaguacaaccugagccacuccuacgccggggacgcggccaaccacugcggcacgguggccaacgggguccugcagaccuucaugcggauggccuggggcggcagcuacaucgcgcucgacuccgggcgcggcaacugggacugcaucaugaccagcuaccaguaccugaucauccagaacaccacgugggaggaccacugccaguucucccggcccagccccaucggguaccugggccuccugucccagcgcacccgggacaucuacaucagccgccggcugcucggcaccuucaccuggacgcugagcgacuccgaggggaaggacaccccgggcggguacugccugacccgcuggaugcucaucgaggccgagcugaagugcuucggcaacaccgccguggccaagugcaacgagaagcacgacgaggaguucugcgacaugcugcggcuguucgacuucugcaagcaggccauccagcgccugaaggcgcccgcccagaugagcauccagcugaucaacaaggccgugaacgcccucaucaacgaccagcugaucaugaagaaccaccuccgggacaucauggggauccccuacugcaacuacuccaaguacugcuaccucaaccacacgaccaccggccgcaccagccugcccaagugcugccuggucuccaacggcagcuaccucaacgagacgcacuucuccgacgacaucgagcagcaggccgacaacaugaucaccgagaugcugcagaaggaguacauggagcggcaggggaagacgccccugggccucguggaccuguucguguucagcaccuccuucuaccugaucagcaucuuccugcaccucgucaagaucccgacccaccgccacaucguggggaaguccugccccaagccccaccggcugaaccacaugggcaucugcagcugcgggcuguacaagcagcccggcgugccggucaaguggaagcgcugaggacuagucccuguucccagagcccacuuuuuuuucuuuuuuugaaauaaaauagccugucuuucagaucucaaaggcucuuuucagagccaccaaaaaaaaaaaaaaaaaaaaaaaaaaaaaaaaaaaaaaaaaaaaaaaaaaaaaaaaaaaaaaaaagaauu

SEQ ID NO: 33286 - RNA, 1714 nt, Artificial Sequence
  mRNA product Design a-1 (hSL-A64-N5) comprising derived and/or modified sequence from LASV(LP;Clade I)__AAF86701__GPCmut8 (opt1)
aggagagucccgcagucggcguccagcggcucugcuuguucgugugugugucguugcaggccuuauucaagcuuaccaugggccagaucaucaccuucuuccaggaggugccccacgucaucgaggaggugaugaacaucgugcugaucgcccucagccugcuggccauccucaaggggcuguacaacaucgcgaccugcggcaucaucgggcuggucgccuuccucuuccugugcggcaaguccugcagccugacgcucaagggcggguacgagcugcagacccuggagcucaacauggagacccugaacaugugcaugccgcuguccugcacgaagaacagcucccaccacuacauccgcgugggcaacgagaccgggcucgagcugacccugaccaacacgagcaucaucaaccacaaguucugcaaccucuccgacgcccacaagaagaaccuguacgaccacgcccugaugagcaucaucuccaccuuccaccucagcauccccaacuucaaccaguacgaggccauguccugcgacuucaacggcgggaagaucagcgugcaguacaaccugucccacagcuacgcgggcgacgccgccgagcacugcgggaccgucgccaacggcgugcugcagaccuucaugcggauggcguggggcgggcgcuacaucgcccucgacuccggcaaggggaacugggacugcaucaugacgagcuaccaguaccugaucauccagaacaccaccugggaggaccacugccaguucucccggcccagccccaucggcuaccugggccuccugucccagcgcacccgggacaucuacaucagccgccggcugcucgggacguucaccuggacccugagcgacuccgagggcaacgagacccccgggggcuacugccugacgcgcuggaugcucaucgaggccgagcugaagugcuucgggaacaccgccguggccaagugcaacgagaagcacgacgaggaguucugcgacaugcugcggcuguucgacuucugcaagcaggcgauccgccggcugaaggcccccgcccagaugagcauccagcugaucaacaaggccgucaacgcccucaucaacgaccagcugaucaugaagaaccaccuccgcgacaucaugggcauccccuacugcaacuacuccaaguacugcuaccucaaccacaccagcuccggccggaccagccugcccaagugcugccugaucuccaacgggagcuaccucaacgagacgcaguucuccgacgacaucgagcagcaggcggacaacaugaucaccgagaugcugcagaaggaguacaucgagcgccagggcaagaccccgcuggggcucguggacaucuucaucuucagcaccuccuucuaccugaucagcaucuuccugcaccugaucaagaucccgacgcaccggcacaucgugggcaagcccugccccaagccccaccgccucaaccacaugggggucugcuccugcggccuguacaagcacccgggcgugcccaccaaguggaagcggugaggacuagucccuguucccagagcccacuuuuuuuucuuuuuuugaaauaaaauagccugucuuucagaucucaaaggcucuuuucagagccaccaaaaaaaaaaaaaaaaaaaaaaaaaaaaaaaaaaaaaaaaaaaaaaaaaaaaaaaaaaaaaaaaagaauu

SEQ ID NO: 33287 - RNA, 1714 nt, Artificial Sequence
  mRNA product Design a-1 (hSL-A64-N5) comprising derived and/or modified sequence from LASV(803213;Clade II)__AAF86703__GPCmut8 (opt1)
aggagagucccgcagucggcguccagcggcucugcuuguucgugugugugucguugcaggccuuauucaagcuuaccaugggccagaucaucaccuucuuccaggaggugccccacgucaucgaggaggugaugaacaucgugcugaucgcccucagccugcuggccauccucaaggggaucuacaacgucgcgaccugcggccuguucgggcugaucuccuuccuccugcugugcggccgcagcugcuccgugacguacaaggggguguacgagcuccagacccuggagcugaacauggccaaccucaacaugugcaugccgcugagcugcaccaagaacaacucccaccacuacaucauggucggcaacgagacgggccuggagcucacccugaccaacaccagcaucaucaaccacaaguucugcaaccuguccgacgcccacaagaagaaccucuacgaccacgcccugaugagcaucaucuccacguuccaccugagcauccccaacuucaaccaguacgaggccauguccugcgacuucaacgggggcaagaucagcgugcaguacaaccucucccacagcuucgcgguggacgccgccaaccacugcgggaccaucgccaacggcguccugcagaccuucaugcggauggcguggggcggguccuacaucgcccuggacagcggcaaggggaacugggacugcaucaugaccuccuaccaguaccucaucauccagaacacgaccugggaggaccacugccaguucagccgccccucccccaucggcuaccuggggcugcucagccagcggacccgcgacaucuacaucagccggcgccugcugggcaccuucacguggacccucuccgacagcgagggcaacgaggcccccgggggcuacugccugacccgguggaugcugaucgaggccgagcucaagugcuucgggaacaccgccguggcgaagugcaacgagaagcacgacgaggaguucugcgacaugcugcgccuguucgacuucugcaagcaggccaucaagcggcucaagacgcccgcccagauguccauccagcugaucaacaaggccgugaacgcccugaucaacgaccagcucaucaugaagaaccaccuccgcgacaucaugggcauccccuacugcaacuacagccgguacugcuaccugaaccacaccgucaccgggaagaccucccugccccgcugcugccuggugagcaacggcuccuaccugaacgagacgcacuucagcgacgacaucgagcagcaggcggacaacaugaucaccgagaugcuccagaaggaguacauggaccggcagggcaagaccccgcuggggcugguggaccucuucgucuucuccaccagcuucuaccugaucuccaucuuccugcaccuggugaagaucccgacgcaccgccacaucgugggcaagcccugccccaagccccaccggcucaaccacauggggaucugcagcugcggccuguacaagcacccggggguccccgugaaguggaagcgcugaggacuagucccuguucccagagcccacuuuuuuuucuuuuuuugaaauaaaauagccugucuuucagaucucaaaggcucuuuucagagccaccaaaaaaaaaaaaaaaaaaaaaaaaaaaaaaaaaaaaaaaaaaaaaaaaaaaaaaaaaaaaaaaaagaauu

SEQ ID NO: 33288 - RNA, 1714 nt, Artificial Sequence
  mRNA product Design a-1 (hSL-A64-N5) comprising derived and/or modified sequence from LASV(GA391;Clade III)__CAA36645__GPCmut8 (opt1)
aggagagucccgcagucggcguccagcggcucugcuuguucgugugugugucguugcaggccuuauucaagcuuaccaugggccagaucgugaccuucuuccaggaggucccccacgugaucgaggaggugaugaacaucguccugaucgcccucagcauccuggccauccugaaggggcucuacaacguggcgaccugcggccugaucgggcuggugacguuccuccugcuguccggccgcagcugcucccucaucuacaaggggaccuacgagcugcagacccuggagcucaacauggagacccugaacaugugcaugccgcugagcugcaccaagaacaacucccaccacuacauccgggucggcaacgagaccggccucgagcugacccugacgaacaccagcauccucaaccacaaguucugcaaccuguccgacgcccacaagcgcaaccuguacgaccacagccucauguccaucaucagcaccuuccaccuguccauccccaacuucaaccaguacgaggccaugagcugcgacuucaacgggggcaagaucaccgugcaguacaaccugucccacagcuucgccguggacgccgcggggcacugcggcacgcucgccaacgggguccugcagaccuucaugcggauggccuggggcggcuccuacaucgcccuggacagcgggcgcggcaacugggacugcaucaugaccuccuaccaguaccucaucauccagaacaccacgugggacgaccacugccaguucagccggcccucccccaucggguaccugggccugcucagccagcgcacccgggacaucuacaucagccgccggcugcugggcaccuucaccuggacgcucuccgacagcgaggggaacgagaccccgggcggguacugccugacccgcuggaugcugaucgaggcggagcucaagugcuucggcaacaccgccguggccaagugcaacgagaagcacgacgaggaguucugcgacaugcugcggcuguucgacuucugcaagcaggccauccgccggcucaagacgcccgcccagauguccauccagcugaucaacaaggcggugaacgcccugaucaacgaccagcucaucaugaagaaccaccuccgcgacaucauggggauccccuacugcaacuacagccgguacugcuaccugaaccacaccuccaccggcaagaccagccugccccgcugcugccugaucuccaacggcagcuaccugaacgagacgaaguucuccgacgacaucgagcagcaggccgacaacaugaucaccgagaugcuccagaaggaguacaucgaccggcaggggaagacgccccugggccuggucgaccuguucguguucagcaccuccuucuaccucaucagcaucuuccugcaccuggugaagaucccgacccaccgccacaucgucgggaagcccugccccaagccccaccggcucaaccacaugggcaucugcuccugcgggcuguacaagcagccgggcgugcccgugcgcuggaagcggugaggacuagucccuguucccagagcccacuuuuuuuucuuuuuuugaaauaaaauagccugucuuucagaucucaaaggcucuuuucagagccaccaaaaaaaaaaaaaaaaaaaaaaaaaaaaaaaaaaaaaaaaaaaaaaaaaaaaaaaaaaaaaaaaagaauu

SEQ ID NO: 33289 - RNA, 1717 nt, Artificial Sequence
  mRNA product Design a-1 (hSL-A64-N5) comprising derived and/or modified sequence from LASV(AV;Clade V)__CCA30314__GPCmut8 (opt1)
aggagagucccgcagucggcguccagcggcucugcuuguucgugugugugucguugcaggccuuauucaagcuuaccaugggccagaucgugaccuucuuccaggaggucccccacgugaucgaggaggugaugaacaucguccugaucgcccucagcauccuggccgugcugaaggggcucuacaacaucgcgaccugcggccugaucgggcugaucacguuccuccugcugugcggccgcuccugcagcuccaaccucuacaaggggguguacgagcugcagagccuggaccucaacauggagacccugaacaugugcaugccgcuguccugcaccaagaacaacagccaccacuacauccgggucggcaacgacacgggccucgagcugacccugaccaacaccuccauccucaaccacaaguucugcaaccugagcgacgcccacaagaaggaccuguacgaccacgcccucauguccaucaucagcacguuccaccuguccauccccaacuucaaccaguacgaggccaugagcugcgacuucaacgggggcaagaucuccgugcaguacaaccugagccacuccuacgccaucgacgcggccaaccacugcgggaccguggccaacggcauccuccagaccuucaugcgcauggccuggggcgggagcuacaucgcgcuggacuccggccgggggaacugggacugcaucaugaccagcuaccaguaccugaucauccagaacacgaccugggagaaccacugccaguucucccgccccagccccaucggcuaccucgggcugcugagccagcggacccgcgacaucuacaucucccggcgccuccugggcaccuucacguggacccugagcgacuccgagggcaacgccacccccgggggcuacugccucacccgguggaugcugaucgaggccgagcugaagugcuucgggaacacggccgucgccaagugcaacgagaagcacgacgaggaguucugcgacaugcuccgccuguucgacuucugcaagcaggcgaucagccggcugaagucccccgcccagaugagcauccagcucaucaacaaggccgugaacgcccugaucaacgaccagcugaucaugaagaaccaccuccgcgacaucaugggcauccccuacugcaacuacuccaaguacugcuaccugaaccacaccaucaccgggaagaccagccugcccaagugcugccucguguccaacggcagcuaccugaacgagacgcacuucuccgacgacaucgagcagcaggccgacaacaugaucaccgagaugcugcagaaggaguacauggagcggcagggcaagaccccgcucgggcuggucgaccuguucguguucagcaccuccuucuaccugaucagcaucuuccuccgccuggugaagaucccgacgcaccggcacaucgucggcaagcccugccccaagccccaccgccugaaccacauggggaucugcuccugcggccucuacaagcagccgggggugcccgugcgguggaagcgcugaggacuagucccuguucccagagcccacuuuuuuuucuuuuuuugaaauaaaauagccugucuuucagaucucaaaggcucuuuucagagccaccaaaaaaaaaaaaaaaaaaaaaaaaaaaaaaaaaaaaaaaaaaaaaaaaaaaaaaaaaaaaaaaaagaauu

SEQ ID NO: 33290 - RNA, 1714 nt, Artificial Sequence
  mRNA product Design a-1 (hSL-A64-N5) comprising derived and/or modified sequence from LASV(Togo/2016/7082;Clade VI)__AMR44577__GPCmut8 (opt1)
aggagagucccgcagucggcguccagcggcucugcuuguucgugugugugucguugcaggccuuauucaagcuuaccaugggccagaucaucaccuucuuccaggaggugccccacgucaucgaggaggugaugaacaucgugcugaucgcccucagccugcuggccauccucaagggggucuacaacguggcgaccugcggcaucaucgggcuggugacguuccuguuccucugcggccgcuccugcagccugaucuacaagggguccuacgagcugcagacccucgagcugaacauggagacccugaacaugugcaugccgcucagcugcacgaagaacuccagccaccacuacauccgggucggcaacgagaccggccuggagcugacccucaccaacacguccaucaucaaccacaaguucugcaaccugagcgacgcccacaagcgcaaccuguacgaccacgcccucauguccauccugagcaccuuccaccuguccauccccaacuucaaccaguacgaggccaugagcugcgacuucaacgggggcaagaucuccgugcaguacaaccucagccacgccuacgcgguggacgccgccgagcacugcgggaccgucgccaacggcgugcugcagaccuucaugcggauggcguggggcggguccuacaucgcccuggacagcggccgcgggaacugggacugcaucaugacguccuaccaguaccucaucauccagaacaccaccugggaggaccacugccaguucagccggcccucccccaucggcuaccuggggcugcucagccagcgcacccgggacaucuacaucagccgccggcugcugggcacguucaccuggacccucuccgacagcgagggcaacgagacccccgggggcuacugccugacgcgcuggaugcugaucgaggccgagcucaagugcuucgggaacaccgccguggccaagugcaacgagaagcacgacgaggaguucugcgacaugcugcggcuguucgacuucugcaagcaggcgauccagcgccucaagucccccgcccagaugagcauccagcugaucaacaaggccgucaacgcccugaucaacgaccagcucaucaugaagaaccaccuccgggacaugaugggcauccccuacugcaacuacuccaaguacugcuaccugaaccacaccagcuccgggcgcaccagccugcccaagugcugccugguguccaacggcagcuaccugaacgagacgcacuucuccgacgacaucgagcagcaggccgacaacaugaucaccgagaugcuccagaaggaguacaucgaccggcagggcaagaccccgcuggggcugguggaccucuucgucuucagcaccuccuucuaccugaucagcaucuuccugcaccugaucaagaucccgacgcaccgccacaucgugggcaagcccugccccaagccccaccggcucaaccacauggggaucugcuccugcggccuguacaagcagccgggggugcccacccgcuggaagcggugaggacuagucccuguucccagagcccacuuuuuuuucuuuuuuugaaauaaaauagccugucuuucagaucucaaaggcucuuuucagagccaccaaaaaaaaaaaaaaaaaaaaaaaaaaaaaaaaaaaaaaaaaaaaaaaaaaaaaaaaaaaaaaaaagaauu

SEQ ID NO: 33291 - RNA, 1714 nt, Artificial Sequence
  mRNA product Design a-1 (hSL-A64-N5) comprising derived and/or modified sequence from LASV(KAK-428;Clade n.d. (VII))__ANH09740__GPCmut8 (opt1)
aggagagucccgcagucggcguccagcggcucugcuuguucgugugugugucguugcaggccuuauucaagcuuaccaugggccagaucgugaccuucuuccaggaggucccccacgugaucgaggaggugaugaacaucguccugaucgcccucagccugcuggccauccucaaggggcuguacaacuucgcgaccugcggcgugaucgggcugaucacguuccuccugcugugcggccgcuccugcagcgccaccuacaaggggcaguacgagcuccagacccuggagcugaacauggagucccucaacaugugcaugccgcugagcugcacgaagaacaacucccaccacuacauccgggccggcaacaacaccggccuggagcucacccugaccaacacgagcaucaucucccacaaguucugcaaccugagcgacgcccacaagaagaaccucuacgaccacacccugauguccaucaucaccaccuuccaccugagcauccccaacuucaaccaguacgaggccauguccugcgacuucaacgggggcaagaucagcauccaguacaaccucucccacagcuacgcgggggacgccgcccagcacugcggcacgguggccaacgggguccugcagaccuucaugcgcauggcguggggcggcuccuaccuggcccucgacagcgggcggcgcggcugggacugcaucaucuccagcuaccaguaccugaucauccagaacaccaccugggacgaccacugccaguucucccggcccagccccaucggguaccugggcuucgugagccagaagacgcgcgacaucuacaucucccggcgccuccugggcaccuucaccuggacccugagcgacuccgaggggcacgacaugccgggcggguacugccucacgcgguggaugcugaucgaggccgaccugaagugcuucggcaacaccgccguggccaagugcaacgagaagcacgacgaggaguucugcgacauguggcgccucuucgacuucugcaagcaggcgauccagcggcugaaggcccccgcccagaugaacauccagcugaucaacaaggccgucaacgcccucaucaacgaccagcugaugaugaagaaccaccuccgcgacaucauggggauccccuacugcaacuacagcaaguucugcuaccugaacaacaccaccacgggccggaccucccugccccgcugcugccugaucagcaacggcuccuaccucaacgagacccacuucagcgacgacaucgagcagcaggcggacaacaugaucaccgagaugcugcagaaggaguacauggaccggcaggggaagacgccccugggccucguggaccuguucguguucuccaccagcuucuaccugaucaccaucuuccuccaccuggucaagaucccgacccaccgccacaucguggggaagcccugccccaagccccaccggcugaaccacaugggcaucugcuccugcgggcuguacaagcagccgggcgugcccguccgcuggaagcggugaggacuagucccuguucccagagcccacuuuuuuuucuuuuuuugaaauaaaauagccugucuuucagaucucaaaggcucuuuucagagccaccaaaaaaaaaaaaaaaaaaaaaaaaaaaaaaaaaaaaaaaaaaaaaaaaaaaaaaaaaaaaaaaaagaauu

SEQ ID NO: 33292 - RNA, 1714 nt, Artificial Sequence; identical to SEQ ID NO: 33286
  mRNA product Design a-1 (hSL-A64-N5) comprising derived and/or modified sequence from LASV(Pinneo-NIG-1969;Clade I)__AIT17836__GPCmut8 (opt1)

SEQ ID NO: 33293 - RNA, 1714 nt, Artificial Sequence
  mRNA product Design a-1 (hSL-A64-N5) comprising derived and/or modified sequence from LASV(ISTH0009-NIG-2011;Clade II)__AIT17404__GPCmut8 (opt1)
aggagagucccgcagucggcguccagcggcucugcuuguucgugugugugucguugcaggccuuauucaagcuuaccaugggccagaucaucaccuucuuccaggaggugccccacgucaucgaggaggugaugaacaucgugcugaucgcccucagccugcuggccauccucaaggggaucuacaacgucgcgaccugcggccuguucgggcugguguccuuccuccugcugugcggccgcagcugcuccacgaccuacaaggggguguacgagcuccagacccuggagcuggacauggccagccucaacaugugcaugccgcuguccugcacgaagaacaacagccaccacuacaucauggucggcaacgagaccggccuggagcucacccugaccaacacguccaucaucaaccacaaguucugcaaccugagcgacgcccacaagaagaaccucuacgaccacgcccugauguccaucaucagcaccuuccaccuguccauccccaacuucaaccaguacgaggccaugagcugcgacuucaacgggggcaagaucuccgugcaguacaaccucagccacgcguacgccguggacgccgccaaccacugcgggaccaucgcgaacggcguccugcagaccuucaugcggauggccuggggcggguccuacaucgcccuggacagcggcaagggguccugggacugcaucaugacgagcuaccaguaccucaucauccagaacaccaccugggaggaccacugccaguucucccgccccagccccaucggcuaccuggggcugcucagccagcggacccgcgacaucuacaucucccggcgccugcugggcacguucaccuggacccucagcgacuccgagggcaacgagacccccgggggcuacugccugacgcgguggaugcugaucgaggccgagcucaagugcuucgggaacaccgccguggcgaagugcaacgagaagcacgacgaggaguucugcgacaugcugcgccuguucgacuucugcaagcaggccauccggcgccucaagacccccgcccagaugagcauccagcugaucaacaaggccgugaacgcccugaucaacgaccagcucaucaugaagaaccaccuccgggacaucaugggcaucccguacugcaacuacuccaaguacugcuaccugaaccacaccgucacggggaagaccagccugccccgcugcugccugguguccaacggcagcuaccugaacgagacccacuucuccgacgacaucgagcagcaggcggacaacaugaucaccgagcuccugcagaaggaguacauggaccggcagggcaagacgccccuggggcucguggaccuguucgucuucagcaccuccuucuaccugaucagcaucuuccugcaccucaucaagaucccgacccaccgccacaucaccggcaagcccugccccaagccccaccggcugaaccacauggggaucugcuccugcggccuguacaagcacccgggggugcccgugaaguggaagcgcugaggacuagucccuguucccagagcccacuuuuuuuucuuuuuuugaaauaaaauagccugucuuucagaucucaaaggcucuuuucagagccaccaaaaaaaaaaaaaaaaaaaaaaaaaaaaaaaaaaaaaaaaaaaaaaaaaaaaaaaaaaaaaaaaagaauu

SEQ ID NO: 33294 - RNA, 1714 nt, Artificial Sequence
  mRNA product Design a-1 (hSL-A64-N5) comprising derived and/or modified sequence from LASV(ISTH2010-NIG-2012;Clade II)__AIT17482__GPCmut8 (opt1)
aggagagucccgcagucggcguccagcggcucugcuuguucgugugugugucguugcaggccuuauucaagcuuaccaugggccagaucaucaccuucuuccaggaggugccccacgucaucgaggaggugaugaacaucgugcugaucgcccucagccugcuggccauccucaaggggaucuacaacgucgcgaccugcggccuguucgggcugguguccuuccuccugcugugcggccgcagcugcuccacgaccuacaaggggguguacgagcuccagacccuggagcuggacauggccagccucaacaugugcaugccgcuguccugcacgaagaacaacagccaccacuacaucauggucggcaacgagaccggccuggagcucacccugaccaacacguccaucaucaaccacaaguucugcaaccugagcgacgcccacaagaagaaccucuacgaccacgcccugauguccaucaucagcaccuuccaccuguccauccccaacuucaaccaguacgaggccaugagcugcgacuucaacgggggcaagaucuccgugcaguacaaccucagccacgcguacgccguggacgccgccaaccacugcgggaccaucgcgaacggcguccugcagaccuucaugcggauggccuggggcggguccuacaucgcccuggacagcggcaagggguccugggacugcaucaugacgagcuaccaguaccucaucauccagaacaucaccugggaggaccacugccaguucucccgccccagccccaucggcuaccuggggcugcucagccagcggacccgcgacaucuacaucucccggcgccugcugggcaccuucacguggacccucagcgacuccgagggcaacgagacccccgggggcuacugccugacccgguggaugcugaucgaggccgagcucaagugcuucgggaacacggccguggcgaagugcaacgagaagcacgacgaggaguucugcgacaugcugcgccuguucgacuucugcaagcaggccauccggcgccucaagacccccgcccagaugagcauccagcugaucaacaaggccgugaacgcccugaucaacgaccagcucaucaugaagaaccaccuccgggacaucaugggcauccccuacugcaacuacuccaaguacugcuaccugaaccacaccgucaccgggaagacgagccugccccgcugcugccugguguccaacggcagcuaccugaacgagacccacuucuccgacgacaucgagcagcaggcggacaacaugaucaccgagcuccugcagaaggaguacaucgaccggcagggcaagaccccgcuggggcucguggaccuguucgucuucagcacguccuucuaccugaucagcaucuuccugcaccucgugaagaucccgacccaccgccacguggucggcaagcccugccccaagccccaccggcugaaccacauggggaucugcuccugcggccuguacaagcacccgggggugcccgugaaguggaagcgcugaggacuagucccuguucccagagcccacuuuuuuuucuuuuuuugaaauaaaauagccugucuuucagaucucaaaggcucuuuucagagccaccaaaaaaaaaaaaaaaaaaaaaaaaaaaaaaaaaaaaaaaaaaaaaaaaaaaaaaaaaaaaaaaaagaauu

SEQ ID NO: 33295 - RNA, 1714 nt, Artificial Sequence
  mRNA product Design a-1 (hSL-A64-N5) comprising derived and/or modified sequence from LASV(Lassa virus/H.sapiens-wt/NGA/2015/ISTH_0543;Clade II)__AVO03639__GPCmut8 (opt1)
aggagagucccgcagucggcguccagcggcucugcuuguucgugugugugucguugcaggccuuauucaagcuuaccaugggccagaucaucaccuucuuccaggaggugccccacgucaucgaggaggugaugaacaucgugcugaucgcccucagccugcuggccauccucaaggggaucuacaacgucgcgaccugcggccuguucgggcugguguccuuccuccugcugugcggccgcagcugcuccacgaccuacaaggggguguacgagcuccagacccuggagcuggacauggccaaccucaacaugugcaugccgcugagcugcacgaagaacaacucccaccacuacaucauggucggcaacgagaccggccuggagcucacccugaccaacacgagcaucaucaaccacaaguucugcaaccuguccgacgcccacaagaagaaccucuacgaccacgcccugaugagcaucaucuccaccuuccaccugagcauccccaacuucaaccaguacgaggccauguccugcgacuucaacgggggcaagaucagcgugcaguacaaccucucccacaccuacgcgguggacgccgccaaccacugcgggaccaucgccaacggcguccugcagacguucaugcggauggcguggggcgggagcuacaucgcccuggacuccggcaaggggagcugggacugcaucaugaccuccuaccaguaccucgugauccagaacaccaccugggaggaccacugccaguucagccgccccucccccaucggcuaccuggggcugcucagccagcggacgcgcgacaucuacaucagccggcgccugcugggcaccuucaccuggacccucuccgacagcgagggcaacgagacgcccgggggcuacugccugacccgguggaugcugaucgaggccgagcucaagugcuucgggaacaccgccguggccaagugcaacgagaagcacgacgaggaguucugcgacaugcugcgccuguucgacuucugcaagcaggcgauccggcgccucaagacccccgcccagauguccauccagcugaucaacaaggccgucaacgcccugaucaacgaccagcucaucaugaagaaccaccuccgggacaucaugggcauccccuacugcaacuacagcaaguacugcuaccugaaccacacggugaccgggaagaccucccugccccgcugcugccuggugagcaacggcuccuaccugaacgagacccacuucagcgacgacaucgagcagcaggccgacaacaugaucacggagcuccugcagaaggaguacaucgaccggcagggcaagaccccgcuggggcucgucgaccuguucguguucuccaccagcuucuaccugaucuccaucuuccugcaccucgugaagaucccgacccaccgccacaucacgggcaagcccugccccaagccccaccggcugaaccacauggggaucugcagcugcggccuguacaagcacccggggguccccgugaaguggaagcgcugaggacuagucccuguucccagagcccacuuuuuuuucuuuuuuugaaauaaaauagccugucuuucagaucucaaaggcucuuuucagagccaccaaaaaaaaaaaaaaaaaaaaaaaaaaaaaaaaaaaaaaaaaaaaaaaaaaaaaaaaaaaaaaaaagaauu

SEQ ID NO: 33296 - RNA, 1714 nt, Artificial Sequence
  mRNA product Design a-1 (hSL-A64-N5) comprising derived and/or modified sequence from LASV(Lassa virus/H.sapiens-wt/NGA/2016/ISTH_0009;Clade II)__AVO03571__GPCmut8 (opt1)
aggagagucccgcagucggcguccagcggcucugcuuguucgugugugugucguugcaggccuuauucaagcuuaccaugggccagaucaucaccuucuuccaggaggugccccacgucaucgaggaggugaugaacaucgugcugaucgcccucagccugcuggccauccucaaggggaucuacaacgucgcgaccugcggccugcuggggcucguguccuuccugcugcucugcggccgcagcugcuccacgaccuacaaggggguguacgagcugcagacccuggagcucgacauggccagccugaacaugugcaugccgcuguccugcacgaagaacaacagccaccacuacaucauggucggcaacgagaccggccucgagcugacccugaccaacacguccaucaucaaccacaaguucugcaaccucagcgacgcccacaagaagaaccuguacgaccacgcccugauguccaucaucagcaccuuccaccucuccauccccaacuucaaccaguacgaggccaugagcugcgacuucaacgggggccggaucuccgugcaguacaaccugagccacuccuacgcgguggacgccgccaaccacugcgggaccaucgccaacggcguccugcagaccuucaugcgcauggcguggggcgggagcuacaucgcccucgacuccggcaaggggagcugggacugcaucaugacguccuaccaguaccugaucauccagaacaccaccugggaggaccacugccaguucagccggcccagccccaucggcuaccuggggcuccugucccagcgcacccgggacaucuacaucagccgccggcugcucggcacguucaccuggacccuguccgacagcgagggcaacgagacccccgggggcuacugccugacgcgcuggaugcucaucgaggccgagcugaagugcuucgggaacaccgccguggccaagugcaacgagaagcacgacgaggaguucugcgacaugcugcggcuguucgacuucugcaagcaggcgauccgccggcugaagacccccgcccagauguccauccagcugaucaacaaggccgugaacgcccucaucaacgaccagcugaucaugaagaaccaccuccgcgacaucaugggcaucccguacugcaacuacagcaaguacugcuaccucaaccacaccgucacggggaagaccucccugccccggugcugccuggugagcaacggcuccuaccucaacgagacccacuucagcgacgacaucgagcagcaggccgacaacaugaucaccgagcugcugcagaaggaguacaucgaccgccagggcaagacgccccucgggcugguggaccuguucgucuucuccaccagcuucuaccugaucuccaucuuccuccaccuggugaagaucccgacccaccggcacaucaccggcaagcccugccccaagccccaccgccugaaccacauggggaucugcagcugcggccucuacaaccacccgggggugcccgucaaguggaagcggugaggacuagucccuguucccagagcccacuuuuuuuucuuuuuuugaaauaaaauagccugucuuucagaucucaaaggcucuuuucagagccaccaaaaaaaaaaaaaaaaaaaaaaaaaaaaaaaaaaaaaaaaaaaaaaaaaaaaaaaaaaaaaaaaagaauu

SEQ ID NO: 33297 - RNA, 1714 nt, Artificial Sequence
  mRNA product Design a-1 (hSL-A64-N5) comprising derived and/or modified sequence from LASV(Lassa virus/H.sapiens-wt/NGA/2016/ISTH_0017;Clade II)__AVO03567__GPCmut8 (opt1)
aggagagucccgcagucggcguccagcggcucugcuuguucgugugugugucguugcaggccuuauucaagcuuaccaugggccagaucaucaccuucuuccaggaggugccccacgucaucgaggaggugaugaacaucgugcugaucgcccucagccugcuggccauccucaaggggaucuacaacgucgcgaccugcggccuguucgggcugguguccuuccuccugcugugcggccgcagcugcuccacgaccuacaaggggguguacgagcuccagacccuggagcuggacauggccagccucaacaugugcaugccgcuguccugcacgaagaacaacagccaccacuacaucauggucggcaacgagaccggccuggagcucacccugaccaacacguccaucaucaaccacaaguucugcaaccugagcgacgcccacaagaagaaccucuacgaccacgcccugauguccaucaucagcaccuuccaccuguccauccccaacuucaaccaguacgaggccaugagcugcgacuucaacgggggcaagaucuccgugcaguacaaccucagccacaccuacgcgaucgacgccgccaaccacugcgggaccaucgccaacggcgugcugcagacguucaugcggauggcguggggcggguccuacaucgcccuggacagcggcaagggguccugggacugcaucaugaccagcuaccaguaccucaucauccagaacaccaccugggaggaccacugccaguucucccgccccagccccaucggcuaccuggggcugcucagccagcggacgcgcgacaucuacaucucccggcgccugcugggcaccuucaccuggacccucagcgacuccgagggcaacgagacgcccgggggcuacugccugacccgguggaugcugaucgaggccgagcucaagugcuucgggaacaccgccgucgccaagugcaacgagaagcacgacgaggaguucugcgacaugcugcgccuguucgacuucugcaagcaggcgauccggcgccucaagacccccgcccagaugagcauccagcugaucaacaaggccgugaacgcccugaucaacgaccagcucaucaugaagaaccaccuccgggacaucaugggcauccccuacugcaacuacuccaaguacugcuaccugaaccacacggugaccgggaagaccagccugccccgcugcugccuggucuccaacggcagcuaccugaacgagacccacuucuccgacgacaucgagcagcaggccgacaacaugaucacggagcuccugcagaaggaguacauggaccggcagggcaagaccccgcuggggcucguggaccuguucguguucagcaccuccuucuaccugaucagcaucuuccugcaccucguccgcaucccgacccaccggcacgugaucggcaagcccugccccaagccccaccgccugaaccacauggggaucugcuccugcggccuguacaagcacccgggggugcccgucaaguggaagcggugaggacuagucccuguucccagagcccacuuuuuuuucuuuuuuugaaauaaaauagccugucuuucagaucucaaaggcucuuuucagagccaccaaaaaaaaaaaaaaaaaaaaaaaaaaaaaaaaaaaaaaaaaaaaaaaaaaaaaaaaaaaaaaaaagaauu

SEQ ID NO: 33298 - RNA, 1714 nt, Artificial Sequence
  mRNA product Design a-1 (hSL-A64-N5) comprising derived and/or modified sequence from LASV(Lassa virus/H.sapiens-wt/NGA/2018/ISTH_0959;Clade II)__AVV65099__GPCmut8 (opt1)
aggagagucccgcagucggcguccagcggcucugcuuguucgugugugugucguugcaggccuuauucaagcuuaccaugggccagaucaucaccuucuuccaggaggugccccacgucaucgaggaggugaugaacaucgugcugaucgcccucagccugcuggccauccucaaggggaucuacaacgucgugaccugcggccuguucgggcugguguccuuccuccugcugugcggccgcagcugcuccacgaccuacaagggggucuacgagcuccagacccuggagcuggacauggcgagccucaacaugugcaugccgcuguccugcacgaagaacaacagccaccacuacaucauggugggcaacgagaccggccuggagcucacccugaccaacacguccaucaucaaccacaaguucugcaaccugagcgacgcccacaagaagaaccucuacgaccacgcccugauguccaucaucagcaccuuccaccuguccauccccaacuucaaccaguacgaggccaugagcugcgacuucaacgggggcaagaucuccgugcaguacaaccucagccacgccuacgcgaucgacgccgccaaccacugcgggaccaucgccaacggcguccugcagaccuucaugcggauggcguggggcggguccuacaucgcccuggacagcggcaagggguccugggacugcaucaugacgagcuaccaguaccucaucauccagaacaccaccugggaggaccacugccaguucucccgccccagccccaucggcuaccuggggcugcucagccagcggacccgcgacaucuacaucucccggcgccugcugggcacguucaccuggacccucagcgacuccgagggcaacgagacccccgggggcuacugccugacgcgguggaugcugaucgaggccgagcucaagugcuucgggaacaccgccguggccaagugcaacgagaagcacgacgaggaguucugcgacaugcugcgccuguucgacuucugcaagcaggcgauccggcgccucaagacccccgcccagaugagcauccagcugaucaacaaggccgugaacgcccugaucaacgaccagcucaucaugaagaaccaccuccgggacaucaugggcaucccguacugcaacuacuccaaguacugcuaccugaaccacaccgucacggggaagaccagccugccccgcugcugccugguguccaacggcagcuaccugaacgagacccacuucuccgacgacaucgagcagcaggccgacaacaugaucaccgagcuccugcagaaggaguacaucgaccggcagggcaagacgccccuggggcucguggaccuguucgucuucagcaccuccuucuaccugaucagcaucuuccugcaccucgugaagaucccgacccaccgccacgugaucggcaagcccugccccaagccccaccggcugaaccacauggggaucugcuccugcggccuguacaagcacccggggguccccgugaaguggaagcgcugaggacuagucccuguucccagagcccacuuuuuuuucuuuuuuugaaauaaaauagccugucuuucagaucucaaaggcucuuuucagagccaccaaaaaaaaaaaaaaaaaaaaaaaaaaaaaaaaaaaaaaaaaaaaaaaaaaaaaaaaaaaaaaaaagaauu

SEQ ID NO: 33299 - RNA, 1714 nt, Artificial Sequence
  mRNA product Design a-1 (hSL-A64-N5) comprising derived and/or modified sequence from LASV(LASV003-NIG-2008;Clade II)__AIT17580__GPCmut8 (opt1)
aggagagucccgcagucggcguccagcggcucugcuuguucgugugugugucguugcaggccuuauucaagcuuaccaugggccagaucaucaccuucuuccaggaggugccccacgucaucgaggaggugaugaacaucgugcugaucgcccucagccugcuggccauccucaaggggaucuacaacgucgcgaccugcggccuguucgggcugguguccuuccuccugcugugcggccgcagcugcuccacgaccuacaaggggguguacgagcuccagacccuggagcuggacauggccagccucaacaugugcaugccgcuguccugcacgaagaacaacagccaccacuacaucauggucggcaacgagaccggccuggagcucacccugaccaacacguccaucaucaaccacaaguucugcaaccugagcgacgcccacaagaagaaccucuacgaccacgcccugauguccaucaucagcaccuuccaccuguccauccccaacuucaaccaguacgaggccaugagcugcgacuucaacgggggcaagaucuccgugcaguacaaccucagccacaccuacgcgguggacgccgccaaccacugcgggaccaucgccaacggcguccugcagacguucaugcggauggcguggggcggguccuacaucgcccuggacagcggcaagggguccugggacugcaucaugaccagcuaccaguaccucaucauccagaacaccaccugggaggaccacugccaguucucccgccccagccccaucggcuaccuggggcugcucagccagcggacgcgcgacaucuacaucucccggcgccugcugggcaccuucaccuggacccucagcgacuccgagagcaacgagacgccgggcggguacugccugacccgguggaugcugaucgaggccgagcucaagugcuucggcaacaccgccguggccaagugcaacgagaagcacgacgaggaguucugcgacaugcugcgccuguucgacuucugcaagcaggcgauccggcgccucaaggcccccgcccagauguccauccagcugaucaacaaggccgugaacgcccugaucaacgaccagcucaucaugaagaaccaccuccgggacaucauggggauccccuacugcaacuacagcaaguacugcuaccugaaccacaccgucacgggccgcaccucccugccccggugcugccuggugagcaacggguccuaccugaacgagacccacuucagcgacgacaucgagcagcaggcggacaacaugaucaccgagcuccugcagaaggaguacauggaccgccagggcaagacgccccugggccucguggaccuguucgucuucuccaccagcuucuaccugaucuccaucuuccugcaccucgugaagaucccgacccaccggcacgugaucgggaagcccugccccaagccccaccgccugaaccacaugggcaucugcagcugcgggcuguacaagcacccgggcguccccgugaaguggaagcggugaggacuagucccuguucccagagcccacuuuuuuuucuuuuuuugaaauaaaauagccugucuuucagaucucaaaggcucuuuucagagccaccaaaaaaaaaaaaaaaaaaaaaaaaaaaaaaaaaaaaaaaaaaaaaaaaaaaaaaaaaaaaaaaaagaauu

SEQ ID NO: 33300 - RNA, 1714 nt, Artificial Sequence
  mRNA product Design a-1 (hSL-A64-N5) comprising derived and/or modified sequence from LASV(LASV035-NIG-2009;Clade II)__AIT17588__GPCmut8 (opt1)
aggagagucccgcagucggcguccagcggcucugcuuguucgugugugugucguugcaggccuuauucaagcuuaccaugggccagaucaucaccuucuuccaggaggugccccacgucaucgaggaggugaugaacaucgugcugaucgcccucagccugcuggccauccucaaggggaucuacaacgucgcgaccugcggccuguucgggcugguguccuuccuccugcugugcggccgcagcugcuccacgaccuacaaggggguguacgagcuccagacccuggagcuggacauggccagccucaacaugugcaugccgcuguccugcacgaagaacaacagccaccacuacaucauggucggcaacgagaccggccuggagcucacccugaccaacacguccaucaucaaccacaaguucugcaaccugagcgacgcccacaagaagaaccucuacgaccacgcccugauguccaucaucagcaccuuccaccuguccauccccaacuucaaccaguacgaggccaugagcugcgacuucaacgggggcaagaucuccgugcaguacaaccucagccacgcguacgccguggacgccgccaaccacugcgggaccaucgcgaacggcguccugcagaccuucaugcggauggccuggggcggguccuacaucgcccuggacagcggcaagggguccugggacugcaucaugacgagcuaccaguaccucaucauccagaacaccaccugggaggaccacugccaguucucccgccccagccccaucggcuaccuggggcugcucagccagcggacccgcgacaucuacaucucccggcgccugcugggcacguucaccuggacccucagcgacuccgagggcaacgagacccccgggggcuacugccugacgcgguggaugcugaucgaggccgagcucaagugcuucgggaacaccgccguggcgaagugcaacgagaagcacgacgaggaguucugcgacaugcugcgccuguucgacuucugcaagcaggccauccggcgccucaaggcccccgcccagaugagcauccagcugaucaacaaggccgugaacgcgcugaucaacgaccagcucaucaugaagaaccaccuccgggacaucaugggcauccccuacugcaacuacuccaaguacugcuaccugaaccacaccgucaccgggaagacgagccugccccgcugcugccugguguccaacggcagcuaccugaacgagacccacuucuccgacgacaucgagcagcaggccgacaacaugaucaccgagcuccugcagaaggaguacaucgaccggcagggcaagaccccgcuggggcucguggaccuguucgucuucagcacguccuucuaccugaucagcaucuuccugcaccucgugaagaucccgacccaccgccacgugaucggcaagcccugccccaagccccaccggcugaaccacauggggaucugcuccugcggccuguacaagcacccggggguccccgugaaguggaagcgcugaggacuagucccuguucccagagcccacuuuuuuuucuuuuuuugaaauaaaauagccugucuuucagaucucaaaggcucuuuucagagccaccaaaaaaaaaaaaaaaaaaaaaaaaaaaaaaaaaaaaaaaaaaaaaaaaaaaaaaaaaaaaaaaaagaauu

SEQ ID NO: 33301 - RNA, 1714 nt, Artificial Sequence
  mRNA product Design a-1 (hSL-A64-N5) comprising derived and/or modified sequence from LASV(LASV1000-NIG-2009;Clade II)__AIT17782__GPCmut8 (opt1)
aggagagucccgcagucggcguccagcggcucugcuuguucgugugugugucguugcaggccuuauucaagcuuaccaugggccagaucaucaccuucuuccaggaggugccccacgucaucgaggaggugaugaacaucgugcugaucgcccucagccugcuggccauccucaaggggaucuacaacgucgcgaccugcggccuguucgggcugguguccuuccuccugcugugcggccgcagcugcuccacgaccuacaaggggguguacgagcuccagacccuggagcuggacauggccagccucaacaugugcaugccgcuguccugcacgaagaacaacagccaccacuacaucauggucggcaacgagaccggccuggagcucacccugaccaacacguccaucaucaaccacaaguucugcaaccugagcgacgcccacaagaagaaccucuacgaccacgcccugauguccaucaucagcaccuuccaccuguccauccccaacuucaaccaguacgaggccaugagcugcgacuucaacgggggcaagaucuccgugcaguacaaccucagccacaccuacgcgguggacgccgccaaccacugcgggaccaucgccaacggcguccugcagacguucaugcggauggcguggggcggguccuacaucgcccuggacagcggcaagggguccugggacugcaucaugaccagcuaccaguaccucaucauccagaacaccaccugggaggaccacugccaguucucccgccccagccccaucggcuaccuggggcugcucagccagcggacgcgcgacaucuacaucucccggcgccugcugggcaccuucaccuggacccucagcgacuccgagggcaacgagacgcccgggggcuacugccugacccgguggaugcugaucgaggccgagcucaagugcuucgggaacaccgccguggccaagugcaacgagaagcacgacgaggaguucugcgacaugcugcgccuguucgacuucugcaagcaggcgaucaagcggcucaagacccccgcccagaugagcauccagcugaucaacaaggccgugaacgcccugaucaacgaccagcucaucaugaagaaccaccuccgcgacaucaugggcauccccuacugcaacuacuccaaguacugcuaccugaaccacacggucaccgggaagaccagccugccccggugcugccugguguccaacggcagcuaccugaacgagacccacuucuccgacgacaucgagcagcaggccgacaacaugaucacggagcuccugcagaaggaguacaucgaccgccagggcaagaccccgcuggggcucguggaccuguucgucuucagcaccuccuucuaccugaucagcaucuuccugcaccucgugaagaucccgacccaccggcacguggucggcaagcccugccccaagccccaccgccugaaccacauggggaucugcuccugcggccuguacaagcacccgggggugcccgugaaguggaagcggugaggacuagucccuguucccagagcccacuuuuuuuucuuuuuuugaaauaaaauagccugucuuucagaucucaaaggcucuuuucagagccaccaaaaaaaaaaaaaaaaaaaaaaaaaaaaaaaaaaaaaaaaaaaaaaaaaaaaaaaaaaaaaaaaagaauu

SEQ ID NO: 33302 - RNA, 1714 nt, Artificial Sequence
  mRNA product Design a-1 (hSL-A64-N5) comprising derived and/or modified sequence from LASV(LASV221-NIG-2010;Clade II)__AIT17624__GPCmut8 (opt1)
aggagagucccgcagucggcguccagcggcucugcuuguucgugugugugucguugcaggccuuauucaagcuuaccaugggccagaucaucaccuucuuccaggaggugccccacgucaucgaggaggugaugaacaucgugcugaucgcccucagccugcuggccauccucaaggggaucuacaacgucgcgaccugcggccuguucgggcugguguccuuccuccugcugugcggccgcagcugcuccacgaccuacaaggggguguacgagcuccagacccuggagcuggacauggccagccucaacaugugcaugccgcuguccugcacgaagaacaacagccaccacuacaucauggucggcaacgagaccggccuggagcucacccugaccaacacguccaucaucaaccacaaguucugcaaccugagcgacgcccacaagaagaaccucuacgaccacgcccugauguccaucaucagcaccuuccaccuguccauccccaacuucaaccaguacgaggccaugagcugcgacuucaacgggggcaagaucuccgugcaguacaaccucagccacaccuacgcgaucgacgccgccaaccacugcgggaccaucgccaacggcgugcugcagacguucaugcggauggcguggggcggguccuacaucgcccuggacagcggcaagggguccugggacugcaucaugaccagcuaccaguaccucaucauccagaacaccaccugggaggaccacugccaguucucccgccccagccccaucggcuaccuggggcugcucagccagcggacgcgcgacaucuacaucucccggcgccugcugggcaccuucaccuggacccucagcgacuccgagggcaacgagacgcccgggggcuacugccugacccgguggaugcugaucgaggccgagcucaagugcuucgggaacaccgccgucgccaagugcaacgagaagcacgacgaggaguucugcgacaugcugcgccuguucgacuucugcaagcaggcgauccggcgccucaagacccccgcccagaugagcauccagcugaucaacaaggccgugaacgcccugaucaacgaccagcucaucaugaagaaccaccuccgggacaucaugggcauccccuacugcaacuacuccaaguacugcuaccugaaccacacggugaccgggaagaccagccugccccgcugcugccuggucuccaacggcagcuaccugaacgagacccacuucuccgacgacaucgagcagcaggccgacaacaugaucacggagaugcuccagaaggaguacauggaccggcagggcaagaccccgcuggggcugguggaccucuucguguucagcaccuccuucuaccugaucagcaucuuccugcaccuggucaagaucccgacccaccgccacgugaucggcaagcccugccccaagccccaccggcucaaccacauggggaucugcuccugcggccuguacaagcacccgggggugcccgucaaguggaagcgcugaggacuagucccuguucccagagcccacuuuuuuuucuuuuuuugaaauaaaauagccugucuuucagaucucaaaggcucuuuucagagccaccaaaaaaaaaaaaaaaaaaaaaaaaaaaaaaaaaaaaaaaaaaaaaaaaaaaaaaaaaaaaaaaaagaauu

SEQ ID NO: 33303 - RNA, 1714 nt, Artificial Sequence
  mRNA product Design a-1 (hSL-A64-N5) comprising derived and/or modified sequence from LASV(LASV237-NIG-2010;Clade II)__AIT17638__GPCmut8 (opt1)
aggagagucccgcagucggcguccagcggcucugcuuguucgugugugugucguugcaggccuuauucaagcuuaccaugggccagaucaucaccuucuuccaggaggugccccacgucaucgaggaggugaugaacaucgugcugaucgcccucagccugcuggccauccucaaggggaucuacaacgucgcgaccugcggccuguucgggcugguguccuuccuccugcugugcggccgcagcugcuccacgaccuacaaggggguguacgagcuccagacccuggagcuggacauggccagccucaacaugugcaugccgcuguccugcacgaagaacaacagccaccacuacaucauggucggcaacgagaccggccuggagcucacccugaccaacacguccaucaucaaccacaaguucugcaaccugagcgacgcccacaagaaggaccucuacgaccacgcccugauguccaucaucagcaccuuccaccuguccauccccaacuucaaccaguacgaggccaugagcugcgacuucaacgggggcaagaucuccgugcaguacaaccucagccacaccuacgcgguggacgccgccaaccacugcgggaccaucgccaacggcguccugcagacguucaugcggauggcguggggcggguccuacaucgcccuggacagcggcaagggguccugggacugcaucaugaccagcuaccaguaccucaucauccagaacaccaccugggaggaccacugccaguucucccgccccagccccaucggcuaccuggggcugcucagccagcggacgcgcgacaucuacaucucccggcgccugcugggcaccuucaccuggacccucagcgacuccgagggcaacgagacgcccgggggcuacugccugacccgguggaugcugaucgaggccgagcucaagugcuucgggaacaccgccguggccaagugcaacgagaagcacgacgaggaguucugcgacaugcugcgccuguucgacuucugcaagcaggcgauccggcgccucaagacccccgcccagaugagcauccagcugaucaacaaggccgugaacgcccugaucaacgaccagcucaucaugaagaaccaccuccgggacaucaugggcauccccuacugcaacuacuccaaguacugcuaccugaaccacacggucaccgggaagaccagccugccccgcugcugccugguguccaacggcagcuaccugaacgagacccacuucuccgacgacaucgagcagcaggccgacaacaugaucacggagcuccugcagaaggaguacauggaccggcagggcaagaccccgcuggggcucguggaccuguucgucuucagcaccuccuucuaccugaucagcaucuuccugcaccucaucaagaucccgacccaccgccacaucacgggcaagcccugccccaagccccaccggcugaaccacauggggaucugcuccugcggccuguacaagcacccgggggugcccgugaaguggaagcgcugaggacuagucccuguucccagagcccacuuuuuuuucuuuuuuugaaauaaaauagccugucuuucagaucucaaaggcucuuuucagagccaccaaaaaaaaaaaaaaaaaaaaaaaaaaaaaaaaaaaaaaaaaaaaaaaaaaaaaaaaaaaaaaaaagaauu

SEQ ID NO: 33304 - RNA, 1714 nt, Artificial Sequence
  mRNA product Design a-1 (hSL-A64-N5) comprising derived and/or modified sequence from LASV(LASV253-NIG-2011;Clade II)__AIT17670__GPCmut8 (opt1)
aggagagucccgcagucggcguccagcggcucugcuuguucgugugugugucguugcaggccuuauucaagcuuaccaugggccagaucaucaccuucuuccaggaggugccccacgucaucgaggaggugaugaacaucgugcugaucgcccucagccugcuggccauccucaaggggaucuacaacgucgcgaccugcggccuguucgggcugguguccuuccuccugcugugcggccgcagcugcuccacgaccuacaaggggguguacgagcuccagacccuggagcuggacauggccagccucaacaugugcaugccgcuguccugcacgaagaacaacagccaccacuacaucauggucggcaacgagaccggccuggagcucacccugaccaacacguccaucaucaaccacaaguucugcaaccugagcgacgcccacaagaagaaccucuacgaccacgcccugauguccaucaucagcaccuuccaccuguccauccccaacuucaaccaguacgaggccaugagcugcgacuucaacgggggcaagaucuccgugcaguacaaccucagccacaccuacgcgguggacgccgccaaccacugcgggaccaucgccaacggcguccugcagacguucaugcggauggcguggggcggguccuacaucgcccuggacagcggcaagggguccugggacugcaucaugaccagcuaccaguaccucaucauccagaacaccaccugggaggaccacugccaguucucccgccccagccccaucggcuaccuggggcugcucagccagcggacgcgcgacaucuacaucucccggcgccugcugggcaccuucaccuggacccucagcgacuccgagggcaacgagacgcccgggggcuacugccugacccgguggaugcugaucgaggccgagcucaagugcuucgggaacaccgccguggccaagugcaacgagaagcacgacgaggaguucugcgacaugcugcgccuguucgacuucugcaagcaggcgauccggcgccucaaggcccccgcccagaugagcauccagcugaucaacaaggccgugaacgcccugaucaacgaccagcucaucaugaagaaccaccuccgggacaucaugggcaucccguacugcaacuacuccaaguacugcuaccugaaccacaccgucacggggcgcaccagccugccccggugcugccugguguccaacggcagcuaccugaacgagacccacuucuccgacgacaucgagcagcaggcggacaacaugaucaccgagcuccugcagaaggaguacaucgaccgccagggcaagacgccccuggggcucguggaccuguucgucuucagcaccuccuucuaccugaucagcaucuuccugcaccucgugaagaucccgacccaccggcacaucaucggcaagcccugccccaagccccaccgccugaaccacauggggaucugcuccugcggccuguacaagcacccgggggugcccgucaaguggaagcggugaggacuagucccuguucccagagcccacuuuuuuuucuuuuuuugaaauaaaauagccugucuuucagaucucaaaggcucuuuucagagccaccaaaaaaaaaaaaaaaaaaaaaaaaaaaaaaaaaaaaaaaaaaaaaaaaaaaaaaaaaaaaaaaaagaauu

SEQ ID NO: 33305 - RNA, 1714 nt, Artificial Sequence
  mRNA product Design a-1 (hSL-A64-N5) comprising derived and/or modified sequence from LASV(LASV254-NIG-2011;Clade II)__AIT17674__GPCmut8 (opt1)
aggagagucccgcagucggcguccagcggcucugcuuguucgugugugugucguugcaggccuuauucaagcuuaccaugggccagaucaucaccuucuuccaggaggugccccacgucaucgaggaggugaugaacaucgugcugaucgcccucagccugcuggccauccucaaggggaucuacaacgucgcgaccugcggccuguucgggcugguguccuuccuccugcugugcggccgcagcugcuccacgaccuacaaggggguguacgagcuccagacccuggagcuggacaugaccaaccucaacaugugcaugccgcugagcugcaccaagaacaacucccaccacuacaucauggucggcaacgagaccggccuggagcucacccugacgaacaccagcaucaucaaccacaaguucugcaaccuguccgacgcccacaagaagaaccucuacaaccacgcccugaugagcaucaucuccaccuuccaccugagcauccccaacuucaaccaguacgaggccauguccugcgacuucaacgggggcaagaucagcgugcaguacaaccucucccacagcuacgccguggacgcggccaaccacugcgggaccaucgccaacggcguccugcagacguucaugcggauggccuggggcggguccuacaucgcgcuggacagcggcaaggggaacugggacugcaucaugaccuccuaccaguaccucaucauccagaacaccaccugggaggaccacugccaguucagccgccccucccccaucggcuaccuggggcugcucagccagcggacgcgcgacaucuacaucagccggcgccugcugggcaccuucaccuggacccucuccgacagcgagggcaacgagacgcccgggggcuacugccugacccgguggaugcugaucgaggccgagcucaagugcuucgggaacaccgccguggccaagugcaacgagaagcacgacgaggaguucugcgacaugcugcgccuguucgacuucugcaagcaggccauccggcgccucaagacccccgcgcaggccaacauccagcugaucaacaaggccgugaacgcccugaucaacgaccagcucaucaugaagaaccaccuccgggacaucaugggcauccccuacugcaacuacuccaaguacugcuaccugaaccacacggucaccgggaagaccagccugccccgcugcugccugguguccaacggcagcuaccugaacgagacccacuucuccgacgacaucgagcagcaggccgacaacaugaucacggagcuccugcagaaggaguacauggaccggcagggcaagaccccgcuggggcucguggaccuguucgucuucagcaccuccuucuaccugaucagcaucuuccugcaccucgugaagaucccgacccaccgccacgugaucggcaagcccugccccaagccccaccggcugaaccacauggggaucugcuccugcggccuguacaagcacccggggguccccgugaaguggaagcgcugaggacuagucccuguucccagagcccacuuuuuuuucuuuuuuugaaauaaaauagccugucuuucagaucucaaaggcucuuuucagagccaccaaaaaaaaaaaaaaaaaaaaaaaaaaaaaaaaaaaaaaaaaaaaaaaaaaaaaaaaaaaaaaaaagaauu

SEQ ID NO: 33306 - RNA, 1714 nt, Artificial Sequence
  mRNA product Design a-1 (hSL-A64-N5) comprising derived and/or modified sequence from LASV(Nig08-A19;Clade III)__ADU56618__GPCmut8 (opt1)
aggagagucccgcagucggcguccagcggcucugcuuguucgugugugugucguugcaggccuuauucaagcuuaccaugggccagaucgugaccuucuuccaggaggucccccacgugaucgaggaggugaugaacaucguccugaucgcccucagcauccuggccauccugaaggggcucuacaacaucgcgaccugcggccugaucgggcuggugacguuccuccugcuguccggccgcagcugcuccaugaccuacaaggggguguacgagcuccagacccuggagcugaacaugaacacccucaacaugugcaugccgcugagcugcaccaagaacaacucccaccacuacaucauggucggcaacgagaccggccuggagcucacccugacgaacaccagccugcuccaccacaaguucugcaaccuguccgacgcccacaagaagaaccuguacgaccacacccucaugagcaucaucuccaccuuccaccugagcauccccaacuucaaccaguacgaggccauguccugcgacuucaacgggggcaagaucacggugcaguacaaccugagccacuccuacgccaucgacgccgcgaaccacugcgggaccguggccaacggcguccuccagaccuucaugcggauggccuggggcgggagcuacaucgcccuggacuccggccgcgggaagugggacugcaucaugaccagcuaccaguaccugaucauccagaacacgaccugggaggaccacugccaguucucccggcccagccccaucggcuaccucgggcugcugucccagcgcacccgggacaucuacaucagccgccggcuccugggcaccuucacguggacccugagcgacuccgagggcaacgagacccccgggggcuacugccucacccgcuggaugcugaucgaggcggagcugaagugcuucgggaacacggccguggccaagugcaacgagaagcacgacgaggaguucugcgacaugcuccggcuguucgacuucugcaagcaggccauccgccggcugaaggcccccgcgcagaugagcauccagcucaucaacaaggccgugaacgcccugaucaacgaccagcugaucaugaagaaccaccuccgcgacaucaugggcauccccuacugcaacuacuccaaguacugcuaccugaaccacaccagcaccgggcggaccucccugccccgcugcugccucgucagcaacggcuccuaccugaacgagacgcacuucagcgacgacaucgagcagcaggccgacaacaugaucaccgagaugcugcagaaggaguaccucgaccggcagggcaagaccccgcuggggcugguggaccuguucguguucuccaccagcuucuaccucaucuccaucuuccugcaccuggucaagaucccgacgcaccgccacaucgugggcaagcccugccccaagccccaccggcucaaccacauggggaucugcagcugcggccuguacaagcagccgggggugcccguccgcuggaagcggugaggacuagucccuguucccagagcccacuuuuuuuucuuuuuuugaaauaaaauagccugucuuucagaucucaaaggcucuuuucagagccaccaaaaaaaaaaaaaaaaaaaaaaaaaaaaaaaaaaaaaaaaaaaaaaaaaaaaaaaaaaaaaaaaagaauu

SEQ ID NO: 33307 - RNA, 1717 nt, Artificial Sequence
  mRNA product Design a-1 (hSL-A64-N5) comprising derived and/or modified sequence from LASV(G1180-SLE-2010;Clade IV)__AIT17168__GPCmut8 (opt1)
aggagagucccgcagucggcguccagcggcucugcuuguucgugugugugucguugcaggccuuauucaagcuuaccaugggccagaucgugaccuucuuccaggaggucccccacgugaucgaggaggugaugaacaucguccugaucgcccucagcauccuggccgugcugaaggggcucuacaacuucgcgaccugcggccugguggggcugcucaccuuccugcugcucugcggccgcuccugcaccgccagccgguacaagggggucuacgagcugcagacccuggagcucaacauggagacccugaacaugugcaugccgcuguccugcaccaagaacaacagccaccacuacaucauggugggcaacgagaccggccucgagcugacccugacgaacaccuccaucaucaaccacaaguucugcaaccucagcgacgcccacaagaagaaccuguacgaccacgcccugauguccaucaucagcaccuuccaccucuccauccccaacuucaaccaguacgaggccaugagcugcgacuucaacgggggcaagaucuccgugcaguacaaccugagccacuccuacgcgggggacgccgccaaccacugcggcaccgucgccaacggggugcugcagacguucaugcgcauggcguggggcggcagcuacaucgcccucgacuccgggcacggcagcugggacugcaucaugaccuccuaccaguaccugaucauccagaacaccaccugggaggaccacugccaguucagccggcccucccccaucggguaccugggccuccugagccagcgcacgcgggacaucuacaucagccgccggcugcucggcaccuucaccuggacccuguccgacagcgaggggaaggacacgccgggcggguacugccugacccgcuggaugcucaucgaggccgagcugaagugcuucggcaacaccgccguggccaagugcaacgagaagcacgacgaggaguucugcgacaugcugcggcuguucgacuucugcaagcaggcgauccagcgccugaaggcccccgcccagauguccauccagcugaucaacaaggccgucaacgcccucaucaacgaccagcugaucaugaagaaccaccuccgggacaucauggggauccccuacugcaacuacagcaaguacugcuaccucaaccacaccacgaccggcaagaccucccugcccaagugcugccuggugagcaacggcuccuaccucaacgagacccacuucagcgacgacaucgagcagcaggcggacaacaugaucacggagaugcugcagaaggaguacauggagcgccaggggaagacgccccugggccucguggaccuguucgucuucuccaccagcuucuaccugaucuccaucuuccugcaccucgugaagaucccgacccaccggcacaucgugggcaagagcugccccaagccccaccgccugaaccacauggggaucugcuccugcgggcuguacaagcagcccggcgucccggugaaguggaagcggugaggacuagucccuguucccagagcccacuuuuuuuucuuuuuuugaaauaaaauagccugucuuucagaucucaaaggcucuuuucagagccaccaaaaaaaaaaaaaaaaaaaaaaaaaaaaaaaaaaaaaaaaaaaaaaaaaaaaaaaaaaaaaaaaagaauu

SEQ ID NO: 33308 - RNA, 1717 nt, Artificial Sequence
  mRNA product Design a-1 (hSL-A64-N5) comprising derived and/or modified sequence from LASV(G1442-SLE-2011;Clade IV)__AIT17180__GPCmut8 (opt1)
aggagagucccgcagucggcguccagcggcucugcuuguucgugugugugucguugcaggccuuauucaagcuuaccaugggccagaucgugaccuucuuccaggaggucccccacgugaucgaggaggugaugaacaucguccugaucgcccucagcauccuggccgugcugaaggggcucuacaacguggcgaccugcggccugaucgggcuggucacguuccuccugcugugcggccgcuccugcaccaccacccucuacaaggggguguacgagcugcagacgcuggagcucaacauggagacccugaacaugugcaugccgcugagcugcaccaagaacaacucccaccacuacauccgggugggcaacgagacgggccucgagcugacccugaccaacaccagcaucaucaaccacaaguucugcaaccucuccgacgcccacaagaagaaccuguacgaccacgcccugaugagcaucaucuccacguuccaccucagcauccccaacuucaaccaguacgaggccauguccugcgacuucaacgggggcaagaucagcguccaguacaaccugucccacagcuacgccggggacgcggccaaccacugcggcaccguggccaacggggugcugcagaccuucaugcgcauggccuggggcggcuccuacaucgcgcucgacagcgggcggggcaacugggacugcaucaugaccuccuaccaguaccugaucauccagaacacgaccugggacgaccacugccaguucagccgccccucccccaucggguaccugggccuccugagccagcggacccgcgacgucuacaucucccggcgccugcucggcaccuucacguggacccugagcgacagcgaggggaaggacaccccgggcggguacugccugacccgguggaugcucaucgaggccgagcugaagugcuucggcaacacggccguggccaagugcaacgagaagcacgacgaggaguucugcgacaugcugcgccucuucgacuucugcaagcaggccauccagcggcugaaggcgcccgcccagauguccauccagcugaucaacaaggccgugaacgcccucaucaacgaccagcugaucaugaagaaccaccuccgcgacaucauggggauccccuacugcaacuacagcaaguacugcuaccugaacaacaccgccaccggcaagaccucccugcccaagugcugccugaucagcaacggcuccuaccucaacgagacgcacuucagcgacgacaucgagcaggaggcggacaacaugaucaccgagaugcugcagaaggaguacauggagcggcaggggaagacgccccugggccucgucgaccuguucguguucuccaccagcuucuaccugaucuccaucuuccugcaccucgugaagaucccgacccaccgccacaucgucggcaagagcugccccaagccccaccggcugaaccacauggggaucugcuccugcgggcuguacaagcagcccggcgugccggugcgcuggaagcggugaggacuagucccuguucccagagcccacuuuuuuuucuuuuuuugaaauaaaauagccugucuuucagaucucaaaggcucuuuucagagccaccaaaaaaaaaaaaaaaaaaaaaaaaaaaaaaaaaaaaaaaaaaaaaaaaaaaaaaaaaaaaaaaaagaauu

SEQ ID NO: 33309 - RNA, 1717 nt, Artificial Sequence
  mRNA product Design a-1 (hSL-A64-N5) comprising derived and/or modified sequence from LASV(G3010-SLE-2013;Clade IV)__AIT17344__GPCmut8 (opt1)
aggagagucccgcagucggcguccagcggcucugcuuguucgugugugugucguugcaggccuuauucaagcuuaccaugggccagaucgugaccuucuuccaggaggucccccacgugaucgaggaggugaugaacaucguccugaucgcccucagcauccuggccgugcugaaggggcucuacaacuucgcgaccugcggccugguggggcuggucacguuccuccugcugugcggccgcuccugcaccaccagccucuacaaggggguguacgagcugcagacccuggagcucaacauggagacgcugaacaugugcaugccgcuguccugcaccaagaacaacagccaccacuacaucauggugggcaacgagaccggccucgagcugacgcugaccaacaccuccaucaucaaccacaaguucugcaaccucagcgacgcccacaagaagaaccuguacaaccacgcccugauguccaucaucagcaccuuccaccucuccauccccaacuucaaccaguacgaggccaugagcugcgacuucaacgggggcaagaucuccguccaguacaaccugagccacuccuacgccggggacgcggccagccacugcggcacgguggccaacggggugcugcagaccuucaugcggauggccuggggcggcuccuacaucgcgcucgacagcggguacggcaagugggacugcaucaugaccuccuaccaguaccugaucauccagaacaccacgugggaggaccacugccaguucagccgccccucccccaucggguaccugggccuccugagccagcggacccgcgacaucuacaucagccggcgccugcucggcaccuucaccuggacgcuguccgacagcgaggggaaggacaccccgggcggguacugccugacccgguggaugcucaucgaggccgagcugaagugcuucggcaacaccgccgucgccaagugcaacgagaagcacgacgaggaguucugcgacaugcugcgccucuucgacuucugcaagcaggccauccagcggcugaagacgcccgcgcagauguccauccagcugaucaacaaggccgugaacgcccucaucaacgaccagcugaucaugaagaaccaccuccgcgacaucauggggauccccuacugcaacuacagcaaguacugcuaccugaaccacaccaccaccggcaagacgucccugcccaagugcugccuggugagcaacggcuccuaccucaacgagacccacuucagcgacgacaucgagcagcaggccgacaacaugaucaccgagaugcugcagaaggaguacauggagcggcaggggaagacgccccugggccucgucgaccuguucguguucuccaccagcuucuaccugaucuccaucuuccugcaccucgugaagaucccgacccaccgccacaucgucggcaagagcugccccaagccccaccggcugaaccacauggggaucugcuccugcgggcuguacaagcagcccggcgugccggugcgcuggaagcggugaggacuagucccuguucccagagcccacuuuuuuuucuuuuuuugaaauaaaauagccugucuuucagaucucaaaggcucuuuucagagccaccaaaaaaaaaaaaaaaaaaaaaaaaaaaaaaaaaaaaaaaaaaaaaaaaaaaaaaaaaaaaaaaaagaauu

SEQ ID NO: 33310 - RNA, 1717 nt, Artificial Sequence
  mRNA product Design a-1 (hSL-A64-N5) comprising derived and/or modified sequence from LASV(G502-SLE-2009;Clade IV)__AIT17126__GPCmut8 (opt1)
aggagagucccgcagucggcguccagcggcucugcuuguucgugugugugucguugcaggccuuauucaagcuuaccaugggccagaucgugaccuucuuccaggaggucccccacgugaucgaggaggugaugaacaucguccugaucgcccucagcauccuggccgugcugaaggggcucuacaacuucgcgaccugcggccugguggggcugcucacguuccugcugcucugcggccgcuccugcaccaccgggcuguacaagggcgucuacgagcugcagacccucgagcugaacauggagacgcugaacaugugcaugccgcucagcugcaccaagaacaacucccaccacuacaucauggugggcaacgagaccgggcuggagcugacgcucaccaacaccagcaucaucaaccacaaguucugcaaccuguccgacgcccacaagaagaaccuguacgaccacgcccucaugagcaucaucuccaccuuccaccugagcauccccaacuucaaccaguacgaggccauguccugcgacuucaacggcgggaagaucagcgugcaguacaaccugucccacagcuacgccggcgacgcggccgaccacugcgggacggucgccaacggcgugcuccagaccuucaugcggauggccuggggcggguccuacaucgcgcuggacagcggccgcgggcggugggacugcaucaugaccuccuaccaguaccugaucauccagaacaccacgugggaggaccacugccaguucagccgccccucccccaucggcuaccucggccugcugagccagcggacccgcgacaucuacaucucccggcgccuccuggggaccuucaccuggacgcugagcgacagcgagggcaaggacacccccgggggcuacugccucacccgguggaugcugaucgaggccgagcugaagugcuucgggaacaccgccguggccaagugcaacgagaagcacgacgaggaguucugcgacaugcuccgccuguucgacuucugcaagcaggccauccagcggcugaaggcgcccgcccagauguccauccagcucaucaacaaggccgucaacgcccugaucaacgaccagcuggugaugaagaaccaccuccgcgacaucaugggcauccccuacugcaacuacagccgguacugcuaccugaaccacacgaccaccggccgcaccucccugcccaagugcugccucgugagcaacggguccuaccugaacgagacgcacuucagcgacgacaucgagcagcaggccgacaacaugaucaccgagaugcugcagaaggaguacauggagcggcagggcaagaccccgcucgggcuggucgaccuguucguguucuccaccagcuucuaccugaucuccaucuuccuccaccuggugaagaucccgacgcaccgccacaucgucggcaagagcugccccaagccccaccggcugaaccacauggggaucugcuccugcggccucuacaagcagcccggcgugccggugaaguggaagcgcugaggacuagucccuguucccagagcccacuuuuuuuucuuuuuuugaaauaaaauagccugucuuucagaucucaaaggcucuuuucagagccaccaaaaaaaaaaaaaaaaaaaaaaaaaaaaaaaaaaaaaaaaaaaaaaaaaaaaaaaaaaaaaaaaagaauu

SEQ ID NO: 33311 - RNA, 1717 nt, Artificial Sequence
  mRNA product Design a-1 (hSL-A64-N5) comprising derived and/or modified sequence from LASV(G733-SLE-2010;Clade IV)__AIT17154__GPCmut8 (opt1)
aggagagucccgcagucggcguccagcggcucugcuuguucgugugugugucguugcaggccuuauucaagcuuaccaugggccagaucgugaccuucuuccaggaggucccccacgugaucgaggaggugaugaacaucguccugaucgcccucagcauccuggccgugcugaaggggcucuacaacuucgcgaccugcggcaucguggggcuggucuccuuccugcuccugugcggccgcagcugcacgaccucccuguacaaggggguguacgagcuccagacccuggagcugaacauggagacccucaacaugugcaugccgcugagcugcaccaagaacaacucccaccacuacaucauggugggcaacgagaccggccuggagcucacccugacgaacaccagcaucaucaaccacaaguucugcaaccuguccgacgcccacaagaagaaccucuacgaccacgcccugaugagcaucaucuccaccuuccaccugagcauccccaacuucaaccaguacgaggccauguccugcgacuucaacgggggcaagaucagcguccaguacaaccucucccacagcuacgccggggacgcggccaaccacugcggcaccaucgccaacggggugcugcagacguucaugcggauggccuggggcggcuccuacaucgcgcuggacagcgggcgcgaccggugggacugcaucaugaccuccuaccaguaccucaucauccagaacaccaccugggaggaccacugccaguucagccgccccucccccaucggcuaccuggggcugcucagccagcggacgcgcgacaucuacaucagccggcgccugcugggcaccuucaccuggacccucuccgacagcgagggcaaggacacgcccgggggcuacugccugacccgguggaugcugaucgaggccgagcucaagugcuucgggaacaccgccguggccaagugcaacgagaagcacgacgaggaguucugcgacaugcugcgccuguucgacuucugcaagcaggccauccagcggcucaaggcgcccgcccagauguccauccagcugaucaacaaggccgucaacgcccugaucaacgaccagcucaucaugaagaaccaccuccgcgacaucaugggcauccccuacugcaacuacagcaaguacugcuaccugaaccacaccacgaccgggaagaccucccugcccaagugcugccuggugagcaacggcuccuaccugaacgagacccacuucagcgacgacaucgagcagcaggccgacaacaugaucacggagaugcuccagaaggaguacauggagcggcagggcaagaccccgcuggggcugguggaccucuucgucuucuccaccagcuucuaccugaucuccaucuuccugcaccuggugaagaucccgacccaccgccacguggucggcaagagcugccccaagccccaccggcucaaccacauggggaucugcuccugcggccuguacgggcagcccggcgugccggugaaguggaagcgcugaggacuagucccuguucccagagcccacuuuuuuuucuuuuuuugaaauaaaauagccugucuuucagaucucaaaggcucuuuucagagccaccaaaaaaaaaaaaaaaaaaaaaaaaaaaaaaaaaaaaaaaaaaaaaaaaaaaaaaaaaaaaaaaaagaauu

SEQ ID NO: 33312 - RNA, 1717 nt, Artificial Sequence
  mRNA product Design a-1 (hSL-A64-N5) comprising derived and/or modified sequence from MOPV/LASV reassortant(IGS-1;Clade IV)__AFY05576__GPCmut8 (opt1)
aggagagucccgcagucggcguccagcggcucugcuuguucgugugugugucguugcaggccuuauucaagcuuaccaugggccagaucgugaccuucuuccaggaggucccccacgugaucgaggaggugaugaacaucguccugaucgcccucagcgugcuggccgugcugaaggggcucuacaacuucgcgaccugcggccuggucgggcuggugacguuccuccugcugugcggccgcuccugcaccaccagccucuacaaggggguguacgagcugcagacccuggagcucaacauggagacgcugaacaugugcaugccgcuguccugcaccaagaacaacagccaccacuacaucauggucggcaacgagaccggccucgagcugacgcugaccaacaccuccaucaucaaccacaaguucugcaaccucagcgacgcccacaagaagaaccuguacgaccacgcccugauguccaucaucagcaccuuccaccucuccauccccaacuucaaccaguacgaggccaugagcugcgacuucaacgggggcaagaucuccgugcaguacaaccugagccacuccuacgccggggacgcggccaaccacugcggcacgguggccaacgggguccugcagaccuucaugcggauggccuggggcggcagcuacaucgcgcucgacuccgggcgcggcaacugggacugcaucaugaccagcuaccaguaccugaucauccagaacaccacgugggaggaccacugccaguucucccggcccagccccaucggguaccugggccuccugucccagcgcacccgggacaucuacaucagccgccggcugcucggcaccuucaccuggacgcugagcgacuccgagggggaggacaccccgggcggguacugccugacccgcuggaugcucaucgaggccgagcugaagugcuucggcaacaccgccguggccaagugcaacgagaagcacgacgaggaguucugcgacaugcugcggcuguucgacuucugcaagcaggccauccagcgccugaaggcgcccgcccagaugagcauccagcugaucaacaaggccgugaacgcccucaucaacgaccagcugaucaugaagaaccaccuccgggacaucauggggauccccuacugcaacuacuccaaguacugcuaccucaaccacacgaccaccggccgcaccagccugcccaagugcugccuggucuccaacggcagcuaccucaacgagacgcacuucuccgacgacaucgagcagcaggccgacaacaugaucaccgagaugcugcagaaggaguacauggagcggcaggggaagacgccccugggccucguggaccuguucguguucagcaccuccuucuaccugaucagcaucuuccugcaccucgucaagaucccgacccaccgccacaucguggggaaguccugccccaagccccaccggcugaaccacaugggcaucugcagcugcgggcuguacaagcagcccggcgugccggucaaguggaagcgcugaggacuagucccuguucccagagcccacuuuuuuuucuuuuuuugaaauaaaauagccugucuuucagaucucaaaggcucuuuucagagccaccaaaaaaaaaaaaaaaaaaaaaaaaaaaaaaaaaaaaaaaaaaaaaaaaaaaaaaaaaaaaaaaaagaauu

SEQ ID NO: 33313 - RNA, 1717 nt, Artificial Sequence
  mRNA product Design a-1 (hSL-A64-N5) comprising derived and/or modified sequence from LASV(LM765-SLE-2012;Clade IV)__AIT17814__GPCmut8 (opt1)
aggagagucccgcagucggcguccagcggcucugcuuguucgugugugugucguugcaggccuuauucaagcuuaccaugggccagaucgugaccuucuuccaggaggucccccacgugaucgaggaggugaugaacaucguccugaucgcccucagcauccuggccgugcugaaggggcucuacaacuucgcgaccugcggccugguggggcuggucacguuccuccugcugugcggccgcuccugcaccaccagccucuacaaggggguguacgagcugcagacccuggagcucaacauggagacgcugaacaugugcaugccgcuguccugcaccaagaacaacagccaccacuacaucauggugggcaacgagaccggccucgagcugacgcugaccaacaccuccaucaucgaccacaaguucugcaaccucagcgacgcccaccggaagaaccuguacgaccacgcccugauguccaucaucagcaccuuccaccucuccauccccaacuucaaccaguacgaggccaugagcugcgacuucaacgggggcaagaucuccguccaguacaaccugagccacuccuacgccaaggacgcggccgaccacugcgggacgguggccaacggcgugcugcagaccuucaugcgcauggccuggggcgggagcuacaucgcgcucgacuccggccgggggcgcugggacugcaucaugaccagcuaccaguaccugaucauccagaacaccacgugggaggaccacugccaguucucccggcccagccccaucggcuaccuggggcuccugucccagcgcacccgggacaucuacaucagccgccggcugcucggcaccuucaccuggacgcugagcgacuccgagggcaaggacacccccgggggcuacugccugacccgcuggaugcucaucgaggccgagcugaagugcuucgggaacaccgccgucgccaagugcaacgagaagcacgacgaggaguucugcgacaugcugcggcuguucgacuucugcaagcaggccauccagcgccugaaggcgcccgcccagaugagcauccagcugaucaacaaggccgugaacgcccucaucaacgaccagcugaucaugaagaaccaccuccgggacaucaugggcauccccuacugcaacuacuccaaguacugcuaccucaaccacacgaccaccgggaagaccagccugcccaagugcugccugguguccaacggcagcuaccucaacgagacgcacuucuccgacgacaucgagcagcaggccgacaacaugaucaccgagaugcugcagaaggaguacauggagcgccagggcaagaccccgcuggggcucgucgaccuguucguguucagcaccuccuucuaccugaucagcaucuuccugcaccucgugaagaucccgacgcaccggcacaucgucggcaagcccugccccaagccccaccgccugaaccacauggggaucugcuccugcggccuguacaagcagccgggggugcccgugaaguggaagcggugaggacuagucccuguucccagagcccacuuuuuuuucuuuuuuugaaauaaaauagccugucuuucagaucucaaaggcucuuuucagagccaccaaaaaaaaaaaaaaaaaaaaaaaaaaaaaaaaaaaaaaaaaaaaaaaaaaaaaaaaaaaaaaaaagaauu

SEQ ID NO: 33314 - RNA, 1717 nt, Artificial Sequence
  mRNA product Design a-1 (hSL-A64-N5) comprising derived and/or modified sequence from LASV(LM776-SLE-2012;Clade IV)__AIT17824__GPCmut8 (opt1)
aggagagucccgcagucggcguccagcggcucugcuuguucgugugugugucguugcaggccuuauucaagcuuaccaugggccagaucgugaccuucuuccaggaggucccccacgugaucgaggaggugaugaacaucguccugaucgcccucagcauccuggccgugcugaaggggcucuacaacuucgcgaccugcggccugguggggcuggucacguuccuccugcugugcggccgcuccugcaccaccagcguguacaaggggguguacgagcuccagacccuggagcugaacauggagacgcucaacaugugcaugccgcuguccugcaccaagaacaacagccaccacuacaucauggucggcaacgagaccggccuggagcucacgcugaccaacaccuccaucaucaaccacaaguucugcaaccugagcgacgcccacaagaagaaccucuacgaccacgcccugauguccaucaucagcaccuuccaccuguccauccccaacuucaaccaguacgaggccaugagcugcgacuucaacgggggcaagaucuccgugcaguacaaccucagccacuccuacgccggggacgcggccaaccacugcggcacgguggccaacgggguccugcagaccuucaugcggauggccuggggcggcagcuacaucgcgcuggacuccgggcacggcaagugggacugcaucaugaccagcuaccaguaccucaucauccagaacaccacgugggaggaccacugccaguucucccgccccagccccaucggguaccugggccugcucucccagcggacccgcgacaucuacaucagccggcgccugcugggcaccuucaccuggacgcucagcgacuccgaggggaaggacaccccgggcggguacugccugacccgguggaugcugaucgaggccgagcucaagugcuucggcaacaccgccguggccaagugcaacgagaagcacgacgaggaguucugcgacaugcugcgccuguucgacuucugcaagcaggccauccagcggcucaaggcgcccgcccagaugagcauccagcugaucaacaaggccgugaacgcccugaucaacgaccagcucaucaugaagaaccaccuccgcgacaucauggggauccccuacugcaacuacuccaaguacugcuaccugaaccacacgaccaccggcaagaccagccugcccaagugcugccuggucuccaacggcagcuaccugaacgagacgcacuucuccgacgacaucgagcagcaggccgacaacaugaucaccgagaugcuccagaaggaguacauggagcggcaggggaagacgccccugggccugguggaccucuucguguucagcaccuccuucuaccugaucagcaucuuccugcaccuggucaagaucccgacccaccgccacaucguggggaaguccugccccaagccccaccggcucaaccacaugggcaucugcagcugcgggcuguacaagcagcccggcgugccgguccgcuggaagcggugaggacuagucccuguucccagagcccacuuuuuuuucuuuuuuugaaauaaaauagccugucuuucagaucucaaaggcucuuuucagagccaccaaaaaaaaaaaaaaaaaaaaaaaaaaaaaaaaaaaaaaaaaaaaaaaaaaaaaaaaaaaaaaaaagaauu

SEQ ID NO: 33315 - RNA, 1717 nt, Artificial Sequence
  mRNA product Design a-1 (hSL-A64-N5) comprising derived and/or modified sequence from LASV(Mad39;Clade IV)__ANH09722__GPCmut8 (opt1)
aggagagucccgcagucggcguccagcggcucugcuuguucgugugugugucguugcaggccuuauucaagcuuaccaugggccagaucgugaccuucuuccaggaggucccccacgugaucgaggaggugaugaacaucguccugaucgcccucagcauccuggccgugcugaaggggcucuacaacguggcgaccugcggccugaucgggcuggucacguuccuccugcugugcggccgcuccugcaccaccacccucuacaaggggguguacgagcugcaggcccuggagcucaacauggagacgcugaacaugugcaugccgcugagcugcaccaagaacaacucccaccacuacauccgggugggcaacgagaccggccucgagcugacgcugaccaacaccagccucaucaaccacaaguucugcaaccuguccgacgcccacaagaagaaccuguacgaccacgcccucaugagcaucaucuccaccuuccaccugagcauccccaacuucaaccaguacgaggccauguccugcgacuucaacgacgggaagaucagcguccaguacaaccugucccacacguacgcgggcgacaccgccaaccacugcgggaccguggccaacggcgugcuccagaccuucaugcgcauggccuggggcgggagcuacaucgcgcuggacuccggccgcgggggcugggacugcaucaugacgagcuaccaguaccugaucauccagaacaccaccugggaggaccacugccaguucucccggcccagccccaucggguaccucggccugcugucccagcggacccgcgacaucuacaucagccggcgccuccugggcacguucaccuggacccuguccgacagcgaggggaaggacaccccgggcggguacugccucacgcgguggaugcugaucgaggccgagcugaagugcuucggcaacaccgccgucgccaagugcaacgagaagcacgacgaggaguucugcgacaugcuccgccuguucgacuucugcaagcaggccauccagcggcugaaggcgcccgcccagaugagcauccagcucaucaacaaggccgugaacgcccugaucaacgaccagcugaucaugaagaaccaccuccgcgacaucauggggauccccuacugcaacuacuccaaguacugcuaccugaaccacaccgugaccggcaagacgagccugcccaagugcugccucgucuccaacggcagcuaccugaacgagacccacuucuccgacgacaucgagcagcaggccgacaacaugaucaccgagaugcugcagaaggaguacauggagcggcaggggaagacgccccucggccugguggaccuguucguguucagcaccuccuucuaccugaucagcaucuuccuccaccuggucaagaucccgacccaccgccacgugguggggaagcccugccccaagccccaccggcugaaccacaugggcaucugcuccugcggguucuacaagcagccgggcguccccgugcgcuggaagcggugaggacuagucccuguucccagagcccacuuuuuuuucuuuuuuugaaauaaaauagccugucuuucagaucucaaaggcucuuuucagagccaccaaaaaaaaaaaaaaaaaaaaaaaaaaaaaaaaaaaaaaaaaaaaaaaaaaaaaaaaaaaaaaaaagaauu

SEQ ID NO: 33316 - RNA, 1717 nt, Artificial Sequence
  mRNA product Design a-1 (hSL-A64-N5) comprising derived and/or modified sequence from LASV(Z0947-SLE-2011;Clade IV)__AIT17840__GPCmut8 (opt1)
aggagagucccgcagucggcguccagcggcucugcuuguucgugugugugucguugcaggccuuauucaagcuuaccaugggccagaucgugaccuucuuccaggaggucccccacgugaucgaggaggugaugaacaucguccugaucgcccucagcauccuggccgugcugaaggggcucuacaacuucgcgaccugcggccugguggggcuggucacguuccuccugcugugcggccgcuccugcaccaucagccucuacaaggggguguacgagcugcagacccuggagcucaacauggagacccugaacaugugcaugccgcuguccugcaccaagaacaacagccaccacuacaucauggugggcaacgagaccggccucgagcugacccugacgaacaccuccaucaucaaccacaaguucugcaaccucagcgacgcccacaagaagaaccuguacgaccacgcccugauguccaucaucagcaccuuccaccucuccauccccaacuucaaccaguacgaggccaugagcugcgacuucaacgggggcaagaucuccguccaguacaaccugagccacuccuacgccggggacgcggccaaccacugcggcaccguggccaacggggugcugcagacguucaugcggauggccuggggcggcagcuacaucgcgcucgacuccgggcgcgaccggugggacugcaucaugaccagcuaccaguaccugaucauccagaacaccaccugggaggaccacugccaguucucccgccccagccccaucggcuaccuggggcuccugucccagcggacgcgcgacaucuacaucagccggcgccugcucggcaccuucaccuggacccugagcgacuccgagggcaaggacacgcccgggggcuacugccugacccgguggaugcucaucgaggccgagcugaagugcuucgggaacaccgccgucgccaagugcaacgagaagcacgacgaggaguucugcgacaugcugcgccucuucgacuucugcaagcaggccauccagcggcugaaggcgcccgcccagaugagcauccagcugaucaacaaggccgugaacgcccucaucaacgaccagcugaucaugaagaaccaccuccgcgacaucaugggcauccccuacugcaacuacuccaaguacugcuaccugaaccacaccacgaccgggaagaccagccugcccaagugcugccugguguccaacggcagcuaccucaacgagacccacuucuccgacgacaucgagcagcaggccgacaacaugaucacggagaugcugcagaaggaguacauggagcggcagggcaagaccccgcuggggcucgucgaccuguucguguucagcaccuccuucuaccugaucagcaucuuccugcaccucgugaagaucccgacccaccgccacaucgucggcaagcccugccccaagccccaccggcugaaccacauggggaucugcuccugcggccuguacaagcagccgggggugcccgugaaguggaagcgcugaggacuagucccuguucccagagcccacuuuuuuuucuuuuuuugaaauaaaauagccugucuuucagaucucaaaggcucuuuucagagccaccaaaaaaaaaaaaaaaaaaaaaaaaaaaaaaaaaaaaaaaaaaaaaaaaaaaaaaaaaaaaaaaaagaauu

SEQ ID NO: 33317 - RNA, 1717 nt, Artificial Sequence
  mRNA product Design a-1 (hSL-A64-N5) comprising derived and/or modified sequence from LASV(Josiah;Clade IV)__NP_694870__GPCmut8 (opt1)
aggagagucccgcagucggcguccagcggcucugcuuguucgugugugugucguugcaggccuuauucaagcuuaccaugggccagaucgugaccuucuuccaggaggucccccacgugaucgaggaggugaugaacaucguccugaucgcccucagcgugcuggccgugcugaaggggcucuacaacuucgcgaccugcggccuggucgggcuggugacguuccuccugcugugcggccgcuccugcaccaccagccucuacaaggggguguacgagcugcagacccuggagcucaacauggagacgcugaacaugugcaugccgcuguccugcaccaagaacaacagccaccacuacaucauggucggcaacgagaccggccucgagcugacccugacgaacaccuccaucaucaaccacaaguucugcaaccucagcgacgcccacaagaagaaccuguacgaccacgcccugauguccaucaucagcaccuuccaccucuccauccccaacuucaaccaguacgaggccaugagcugcgacuucaacgggggcaagaucuccgugcaguacaaccugagccacuccuacgccggggacgcggccaaccacugcggcaccguggccaacgggguccugcagacguucaugcggauggccuggggcggcagcuacaucgcgcucgacuccgggcgcggcaacugggacugcaucaugaccagcuaccaguaccugaucauccagaacaccaccugggaggaccacugccaguucucccggcccagccccaucggguaccugggccuccugucccagcgcacgcgggacaucuacaucagccgccggcugcucggcaccuucaccuggacccugagcgacuccgaggggaaggacacgccgggcggguacugccugacccgcuggaugcucaucgaggccgagcugaagugcuucggcaacaccgccguggccaagugcaacgagaagcacgacgaggaguucugcgacaugcugcggcuguucgacuucugcaagcaggccauccagcgccugaaggcgcccgcccagaugagcauccagcugaucaacaaggccgugaacgcccucaucaacgaccagcugaucaugaagaaccaccuccgggacaucauggggauccccuacugcaacuacuccaaguacugcuaccucaaccacaccacgaccggccgcaccagccugcccaagugcugccuggucuccaacggcagcuaccucaacgagacccacuucuccgacgacaucgagcagcaggccgacaacaugaucacggagaugcugcagaaggaguacauggagcggcaggggaagaccccgcugggccugguggaccucuucguguucagcaccuccuucuaccugaucagcaucuuccugcaccucgucaagauccccacccaccgccacaucguggggaaguccugccccaagccccaccggcugaaccacaugggcaucugcagcugcgggcuguacaagcagccgggcgugcccgucaaguggaagcgcugaggacuagucccuguucccagagcccacuuuuuuuucuuuuuuugaaauaaaauagccugucuuucagaucucaaaggcucuuuucagagccaccaaaaaaaaaaaaaaaaaaaaaaaaaaaaaaaaaaaaaaaaaaaaaaaaaaaaaaaaaaaaaaaaagaauu

SEQ ID NO: 33318 - RNA, 1714 nt, Artificial Sequence
  mRNA product Design a-1 (hSL-A64-N5) comprising derived and/or modified sequence from LASV(LP;Clade I)__AAF86701__GPCmut8 (opt1)
aggagagucccgcagucggcguccagcggcucugcuuguucgugugugugucguugcaggccuuauucaagcuuaccaugggccagaucaucaccuucuuccaggaggugccccacgucaucgaggaggugaugaacaucgugcugaucgcccucagccugcuggccauccucaaggggcuguacaacaucgcgaccugcggcaucaucgggcuggucgccuuccucuuccugugcggcaaguccugcagccugacgcucaagggcggguacgagcugcagacccuggagcucaacauggagacccugaacaugugcaugccgcuguccugcaccaagaacagcucccaccacuacauccgcgugggcaacgagacggggcucgagcugacccugaccaacaccagcaucaucaaccacaaguucugcaaccucuccgacgcccacaagaagaaccuguacgaccacgcccugaugagcaucaucuccacguuccaccucagcauccccaacuucaaccaguacgaggccauguccugcgacuucaacggcgggaagaucagcgugcaguacaaccugucccacagcuacgcgggcgacgccgccgagcacugcgggaccgucgccaacggcgugcugcagaccuucaugcggauggcguggggcgggcgcuacaucgcccucgacuccggcaaggggaacugggacugcaucaugaccagcuaccaguaccugaucauccagaacacgaccugggaggaccacugccaguucucccggcccagccccaucggcuaccugggccuccugucccagcgcacccgggacaucuacaucagccgccggcugcucgggaccuucacguggacccugagcgacuccgagggcaacgagacccccgggggcuacugccugacccgcuggaugcucaucgaggccgagcugaagugcuucgggaacacggccguggccaagugcaacgagaagcacgacgaggaguucugcgacaugcugcggcuguucgacuucugcaagcaggcgauccgccggcugaaggccccggcccagaugagcauccagcugaucaacaaggccgucaacgcccucaucaacgaccagcugaucaugaagaaccaccuccgcgacaucaugggcauccccuacugcaacuacuccaaguacugcuaccucaaccacaccagcuccggccggaccagccugcccaagugcugccugaucuccaacgggagcuaccucaacgagacccaguucuccgacgacaucgagcagcaggcggacaacaugaucacggagaugcugcagaaggaguacaucgagcgccagggcaagaccccgcuggggcugguggacaucuucaucuucagcaccuccuucuaccucaucagcaucuuccugcaccugaucaagauccccacccaccggcacaucgugggcaagcccugccccaagccgcaccgccucaaccacaugggggucugcuccugcggccuguacaagcaccccggcgugcccacgaaguggaagcggugaggacuagucccuguucccagagcccacuuuuuuuucuuuuuuugaaauaaaauagccugucuuucagaucucaaaggcucuuuucagagccaccaaaaaaaaaaaaaaaaaaaaaaaaaaaaaaaaaaaaaaaaaaaaaaaaaaaaaaaaaaaaaaaaagaauu

SEQ ID NO: 33319 - RNA, 1714 nt, Artificial Sequence
  mRNA product Design a-1 (hSL-A64-N5) comprising derived and/or modified sequence from LASV(803213;Clade II)__AAF86703__GPCmut8 (opt1)
aggagagucccgcagucggcguccagcggcucugcuuguucgugugugugucguugcaggccuuauucaagcuuaccaugggccagaucaucaccuucuuccaggaggugccccacgucaucgaggaggugaugaacaucgugcugaucgcccucagccugcuggccauccucaaggggaucuacaacgucgcgaccugcggccuguucgggcugaucuccuuccuccugcugugcggccgcagcugcuccgugacguacaaggggguguacgagcuccagacccuggagcugaacauggccaaccucaacaugugcaugccgcugagcugcaccaagaacaacucccaccacuacaucauggucggcaacgagaccggccuggagcucacgcugaccaacaccagcaucaucaaccacaaguucugcaaccuguccgacgcccacaagaagaaccucuacgaccacgcccugaugagcaucaucuccaccuuccaccugagcauccccaacuucaaccaguacgaggccauguccugcgacuucaacgggggcaagaucagcgugcaguacaaccucucccacagcuucgcgguggacgccgccaaccacugcgggacgaucgccaacggcguccugcagaccuucaugcggauggcguggggcggguccuacaucgcccuggacagcggcaaggggaacugggacugcaucaugaccuccuaccaguaccucaucauccagaacaccacgugggaggaccacugccaguucagccgccccucccccaucggcuaccuggggcugcucagccagcggacccgcgacaucuacaucagccggcgccugcugggcaccuucaccuggacgcucuccgacagcgagggcaacgaggcccccgggggcuacugccugacccgguggaugcugaucgaggccgagcucaagugcuucgggaacaccgccguggcgaagugcaacgagaagcacgacgaggaguucugcgacaugcugcgccuguucgacuucugcaagcaggccaucaagcggcucaagaccccggcccagauguccauccagcugaucaacaaggccgugaacgcccugaucaacgaccagcucaucaugaagaaccaccuccgcgacaucaugggcauccccuacugcaacuacagccgguacugcuaccugaaccacacggucaccgggaagaccucccugccccgcugcugccuggugagcaacggcuccuaccugaacgagacccacuucagcgacgacaucgagcagcaggcggacaacaugaucacggagaugcuccagaaggaguacauggaccggcagggcaagaccccgcuggggcugguggaccuguucgucuucuccaccagcuucuaccucaucuccaucuuccugcaccuggugaagauccccacccaccgccacaucgugggcaagcccugccccaagccgcaccggcucaaccacauggggaucugcagcugcggccuguacaagcaccccgggguccccgugaaguggaagcgcugaggacuagucccuguucccagagcccacuuuuuuuucuuuuuuugaaauaaaauagccugucuuucagaucucaaaggcucuuuucagagccaccaaaaaaaaaaaaaaaaaaaaaaaaaaaaaaaaaaaaaaaaaaaaaaaaaaaaaaaaaaaaaaaaagaauu

SEQ ID NO: 33320 - RNA, 1714 nt, Artificial Sequence
  mRNA product Design a-1 (hSL-A64-N5) comprising derived and/or modified sequence from LASV(GA391;Clade III)__CAA36645__GPCmut8 (opt1)
aggagagucccgcagucggcguccagcggcucugcuuguucgugugugugucguugcaggccuuauucaagcuuaccaugggccagaucgugaccuucuuccaggaggucccccacgugaucgaggaggugaugaacaucguccugaucgcccucagcauccuggccauccugaaggggcucuacaacguggcgaccugcggccugaucgggcuggugacguuccuccugcuguccggccgcagcugcucccucaucuacaaggggaccuacgagcugcagacccuggagcucaacauggagacccugaacaugugcaugccgcugagcugcacgaagaacaacucccaccacuacauccgggucggcaacgagaccggccucgagcugacccugaccaacacgagcauccucaaccacaaguucugcaaccuguccgacgcccacaagcgcaaccuguacgaccacagccucauguccaucaucagcaccuuccaccuguccauccccaacuucaaccaguacgaggccaugagcugcgacuucaacgggggcaagaucaccgugcaguacaaccugucccacagcuucgccguggacgccgcggggcacugcggcacccucgccaacgggguccugcagacguucaugcggauggccuggggcggcuccuacaucgcccuggacagcgggcgcggcaacugggacugcaucaugaccuccuaccaguaccucaucauccagaacaccaccugggacgaccacugccaguucagccggcccucccccaucggguaccugggccugcucagccagcgcacgcgggacaucuacaucagccgccggcugcugggcaccuucaccuggacccucuccgacagcgaggggaacgagacgccgggcggguacugccugacccgcuggaugcugaucgaggcggagcucaagugcuucggcaacaccgccguggccaagugcaacgagaagcacgacgaggaguucugcgacaugcugcggcuguucgacuucugcaagcaggccauccgccggcucaagacccccgcccagauguccauccagcugaucaacaaggcggugaacgcccugaucaacgaccagcucaucaugaagaaccaccuccgcgacaucauggggauccccuacugcaacuacagccgguacugcuaccugaaccacacguccaccggcaagaccagccugccccgcugcugccugaucuccaacggcagcuaccugaacgagaccaaguucuccgacgacaucgagcagcaggccgacaacaugaucacggagaugcugcagaaggaguacaucgaccggcaggggaagaccccgcucggccuggucgaccuguucguguucagcaccuccuucuaccucaucagcaucuuccugcaccuggugaagauccccacccaccgccacaucgucgggaagcccugccccaagccgcaccggcucaaccacaugggcaucugcuccugcgggcuguacaagcagcccggcgugcccgugcgcuggaagcggugaggacuagucccuguucccagagcccacuuuuuuuucuuuuuuugaaauaaaauagccugucuuucagaucucaaaggcucuuuucagagccaccaaaaaaaaaaaaaaaaaaaaaaaaaaaaaaaaaaaaaaaaaaaaaaaaaaaaaaaaaaaaaaaaagaauu

SEQ ID NO: 33321 - RNA, 1717 nt, Artificial Sequence
  mRNA product Design a-1 (hSL-A64-N5) comprising derived and/or modified sequence from LASV(AV;Clade V)__CCA30314__GPCmut8 (opt1)
aggagagucccgcagucggcguccagcggcucugcuuguucgugugugugucguugcaggccuuauucaagcuuaccaugggccagaucgugaccuucuuccaggaggucccccacgugaucgaggaggugaugaacaucguccugaucgcccucagcauccuggccgugcugaaggggcucuacaacaucgcgaccugcggccugaucgggcugaucacguuccuccugcugugcggccgcuccugcagcuccaaccucuacaaggggguguacgagcugcagagccuggaccucaacauggagacccugaacaugugcaugccgcuguccugcaccaagaacaacagccaccacuacauccgggucggcaacgacaccggccucgagcugacgcugaccaacaccuccauccucaaccacaaguucugcaaccugagcgacgcccacaagaaggaccuguacgaccacgcccucauguccaucaucagcaccuuccaccuguccauccccaacuucaaccaguacgaggccaugagcugcgacuucaacgggggcaagaucuccgugcaguacaaccugagccacuccuacgccaucgacgcggccaaccacugcgggacgguggccaacggcauccuccagaccuucaugcgcauggccuggggcgggagcuacaucgcgcuggacuccggccgggggaacugggacugcaucaugaccagcuaccaguaccugaucauccagaacaccacgugggagaaccacugccaguucucccgccccagccccaucggcuaccucgggcugcugagccagcggacccgcgacaucuacaucucccggcgccuccugggcaccuucaccuggacgcugagcgacuccgagggcaacgccacccccgggggcuacugccucacccgguggaugcugaucgaggccgagcugaagugcuucgggaacaccgccgucgccaagugcaacgagaagcacgacgaggaguucugcgacaugcuccgccuguucgacuucugcaagcaggcgaucagccggcugaaguccccggcccagaugagcauccagcucaucaacaaggccgugaacgcccugaucaacgaccagcugaucaugaagaaccaccuccgcgacaucaugggcauccccuacugcaacuacuccaaguacugcuaccugaaccacacgaucaccgggaagaccagccugcccaagugcugccucguguccaacggcagcuaccugaacgagacccacuucuccgacgacaucgagcagcaggccgacaacaugaucacggagaugcugcagaaggaguacauggagcggcagggcaagaccccgcuggggcucgucgaccuguucguguucagcaccuccuucuaccugaucagcaucuuccuccgccuggugaagauccccacccaccggcacaucgucggcaagcccugccccaagccgcaccgccugaaccacauggggaucugcuccugcggccucuacaagcagcccggggugcccgugcgguggaagcgcugaggacuagucccuguucccagagcccacuuuuuuuucuuuuuuugaaauaaaauagccugucuuucagaucucaaaggcucuuuucagagccaccaaaaaaaaaaaaaaaaaaaaaaaaaaaaaaaaaaaaaaaaaaaaaaaaaaaaaaaaaaaaaaaaagaauu

SEQ ID NO: 33322 - RNA, 1714 nt, Artificial Sequence
  mRNA product Design a-1 (hSL-A64-N5) comprising derived and/or modified sequence from LASV(Togo/2016/7082;Clade VI)__AMR44577__GPCmut8 (opt1)
aggagagucccgcagucggcguccagcggcucugcuuguucgugugugugucguugcaggccuuauucaagcuuaccaugggccagaucaucaccuucuuccaggaggugccccacgucaucgaggaggugaugaacaucgugcugaucgcccucagccugcuggccauccucaagggggucuacaacguggcgaccugcggcaucaucgggcuggugacguuccuguuccucugcggccgcuccugcagccugaucuacaagggguccuacgagcugcagacccucgagcugaacauggagacccugaacaugugcaugccgcucagcugcaccaagaacuccagccaccacuacauccgggucggcaacgagacgggccuggagcugacccucaccaacaccuccaucaucaaccacaaguucugcaaccugagcgacgcccacaagcgcaaccuguacgaccacgcccucauguccauccugagcacguuccaccuguccauccccaacuucaaccaguacgaggccaugagcugcgacuucaacgggggcaagaucuccgugcaguacaaccucagccacgccuacgcgguggacgccgccgagcacugcgggaccgucgccaacggcgugcugcagaccuucaugcggauggcguggggcggguccuacaucgcccuggacagcggccgcgggaacugggacugcaucaugaccuccuaccaguaccucaucauccagaacacgaccugggaggaccacugccaguucagccggcccucccccaucggcuaccuggggcugcucagccagcgcacccgggacaucuacaucagccgccggcugcugggcaccuucacguggacccucuccgacagcgagggcaacgagacccccgggggcuacugccugacccgcuggaugcugaucgaggccgagcucaagugcuucgggaacacggccguggccaagugcaacgagaagcacgacgaggaguucugcgacaugcugcggcuguucgacuucugcaagcaggcgauccagcgccucaaguccccggcccagaugagcauccagcugaucaacaaggccgucaacgcccugaucaacgaccagcucaucaugaagaaccaccuccgggacaugaugggcauccccuacugcaacuacuccaaguacugcuaccugaaccacaccagcuccgggcgcaccagccugcccaagugcugccugguguccaacggcagcuaccugaacgagacccacuucuccgacgacaucgagcagcaggccgacaacaugaucacggagaugcuccagaaggaguacaucgaccggcagggcaagaccccgcuggggcugguggaccuguucgucuucagcaccuccuucuaccucaucagcaucuuccugcaccugaucaagauccccacccaccgccacaucgugggcaagcccugccccaagccgcaccggcucaaccacauggggaucugcuccugcggccuguacaagcagcccggggugcccacgcgcuggaagcggugaggacuagucccuguucccagagcccacuuuuuuuucuuuuuuugaaauaaaauagccugucuuucagaucucaaaggcucuuuucagagccaccaaaaaaaaaaaaaaaaaaaaaaaaaaaaaaaaaaaaaaaaaaaaaaaaaaaaaaaaaaaaaaaaagaauu

SEQ ID NO: 33323 - RNA, 1714 nt, Artificial Sequence
  mRNA product Design a-1 (hSL-A64-N5) comprising derived and/or modified sequence from LASV(KAK-428;Clade n.d. (VII))__ANH09740__GPCmut8 (opt1)
aggagagucccgcagucggcguccagcggcucugcuuguucgugugugugucguugcaggccuuauucaagcuuaccaugggccagaucgugaccuucuuccaggaggucccccacgugaucgaggaggugaugaacaucguccugaucgcccucagccugcuggccauccucaaggggcuguacaacuucgcgaccugcggcgugaucgggcugaucacguuccuccugcugugcggccgcuccugcagcgccaccuacaaggggcaguacgagcuccagacccuggagcugaacauggagucccucaacaugugcaugccgcugagcugcaccaagaacaacucccaccacuacauccgggccggcaacaacacgggccuggagcucacccugaccaacaccagcaucaucucccacaaguucugcaaccugagcgacgcccacaagaagaaccucuacgaccacacgcugauguccaucaucaccaccuuccaccugagcauccccaacuucaaccaguacgaggccauguccugcgacuucaacgggggcaagaucagcauccaguacaaccucucccacagcuacgcgggggacgccgcccagcacugcggcaccguggccaacgggguccugcagacguucaugcgcauggcguggggcggcuccuaccuggcccucgacagcgggcggcgcggcugggacugcaucaucuccagcuaccaguaccugaucauccagaacaccaccugggacgaccacugccaguucucccggcccagccccaucggguaccugggcuucgugagccagaagacccgcgacaucuacaucucccggcgccuccugggcacguucaccuggacccugagcgacuccgaggggcacgacaugccgggcggguacugccucacccgguggaugcugaucgaggccgaccugaagugcuucggcaacacggccguggccaagugcaacgagaagcacgacgaggaguucugcgacauguggcgccucuucgacuucugcaagcaggcgauccagcggcugaaggcccccgcccagaugaacauccagcugaucaacaaggccgucaacgcccucaucaacgaccagcugaugaugaagaaccaccuccgcgacaucauggggauccccuacugcaacuacagcaaguucugcuaccugaacaacaccaccaccggccggacgucccugccccgcugcugccugaucagcaacggcuccuaccucaacgagacccacuucagcgacgacaucgagcagcaggcggacaacaugaucaccgagaugcugcagaaggaguacauggaccggcaggggaagaccccgcugggccucguggaccuguucguguucuccacgagcuucuaccugaucaccaucuuccugcaccucgucaagauccccacccaccgccacaucguggggaagcccugccccaagccgcaccggcugaaccacaugggcaucugcuccugcgggcuguacaagcagcccggcgugcccguccgcuggaagcggugaggacuagucccuguucccagagcccacuuuuuuuucuuuuuuugaaauaaaauagccugucuuucagaucucaaaggcucuuuucagagccaccaaaaaaaaaaaaaaaaaaaaaaaaaaaaaaaaaaaaaaaaaaaaaaaaaaaaaaaaaaaaaaaaagaauu

SEQ ID NO: 33324 - RNA, 1714 nt, Artificial Sequence; identical to SEQ ID NO: 33318
  mRNA product Design a-1 (hSL-A64-N5) comprising derived and/or modified sequence from LASV(Pinneo-NIG-1969;Clade I)__AIT17836__GPCmut8 (opt1)

SEQ ID NO: 33325 - RNA, 1714 nt, Artificial Sequence
  mRNA product Design a-1 (hSL-A64-N5) comprising derived and/or modified sequence from LASV(ISTH0009-NIG-2011;Clade II)__AIT17404__GPCmut8 (opt1)
aggagagucccgcagucggcguccagcggcucugcuuguucgugugugugucguugcaggccuuauucaagcuuaccaugggccagaucaucaccuucuuccaggaggugccccacgucaucgaggaggugaugaacaucgugcugaucgcccucagccugcuggccauccucaaggggaucuacaacgucgcgaccugcggccuguucgggcugguguccuuccuccugcugugcggccgcagcugcuccacgaccuacaaggggguguacgagcuccagacccuggagcuggacauggccagccucaacaugugcaugccgcuguccugcaccaagaacaacagccaccacuacaucauggucggcaacgagacgggccuggagcucacccugaccaacaccuccaucaucaaccacaaguucugcaaccugagcgacgcccacaagaagaaccucuacgaccacgcccugauguccaucaucagcacguuccaccuguccauccccaacuucaaccaguacgaggccaugagcugcgacuucaacgggggcaagaucuccgugcaguacaaccucagccacgcguacgccguggacgccgccaaccacugcgggaccaucgcgaacggcguccugcagaccuucaugcggauggccuggggcggguccuacaucgcccuggacagcggcaagggguccugggacugcaucaugaccagcuaccaguaccucaucauccagaacacgaccugggaggaccacugccaguucucccgccccagccccaucggcuaccuggggcugcucagccagcggacccgcgacaucuacaucucccggcgccugcugggcaccuucacguggacccucagcgacuccgagggcaacgagacccccgggggcuacugccugacccgguggaugcugaucgaggccgagcucaagugcuucgggaacacggccguggcgaagugcaacgagaagcacgacgaggaguucugcgacaugcugcgccuguucgacuucugcaagcaggccauccggcgccucaagaccccggcccagaugagcauccagcugaucaacaaggccgugaacgcccugaucaacgaccagcucaucaugaagaaccaccuccgggacaucaugggcauccccuacugcaacuacuccaaguacugcuaccugaaccacaccgucaccgggaagacgagccugccccgcugcugccugguguccaacggcagcuaccugaacgagacccacuucuccgacgacaucgagcagcaggcggacaacaugaucaccgagcuccugcagaaggaguacauggaccggcagggcaagaccccgcuggggcugguggaccucuucgucuucagcacguccuucuaccugaucagcaucuuccugcaccucaucaagauccccacccaccgccacaucaccggcaagcccugccccaagccgcaccggcugaaccacauggggaucugcuccugcggccuguacaagcaccccggggugcccgugaaguggaagcgcugaggacuagucccuguucccagagcccacuuuuuuuucuuuuuuugaaauaaaauagccugucuuucagaucucaaaggcucuuuucagagccaccaaaaaaaaaaaaaaaaaaaaaaaaaaaaaaaaaaaaaaaaaaaaaaaaaaaaaaaaaaaaaaaaagaauu

SEQ ID NO: 33326 - RNA, 1714 nt, Artificial Sequence
  mRNA product Design a-1 (hSL-A64-N5) comprising derived and/or modified sequence from LASV(ISTH2010-NIG-2012;Clade II)__AIT17482__GPCmut8 (opt1)
aggagagucccgcagucggcguccagcggcucugcuuguucgugugugugucguugcaggccuuauucaagcuuaccaugggccagaucaucaccuucuuccaggaggugccccacgucaucgaggaggugaugaacaucgugcugaucgcccucagccugcuggccauccucaaggggaucuacaacgucgcgaccugcggccuguucgggcugguguccuuccuccugcugugcggccgcagcugcuccacgaccuacaaggggguguacgagcuccagacccuggagcuggacauggccagccucaacaugugcaugccgcuguccugcaccaagaacaacagccaccacuacaucauggucggcaacgagacgggccuggagcucacccugaccaacaccuccaucaucaaccacaaguucugcaaccugagcgacgcccacaagaagaaccucuacgaccacgcccugauguccaucaucagcacguuccaccuguccauccccaacuucaaccaguacgaggccaugagcugcgacuucaacgggggcaagaucuccgugcaguacaaccucagccacgcguacgccguggacgccgccaaccacugcgggaccaucgcgaacggcguccugcagaccuucaugcggauggccuggggcggguccuacaucgcccuggacagcggcaagggguccugggacugcaucaugaccagcuaccaguaccucaucauccagaacaucacgugggaggaccacugccaguucucccgccccagccccaucggcuaccuggggcugcucagccagcggacccgcgacaucuacaucucccggcgccugcugggcaccuucaccuggacgcucagcgacuccgagggcaacgagacccccgggggcuacugccugacccgguggaugcugaucgaggccgagcucaagugcuucgggaacaccgccguggcgaagugcaacgagaagcacgacgaggaguucugcgacaugcugcgccuguucgacuucugcaagcaggccauccggcgccucaagacgccggcccagaugagcauccagcugaucaacaaggccgugaacgcccugaucaacgaccagcucaucaugaagaaccaccuccgggacaucaugggcauccccuacugcaacuacuccaaguacugcuaccugaaccacaccgucaccgggaagaccagccugccccgcugcugccugguguccaacggcagcuaccugaacgagacgcacuucuccgacgacaucgagcagcaggcggacaacaugaucaccgagcuccugcagaaggaguacaucgaccggcagggcaagaccccgcuggggcugguggaccucuucgucuucagcaccuccuucuaccugaucagcaucuuccugcaccucgugaagauccccacgcaccgccacguggucggcaagcccugccccaagccgcaccggcugaaccacauggggaucugcuccugcggccuguacaagcaccccggggugcccgugaaguggaagcgcugaggacuagucccuguucccagagcccacuuuuuuuucuuuuuuugaaauaaaauagccugucuuucagaucucaaaggcucuuuucagagccaccaaaaaaaaaaaaaaaaaaaaaaaaaaaaaaaaaaaaaaaaaaaaaaaaaaaaaaaaaaaaaaaaagaauu

SEQ ID NO: 33327 - RNA, 1714 nt, Artificial Sequence
  mRNA product Design a-1 (hSL-A64-N5) comprising derived and/or modified sequence from LASV(Lassa virus/H.sapiens-wt/NGA/2015/ISTH_0543;Clade II)__AVO03639__GPCmut8 (opt1)
aggagagucccgcagucggcguccagcggcucugcuuguucgugugugugucguugcaggccuuauucaagcuuaccaugggccagaucaucaccuucuuccaggaggugccccacgucaucgaggaggugaugaacaucgugcugaucgcccucagccugcuggccauccucaaggggaucuacaacgucgcgaccugcggccuguucgggcugguguccuuccuccugcugugcggccgcagcugcuccacgaccuacaaggggguguacgagcuccagacccuggagcuggacauggccaaccucaacaugugcaugccgcugagcugcaccaagaacaacucccaccacuacaucauggucggcaacgagacgggccuggagcucacccugaccaacaccagcaucaucaaccacaaguucugcaaccuguccgacgcccacaagaagaaccucuacgaccacgcccugaugagcaucaucuccacguuccaccugagcauccccaacuucaaccaguacgaggccauguccugcgacuucaacgggggcaagaucagcgugcaguacaaccucucccacaccuacgcgguggacgccgccaaccacugcgggaccaucgccaacggcguccugcagaccuucaugcggauggcguggggcgggagcuacaucgcccuggacuccggcaaggggagcugggacugcaucaugacguccuaccaguaccucgugauccagaacaccaccugggaggaccacugccaguucagccgccccucccccaucggcuaccuggggcugcucagccagcggacccgcgacaucuacaucagccggcgccugcugggcacguucaccuggacccucuccgacagcgagggcaacgagacccccgggggcuacugccugacgcgguggaugcugaucgaggccgagcucaagugcuucgggaacaccgccguggccaagugcaacgagaagcacgacgaggaguucugcgacaugcugcgccuguucgacuucugcaagcaggcgauccggcgccucaagaccccggcccagauguccauccagcugaucaacaaggccgucaacgcccugaucaacgaccagcucaucaugaagaaccaccuccgggacaucaugggcauccccuacugcaacuacagcaaguacugcuaccugaaccacaccgugacggggaagaccucccugccccgcugcugccuggugagcaacggcuccuaccugaacgagacccacuucagcgacgacaucgagcagcaggccgacaacaugaucaccgagcuccugcagaaggaguacaucgaccggcagggcaagacgccgcuggggcuggucgaccucuucguguucuccaccagcuucuaccugaucuccaucuuccugcaccucgugaagauccccacccaccgccacaucaccggcaagcccugccccaagccgcaccggcugaaccacauggggaucugcagcugcggccuguacaagcaccccgggguccccgugaaguggaagcgcugaggacuagucccuguucccagagcccacuuuuuuuucuuuuuuugaaauaaaauagccugucuuucagaucucaaaggcucuuuucagagccaccaaaaaaaaaaaaaaaaaaaaaaaaaaaaaaaaaaaaaaaaaaaaaaaaaaaaaaaaaaaaaaaaagaauu

SEQ ID NO: 33328 - RNA, 1714 nt, Artificial Sequence
  mRNA product Design a-1 (hSL-A64-N5) comprising derived and/or modified sequence from LASV(Lassa virus/H.sapiens-wt/NGA/2016/ISTH_0009;Clade II)__AVO03571__GPCmut8 (opt1)
aggagagucccgcagucggcguccagcggcucugcuuguucgugugugugucguugcaggccuuauucaagcuuaccaugggccagaucaucaccuucuuccaggaggugccccacgucaucgaggaggugaugaacaucgugcugaucgcccucagccugcuggccauccucaaggggaucuacaacgucgcgaccugcggccugcuggggcucguguccuuccugcugcucugcggccgcagcugcuccacgaccuacaaggggguguacgagcugcagacccuggagcucgacauggccagccugaacaugugcaugccgcuguccugcaccaagaacaacagccaccacuacaucauggucggcaacgagacgggccucgagcugacccugaccaacaccuccaucaucaaccacaaguucugcaaccucagcgacgcccacaagaagaaccuguacgaccacgcccugauguccaucaucagcacguuccaccucuccauccccaacuucaaccaguacgaggccaugagcugcgacuucaacgggggccggaucuccgugcaguacaaccugagccacuccuacgcgguggacgccgccaaccacugcgggaccaucgccaacggcguccugcagaccuucaugcgcauggcguggggcgggagcuacaucgcccucgacuccggcaaggggagcugggacugcaucaugaccuccuaccaguaccugaucauccagaacacgaccugggaggaccacugccaguucagccggcccagccccaucggcuaccuggggcuccugucccagcgcacccgggacaucuacaucagccgccggcugcucggcaccuucacguggacccuguccgacagcgagggcaacgagacccccgggggcuacugccugacccgcuggaugcucaucgaggccgagcugaagugcuucgggaacacggccguggccaagugcaacgagaagcacgacgaggaguucugcgacaugcugcggcuguucgacuucugcaagcaggcgauccgccggcugaagaccccggcccagauguccauccagcugaucaacaaggccgugaacgcccucaucaacgaccagcugaucaugaagaaccaccuccgcgacaucaugggcauccccuacugcaacuacagcaaguacugcuaccucaaccacaccgucaccgggaagacgucccugccccggugcugccuggugagcaacggcuccuaccucaacgagacccacuucagcgacgacaucgagcagcaggccgacaacaugaucaccgagcugcugcagaaggaguacaucgaccgccagggcaagaccccgcuggggcucguggaccuguucgucuucuccacgagcuucuaccugaucuccaucuuccuccaccuggugaagauccccacccaccggcacaucaccggcaagcccugccccaagccgcaccgccugaaccacauggggaucugcagcugcggccucuacaaccaccccggggugcccgucaaguggaagcggugaggacuagucccuguucccagagcccacuuuuuuuucuuuuuuugaaauaaaauagccugucuuucagaucucaaaggcucuuuucagagccaccaaaaaaaaaaaaaaaaaaaaaaaaaaaaaaaaaaaaaaaaaaaaaaaaaaaaaaaaaaaaaaaaagaauu

SEQ ID NO: 33329 - RNA, 1714 nt, Artificial Sequence
  mRNA product Design a-1 (hSL-A64-N5) comprising derived and/or modified sequence from LASV(Lassa virus/H.sapiens-wt/NGA/2016/ISTH_0017;Clade II)__AVO03567__GPCmut8 (opt1)
aggagagucccgcagucggcguccagcggcucugcuuguucgugugugugucguugcaggccuuauucaagcuuaccaugggccagaucaucaccuucuuccaggaggugccccacgucaucgaggaggugaugaacaucgugcugaucgcccucagccugcuggccauccucaaggggaucuacaacgucgcgaccugcggccuguucgggcugguguccuuccuccugcugugcggccgcagcugcuccacgaccuacaaggggguguacgagcuccagacccuggagcuggacauggccagccucaacaugugcaugccgcuguccugcaccaagaacaacagccaccacuacaucauggucggcaacgagacgggccuggagcucacccugaccaacaccuccaucaucaaccacaaguucugcaaccugagcgacgcccacaagaagaaccucuacgaccacgcccugauguccaucaucagcacguuccaccuguccauccccaacuucaaccaguacgaggccaugagcugcgacuucaacgggggcaagaucuccgugcaguacaaccucagccacaccuacgcgaucgacgccgccaaccacugcgggaccaucgccaacggcgugcugcagaccuucaugcggauggcguggggcggguccuacaucgcccuggacagcggcaagggguccugggacugcaucaugacgagcuaccaguaccucaucauccagaacaccaccugggaggaccacugccaguucucccgccccagccccaucggcuaccuggggcugcucagccagcggacccgcgacaucuacaucucccggcgccugcugggcacguucaccuggacccucagcgacuccgagggcaacgagacccccgggggcuacugccugacgcgguggaugcugaucgaggccgagcucaagugcuucgggaacaccgccgucgccaagugcaacgagaagcacgacgaggaguucugcgacaugcugcgccuguucgacuucugcaagcaggcgauccggcgccucaagaccccggcccagaugagcauccagcugaucaacaaggccgugaacgcccugaucaacgaccagcucaucaugaagaaccaccuccgggacaucaugggcauccccuacugcaacuacuccaaguacugcuaccugaaccacaccgugacggggaagaccagccugccccgcugcugccuggucuccaacggcagcuaccugaacgagacccacuucuccgacgacaucgagcagcaggccgacaacaugaucaccgagcuccugcagaaggaguacauggaccggcagggcaagacgccgcuggggcugguggaccucuucguguucagcaccuccuucuaccugaucagcaucuuccugcaccucguccgcauccccacccaccggcacgugaucggcaagcccugccccaagccgcaccgccugaaccacauggggaucugcuccugcggccuguacaagcaccccggggugcccgucaaguggaagcggugaggacuagucccuguucccagagcccacuuuuuuuucuuuuuuugaaauaaaauagccugucuuucagaucucaaaggcucuuuucagagccaccaaaaaaaaaaaaaaaaaaaaaaaaaaaaaaaaaaaaaaaaaaaaaaaaaaaaaaaaaaaaaaaaagaauu

SEQ ID NO: 33330 - RNA, 1714 nt, Artificial Sequence
  mRNA product Design a-1 (hSL-A64-N5) comprising derived and/or modified sequence from LASV(Lassa virus/H.sapiens-wt/NGA/2018/ISTH_0959;Clade II)__AVV65099__GPCmut8 (opt1)
aggagagucccgcagucggcguccagcggcucugcuuguucgugugugugucguugcaggccuuauucaagcuuaccaugggccagaucaucaccuucuuccaggaggugccccacgucaucgaggaggugaugaacaucgugcugaucgcccucagccugcuggccauccucaaggggaucuacaacgucgugaccugcggccuguucgggcugguguccuuccuccugcugugcggccgcagcugcuccacgaccuacaagggggucuacgagcuccagacccuggagcuggacauggcgagccucaacaugugcaugccgcuguccugcaccaagaacaacagccaccacuacaucauggugggcaacgagacgggccuggagcucacccugaccaacaccuccaucaucaaccacaaguucugcaaccugagcgacgcccacaagaagaaccucuacgaccacgcccugauguccaucaucagcacguuccaccuguccauccccaacuucaaccaguacgaggccaugagcugcgacuucaacgggggcaagaucuccgugcaguacaaccucagccacgccuacgcgaucgacgccgccaaccacugcgggaccaucgccaacggcguccugcagaccuucaugcggauggcguggggcggguccuacaucgcccuggacagcggcaagggguccugggacugcaucaugaccagcuaccaguaccucaucauccagaacacgaccugggaggaccacugccaguucucccgccccagccccaucggcuaccuggggcugcucagccagcggacccgcgacaucuacaucucccggcgccugcugggcaccuucacguggacccucagcgacuccgagggcaacgagacccccgggggcuacugccugacccgguggaugcugaucgaggccgagcucaagugcuucgggaacacggccguggccaagugcaacgagaagcacgacgaggaguucugcgacaugcugcgccuguucgacuucugcaagcaggcgauccggcgccucaagaccccggcccagaugagcauccagcugaucaacaaggccgugaacgcccugaucaacgaccagcucaucaugaagaaccaccuccgggacaucaugggcauccccuacugcaacuacuccaaguacugcuaccugaaccacaccgucaccgggaagacgagccugccccgcugcugccugguguccaacggcagcuaccugaacgagacccacuucuccgacgacaucgagcagcaggccgacaacaugaucaccgagcuccugcagaaggaguacaucgaccggcagggcaagaccccgcuggggcugguggaccucuucgucuucagcacguccuucuaccugaucagcaucuuccugcaccucgugaagauccccacccaccgccacgugaucggcaagcccugccccaagccgcaccggcugaaccacauggggaucugcuccugcggccuguacaagcaccccgggguccccgugaaguggaagcgcugaggacuagucccuguucccagagcccacuuuuuuuucuuuuuuugaaauaaaauagccugucuuucagaucucaaaggcucuuuucagagccaccaaaaaaaaaaaaaaaaaaaaaaaaaaaaaaaaaaaaaaaaaaaaaaaaaaaaaaaaaaaaaaaaagaauu

SEQ ID NO: 33331 - RNA, 1714 nt, Artificial Sequence
  mRNA product Design a-1 (hSL-A64-N5) comprising derived and/or modified sequence from LASV(LASV003-NIG-2008;Clade II)__AIT17580__GPCmut8 (opt1)
aggagagucccgcagucggcguccagcggcucugcuuguucgugugugugucguugcaggccuuauucaagcuuaccaugggccagaucaucaccuucuuccaggaggugccccacgucaucgaggaggugaugaacaucgugcugaucgcccucagccugcuggccauccucaaggggaucuacaacgucgcgaccugcggccuguucgggcugguguccuuccuccugcugugcggccgcagcugcuccacgaccuacaaggggguguacgagcuccagacccuggagcuggacauggccagccucaacaugugcaugccgcuguccugcaccaagaacaacagccaccacuacaucauggucggcaacgagacgggccuggagcucacccugaccaacaccuccaucaucaaccacaaguucugcaaccugagcgacgcccacaagaagaaccucuacgaccacgcccugauguccaucaucagcacguuccaccuguccauccccaacuucaaccaguacgaggccaugagcugcgacuucaacgggggcaagaucuccgugcaguacaaccucagccacaccuacgcgguggacgccgccaaccacugcgggaccaucgccaacggcguccugcagaccuucaugcggauggcguggggcggguccuacaucgcccuggacagcggcaagggguccugggacugcaucaugacgagcuaccaguaccucaucauccagaacaccaccugggaggaccacugccaguucucccgccccagccccaucggcuaccuggggcugcucagccagcggacccgcgacaucuacaucucccggcgccugcugggcacguucaccuggacccucagcgacuccgagagcaacgagaccccgggcggguacugccugacgcgguggaugcugaucgaggccgagcucaagugcuucggcaacaccgccguggccaagugcaacgagaagcacgacgaggaguucugcgacaugcugcgccuguucgacuucugcaagcaggcgauccggcgccucaaggcccccgcccagauguccauccagcugaucaacaaggccgugaacgcccugaucaacgaccagcucaucaugaagaaccaccuccgggacaucauggggauccccuacugcaacuacagcaaguacugcuaccugaaccacaccgucaccggccgcacgucccugccccggugcugccuggugagcaacggguccuaccugaacgagacccacuucagcgacgacaucgagcagcaggcggacaacaugaucaccgagcuccugcagaaggaguacauggaccgccagggcaagaccccgcugggccugguggaccucuucgucuucuccacgagcuucuaccugaucuccaucuuccugcaccucgugaagauccccacccaccggcacgugaucgggaagcccugccccaagccgcaccgccugaaccacaugggcaucugcagcugcgggcuguacaagcaccccggcguccccgugaaguggaagcggugaggacuagucccuguucccagagcccacuuuuuuuucuuuuuuugaaauaaaauagccugucuuucagaucucaaaggcucuuuucagagccaccaaaaaaaaaaaaaaaaaaaaaaaaaaaaaaaaaaaaaaaaaaaaaaaaaaaaaaaaaaaaaaaaagaauu

SEQ ID NO: 33332 - RNA, 1714 nt, Artificial Sequence
  mRNA product Design a-1 (hSL-A64-N5) comprising derived and/or modified sequence from LASV(LASV035-NIG-2009;Clade II)__AIT17588__GPCmut8 (opt1)
aggagagucccgcagucggcguccagcggcucugcuuguucgugugugugucguugcaggccuuauucaagcuuaccaugggccagaucaucaccuucuuccaggaggugccccacgucaucgaggaggugaugaacaucgugcugaucgcccucagccugcuggccauccucaaggggaucuacaacgucgcgaccugcggccuguucgggcugguguccuuccuccugcugugcggccgcagcugcuccacgaccuacaaggggguguacgagcuccagacccuggagcuggacauggccagccucaacaugugcaugccgcuguccugcaccaagaacaacagccaccacuacaucauggucggcaacgagacgggccuggagcucacccugaccaacaccuccaucaucaaccacaaguucugcaaccugagcgacgcccacaagaagaaccucuacgaccacgcccugauguccaucaucagcacguuccaccuguccauccccaacuucaaccaguacgaggccaugagcugcgacuucaacgggggcaagaucuccgugcaguacaaccucagccacgcguacgccguggacgccgccaaccacugcgggaccaucgcgaacggcguccugcagaccuucaugcggauggccuggggcggguccuacaucgcccuggacagcggcaagggguccugggacugcaucaugaccagcuaccaguaccucaucauccagaacacgaccugggaggaccacugccaguucucccgccccagccccaucggcuaccuggggcugcucagccagcggacccgcgacaucuacaucucccggcgccugcugggcaccuucacguggacccucagcgacuccgagggcaacgagacccccgggggcuacugccugacccgguggaugcugaucgaggccgagcucaagugcuucgggaacacggccguggcgaagugcaacgagaagcacgacgaggaguucugcgacaugcugcgccuguucgacuucugcaagcaggccauccggcgccucaaggccccggcccagaugagcauccagcugaucaacaaggccgugaacgcgcugaucaacgaccagcucaucaugaagaaccaccuccgggacaucaugggcauccccuacugcaacuacuccaaguacugcuaccugaaccacaccgucaccgggaagaccagccugccccgcugcugccugguguccaacggcagcuaccugaacgagacgcacuucuccgacgacaucgagcagcaggccgacaacaugaucaccgagcuccugcagaaggaguacaucgaccggcagggcaagaccccgcuggggcugguggaccucuucgucuucagcaccuccuucuaccugaucagcaucuuccugcaccucgugaagauccccacgcaccgccacgugaucggcaagcccugccccaagccgcaccggcugaaccacauggggaucugcuccugcggccuguacaagcaccccgggguccccgugaaguggaagcgcugaggacuagucccuguucccagagcccacuuuuuuuucuuuuuuugaaauaaaauagccugucuuucagaucucaaaggcucuuuucagagccaccaaaaaaaaaaaaaaaaaaaaaaaaaaaaaaaaaaaaaaaaaaaaaaaaaaaaaaaaaaaaaaaaagaauu

SEQ ID NO: 33333 - RNA, 1714 nt, Artificial Sequence
  mRNA product Design a-1 (hSL-A64-N5) comprising derived and/or modified sequence from LASV(LASV1000-NIG-2009;Clade II)__AIT17782__GPCmut8 (opt1)
aggagagucccgcagucggcguccagcggcucugcuuguucgugugugugucguugcaggccuuauucaagcuuaccaugggccagaucaucaccuucuuccaggaggugccccacgucaucgaggaggugaugaacaucgugcugaucgcccucagccugcuggccauccucaaggggaucuacaacgucgcgaccugcggccuguucgggcugguguccuuccuccugcugugcggccgcagcugcuccacgaccuacaaggggguguacgagcuccagacccuggagcuggacauggccagccucaacaugugcaugccgcuguccugcaccaagaacaacagccaccacuacaucauggucggcaacgagacgggccuggagcucacccugaccaacaccuccaucaucaaccacaaguucugcaaccugagcgacgcccacaagaagaaccucuacgaccacgcccugauguccaucaucagcacguuccaccuguccauccccaacuucaaccaguacgaggccaugagcugcgacuucaacgggggcaagaucuccgugcaguacaaccucagccacaccuacgcgguggacgccgccaaccacugcgggaccaucgccaacggcguccugcagaccuucaugcggauggcguggggcggguccuacaucgcccuggacagcggcaagggguccugggacugcaucaugacgagcuaccaguaccucaucauccagaacaccaccugggaggaccacugccaguucucccgccccagccccaucggcuaccuggggcugcucagccagcggacccgcgacaucuacaucucccggcgccugcugggcacguucaccuggacccucagcgacuccgagggcaacgagacccccgggggcuacugccugacgcgguggaugcugaucgaggccgagcucaagugcuucgggaacaccgccguggccaagugcaacgagaagcacgacgaggaguucugcgacaugcugcgccuguucgacuucugcaagcaggcgaucaagcggcucaagaccccggcccagaugagcauccagcugaucaacaaggccgugaacgcccugaucaacgaccagcucaucaugaagaaccaccuccgcgacaucaugggcauccccuacugcaacuacuccaaguacugcuaccugaaccacaccgucacggggaagaccagccugccccggugcugccugguguccaacggcagcuaccugaacgagacccacuucuccgacgacaucgagcagcaggccgacaacaugaucaccgagcuccugcagaaggaguacaucgaccgccagggcaagacgccgcuggggcugguggaccucuucgucuucagcaccuccuucuaccugaucagcaucuuccugcaccucgugaagauccccacccaccggcacguggucggcaagcccugccccaagccgcaccgccugaaccacauggggaucugcuccugcggccuguacaagcaccccggggugcccgugaaguggaagcggugaggacuagucccuguucccagagcccacuuuuuuuucuuuuuuugaaauaaaauagccugucuuucagaucucaaaggcucuuuucagagccaccaaaaaaaaaaaaaaaaaaaaaaaaaaaaaaaaaaaaaaaaaaaaaaaaaaaaaaaaaaaaaaaaagaauu

SEQ ID NO: 33334 - RNA, 1714 nt, Artificial Sequence
  mRNA product Design a-1 (hSL-A64-N5) comprising derived and/or modified sequence from LASV(LASV221-NIG-2010;Clade II)__AIT17624__GPCmut8 (opt1)
aggagagucccgcagucggcguccagcggcucugcuuguucgugugugugucguugcaggccuuauucaagcuuaccaugggccagaucaucaccuucuuccaggaggugccccacgucaucgaggaggugaugaacaucgugcugaucgcccucagccugcuggccauccucaaggggaucuacaacgucgcgaccugcggccuguucgggcugguguccuuccuccugcugugcggccgcagcugcuccacgaccuacaaggggguguacgagcuccagacccuggagcuggacauggccagccucaacaugugcaugccgcuguccugcaccaagaacaacagccaccacuacaucauggucggcaacgagacgggccuggagcucacccugaccaacaccuccaucaucaaccacaaguucugcaaccugagcgacgcccacaagaagaaccucuacgaccacgcccugauguccaucaucagcacguuccaccuguccauccccaacuucaaccaguacgaggccaugagcugcgacuucaacgggggcaagaucuccgugcaguacaaccucagccacaccuacgcgaucgacgccgccaaccacugcgggaccaucgccaacggcgugcugcagaccuucaugcggauggcguggggcggguccuacaucgcccuggacagcggcaagggguccugggacugcaucaugacgagcuaccaguaccucaucauccagaacaccaccugggaggaccacugccaguucucccgccccagccccaucggcuaccuggggcugcucagccagcggacccgcgacaucuacaucucccggcgccugcugggcacguucaccuggacccucagcgacuccgagggcaacgagacccccgggggcuacugccugacgcgguggaugcugaucgaggccgagcucaagugcuucgggaacaccgccgucgccaagugcaacgagaagcacgacgaggaguucugcgacaugcugcgccuguucgacuucugcaagcaggcgauccggcgccucaagaccccggcccagaugagcauccagcugaucaacaaggccgugaacgcccugaucaacgaccagcucaucaugaagaaccaccuccgggacaucaugggcauccccuacugcaacuacuccaaguacugcuaccugaaccacaccgugacggggaagaccagccugccccgcugcugccuggucuccaacggcagcuaccugaacgagacccacuucuccgacgacaucgagcagcaggccgacaacaugaucaccgagaugcuccagaaggaguacauggaccggcagggcaagacgccgcuggggcugguggaccuguucguguucagcaccuccuucuaccucaucagcaucuuccugcaccuggucaagauccccacccaccgccacgugaucggcaagcccugccccaagccgcaccggcucaaccacauggggaucugcuccugcggccuguacaagcaccccggggugcccgucaaguggaagcgcugaggacuagucccuguucccagagcccacuuuuuuuucuuuuuuugaaauaaaauagccugucuuucagaucucaaaggcucuuuucagagccaccaaaaaaaaaaaaaaaaaaaaaaaaaaaaaaaaaaaaaaaaaaaaaaaaaaaaaaaaaaaaaaaaagaauu

SEQ ID NO: 33335 - RNA, 1714 nt, Artificial Sequence
  mRNA product Design a-1 (hSL-A64-N5) comprising derived and/or modified sequence from LASV(LASV237-NIG-2010;Clade II)__AIT17638__GPCmut8 (opt1)
aggagagucccgcagucggcguccagcggcucugcuuguucgugugugugucguugcaggccuuauucaagcuuaccaugggccagaucaucaccuucuuccaggaggugccccacgucaucgaggaggugaugaacaucgugcugaucgcccucagccugcuggccauccucaaggggaucuacaacgucgcgaccugcggccuguucgggcugguguccuuccuccugcugugcggccgcagcugcuccacgaccuacaaggggguguacgagcuccagacccuggagcuggacauggccagccucaacaugugcaugccgcuguccugcaccaagaacaacagccaccacuacaucauggucggcaacgagacgggccuggagcucacccugaccaacaccuccaucaucaaccacaaguucugcaaccugagcgacgcccacaagaaggaccucuacgaccacgcccugauguccaucaucagcacguuccaccuguccauccccaacuucaaccaguacgaggccaugagcugcgacuucaacgggggcaagaucuccgugcaguacaaccucagccacaccuacgcgguggacgccgccaaccacugcgggaccaucgccaacggcguccugcagaccuucaugcggauggcguggggcggguccuacaucgcccuggacagcggcaagggguccugggacugcaucaugacgagcuaccaguaccucaucauccagaacaccaccugggaggaccacugccaguucucccgccccagccccaucggcuaccuggggcugcucagccagcggacccgcgacaucuacaucucccggcgccugcugggcacguucaccuggacccucagcgacuccgagggcaacgagacccccgggggcuacugccugacgcgguggaugcugaucgaggccgagcucaagugcuucgggaacaccgccguggccaagugcaacgagaagcacgacgaggaguucugcgacaugcugcgccuguucgacuucugcaagcaggcgauccggcgccucaagaccccggcccagaugagcauccagcugaucaacaaggccgugaacgcccugaucaacgaccagcucaucaugaagaaccaccuccgggacaucaugggcauccccuacugcaacuacuccaaguacugcuaccugaaccacaccgucacggggaagaccagccugccccgcugcugccugguguccaacggcagcuaccugaacgagacccacuucuccgacgacaucgagcagcaggccgacaacaugaucaccgagcuccugcagaaggaguacauggaccggcagggcaagacgccgcuggggcugguggaccucuucgucuucagcaccuccuucuaccugaucagcaucuuccugcaccucaucaagauccccacccaccgccacaucaccggcaagcccugccccaagccgcaccggcugaaccacauggggaucugcuccugcggccuguacaagcaccccggggugcccgugaaguggaagcgcugaggacuagucccuguucccagagcccacuuuuuuuucuuuuuuugaaauaaaauagccugucuuucagaucucaaaggcucuuuucagagccaccaaaaaaaaaaaaaaaaaaaaaaaaaaaaaaaaaaaaaaaaaaaaaaaaaaaaaaaaaaaaaaaaagaauu

SEQ ID NO: 33336 - RNA, 1714 nt, Artificial Sequence
  mRNA product Design a-1 (hSL-A64-N5) comprising derived and/or modified sequence from LASV(LASV253-NIG-2011;Clade II)__AIT17670__GPCmut8 (opt1)
aggagagucccgcagucggcguccagcggcucugcuuguucgugugugugucguugcaggccuuauucaagcuuaccaugggccagaucaucaccuucuuccaggaggugccccacgucaucgaggaggugaugaacaucgugcugaucgcccucagccugcuggccauccucaaggggaucuacaacgucgcgaccugcggccuguucgggcugguguccuuccuccugcugugcggccgcagcugcuccacgaccuacaaggggguguacgagcuccagacccuggagcuggacauggccagccucaacaugugcaugccgcuguccugcaccaagaacaacagccaccacuacaucauggucggcaacgagacgggccuggagcucacccugaccaacaccuccaucaucaaccacaaguucugcaaccugagcgacgcccacaagaagaaccucuacgaccacgcccugauguccaucaucagcacguuccaccuguccauccccaacuucaaccaguacgaggccaugagcugcgacuucaacgggggcaagaucuccgugcaguacaaccucagccacaccuacgcgguggacgccgccaaccacugcgggaccaucgccaacggcguccugcagaccuucaugcggauggcguggggcggguccuacaucgcccuggacagcggcaagggguccugggacugcaucaugacgagcuaccaguaccucaucauccagaacaccaccugggaggaccacugccaguucucccgccccagccccaucggcuaccuggggcugcucagccagcggacccgcgacaucuacaucucccggcgccugcugggcacguucaccuggacccucagcgacuccgagggcaacgagacccccgggggcuacugccugacgcgguggaugcugaucgaggccgagcucaagugcuucgggaacaccgccguggccaagugcaacgagaagcacgacgaggaguucugcgacaugcugcgccuguucgacuucugcaagcaggcgauccggcgccucaaggccccggcccagaugagcauccagcugaucaacaaggccgugaacgcccugaucaacgaccagcucaucaugaagaaccaccuccgggacaucaugggcauccccuacugcaacuacuccaaguacugcuaccugaaccacaccgucaccgggcgcacgagccugccccggugcugccugguguccaacggcagcuaccugaacgagacccacuucuccgacgacaucgagcagcaggcggacaacaugaucaccgagcuccugcagaaggaguacaucgaccgccagggcaagaccccgcuggggcugguggaccucuucgucuucagcacguccuucuaccugaucagcaucuuccugcaccucgugaagauccccacccaccggcacaucaucggcaagcccugccccaagccgcaccgccugaaccacauggggaucugcuccugcggccuguacaagcaccccggggugcccgucaaguggaagcggugaggacuagucccuguucccagagcccacuuuuuuuucuuuuuuugaaauaaaauagccugucuuucagaucucaaaggcucuuuucagagccaccaaaaaaaaaaaaaaaaaaaaaaaaaaaaaaaaaaaaaaaaaaaaaaaaaaaaaaaaaaaaaaaaagaauu

SEQ ID NO: 33337 - RNA, 1714 nt, Artificial Sequence
  mRNA product Design a-1 (hSL-A64-N5) comprising derived and/or modified sequence from LASV(LASV254-NIG-2011;Clade II)__AIT17674__GPCmut8 (opt1)
aggagagucccgcagucggcguccagcggcucugcuuguucgugugugugucguugcaggccuuauucaagcuuaccaugggccagaucaucaccuucuuccaggaggugccccacgucaucgaggaggugaugaacaucgugcugaucgcccucagccugcuggccauccucaaggggaucuacaacgucgcgaccugcggccuguucgggcugguguccuuccuccugcugugcggccgcagcugcuccacgaccuacaaggggguguacgagcuccagacccuggagcuggacaugaccaaccucaacaugugcaugccgcugagcugcacgaagaacaacucccaccacuacaucauggucggcaacgagaccggccuggagcucacccugaccaacacgagcaucaucaaccacaaguucugcaaccuguccgacgcccacaagaagaaccucuacaaccacgcccugaugagcaucaucuccaccuuccaccugagcauccccaacuucaaccaguacgaggccauguccugcgacuucaacgggggcaagaucagcgugcaguacaaccucucccacagcuacgccguggacgcggccaaccacugcgggaccaucgccaacggcguccugcagaccuucaugcggauggccuggggcggguccuacaucgcgcuggacagcggcaaggggaacugggacugcaucaugacguccuaccaguaccucaucauccagaacaccaccugggaggaccacugccaguucagccgccccucccccaucggcuaccuggggcugcucagccagcggacccgcgacaucuacaucagccggcgccugcugggcacguucaccuggacccucuccgacagcgagggcaacgagacccccgggggcuacugccugacgcgguggaugcugaucgaggccgagcucaagugcuucgggaacaccgccguggccaagugcaacgagaagcacgacgaggaguucugcgacaugcugcgccuguucgacuucugcaagcaggccauccggcgccucaagaccccggcgcaggccaacauccagcugaucaacaaggccgugaacgcccugaucaacgaccagcucaucaugaagaaccaccuccgggacaucaugggcauccccuacugcaacuacuccaaguacugcuaccugaaccacaccgucacggggaagaccagccugccccgcugcugccugguguccaacggcagcuaccugaacgagacccacuucuccgacgacaucgagcagcaggccgacaacaugaucaccgagcuccugcagaaggaguacauggaccggcagggcaagacgccgcuggggcugguggaccucuucgucuucagcaccuccuucuaccugaucagcaucuuccugcaccucgugaagauccccacccaccgccacgugaucggcaagcccugccccaagccgcaccggcugaaccacauggggaucugcuccugcggccuguacaagcaccccgggguccccgugaaguggaagcgcugaggacuagucccuguucccagagcccacuuuuuuuucuuuuuuugaaauaaaauagccugucuuucagaucucaaaggcucuuuucagagccaccaaaaaaaaaaaaaaaaaaaaaaaaaaaaaaaaaaaaaaaaaaaaaaaaaaaaaaaaaaaaaaaaagaauu

SEQ ID NO: 33338 - RNA, 1714 nt, Artificial Sequence
  mRNA product Design a-1 (hSL-A64-N5) comprising derived and/or modified sequence from LASV(Nig08-A19;Clade III)__ADU56618__GPCmut8 (opt1)
aggagagucccgcagucggcguccagcggcucugcuuguucgugugugugucguugcaggccuuauucaagcuuaccaugggccagaucgugaccuucuuccaggaggucccccacgugaucgaggaggugaugaacaucguccugaucgcccucagcauccuggccauccugaaggggcucuacaacaucgcgaccugcggccugaucgggcuggugacguuccuccugcuguccggccgcagcugcuccaugaccuacaaggggguguacgagcuccagacccuggagcugaacaugaacacccucaacaugugcaugccgcugagcugcacgaagaacaacucccaccacuacaucauggucggcaacgagaccggccuggagcucacccugaccaacacgagccugcuccaccacaaguucugcaaccuguccgacgcccacaagaagaaccuguacgaccacacccucaugagcaucaucuccaccuuccaccugagcauccccaacuucaaccaguacgaggccauguccugcgacuucaacgggggcaagaucaccgugcaguacaaccugagccacuccuacgccaucgacgccgcgaaccacugcgggacgguggccaacggcguccuccagaccuucaugcggauggccuggggcgggagcuacaucgcccuggacuccggccgcgggaagugggacugcaucaugaccagcuaccaguaccugaucauccagaacaccacgugggaggaccacugccaguucucccggcccagccccaucggcuaccucgggcugcugucccagcgcacccgggacaucuacaucagccgccggcuccugggcaccuucaccuggacgcugagcgacuccgagggcaacgagacccccgggggcuacugccucacccgcuggaugcugaucgaggcggagcugaagugcuucgggaacaccgccguggccaagugcaacgagaagcacgacgaggaguucugcgacaugcuccggcuguucgacuucugcaagcaggccauccgccggcugaaggccccggcgcagaugagcauccagcucaucaacaaggccgugaacgcccugaucaacgaccagcugaucaugaagaaccaccuccgcgacaucaugggcauccccuacugcaacuacuccaaguacugcuaccugaaccacacgagcaccgggcggaccucccugccccgcugcugccucgucagcaacggcuccuaccugaacgagacccacuucagcgacgacaucgagcagcaggccgacaacaugaucacggagaugcugcagaaggaguaccuggaccggcagggcaagaccccgcucgggcugguggaccuguucguguucuccaccagcuucuaccucaucuccaucuuccugcaccuggucaagauccccacccaccgccacaucgugggcaagcccugccccaagccgcaccggcucaaccacauggggaucugcagcugcggccuguacaagcagcccggggugcccguccgcuggaagcggugaggacuagucccuguucccagagcccacuuuuuuuucuuuuuuugaaauaaaauagccugucuuucagaucucaaaggcucuuuucagagccaccaaaaaaaaaaaaaaaaaaaaaaaaaaaaaaaaaaaaaaaaaaaaaaaaaaaaaaaaaaaaaaaaagaauu

SEQ ID NO: 33339 - RNA, 1717 nt, Artificial Sequence
  mRNA product Design a-1 (hSL-A64-N5) comprising derived and/or modified sequence from LASV(G1180-SLE-2010;Clade IV)__AIT17168__GPCmut8 (opt1)
aggagagucccgcagucggcguccagcggcucugcuuguucgugugugugucguugcaggccuuauucaagcuuaccaugggccagaucgugaccuucuuccaggaggucccccacgugaucgaggaggugaugaacaucguccugaucgcccucagcauccuggccgugcugaaggggcucuacaacuucgcgaccugcggccugguggggcugcucacguuccugcugcucugcggccgcuccugcaccgccagccgguacaagggggucuacgagcugcagacccuggagcucaacauggagacccugaacaugugcaugccgcuguccugcacgaagaacaacagccaccacuacaucauggugggcaacgagaccggccucgagcugacccugaccaacacguccaucaucaaccacaaguucugcaaccucagcgacgcccacaagaagaaccuguacgaccacgcccugauguccaucaucagcaccuuccaccucuccauccccaacuucaaccaguacgaggccaugagcugcgacuucaacgggggcaagaucuccgugcaguacaaccugagccacuccuacgcgggggacgccgccaaccacugcggcaccgucgccaacggggugcugcagaccuucaugcgcauggcguggggcggcagcuacaucgcccucgacuccgggcacggcagcugggacugcaucaugacguccuaccaguaccugaucauccagaacaccaccugggaggaccacugccaguucagccggcccucccccaucggguaccugggccuccugagccagcgcacccgggacaucuacaucagccgccggcugcucggcacguucaccuggacccuguccgacagcgaggggaaggacaccccgggcggguacugccugacgcgcuggaugcucaucgaggccgagcugaagugcuucggcaacaccgccguggccaagugcaacgagaagcacgacgaggaguucugcgacaugcugcggcuguucgacuucugcaagcaggcgauccagcgccugaaggcccccgcccagauguccauccagcugaucaacaaggccgucaacgcccucaucaacgaccagcugaucaugaagaaccaccuccgggacaucauggggauccccuacugcaacuacagcaaguacugcuaccucaaccacaccaccacgggcaagaccucccugcccaagugcugccuggugagcaacggcuccuaccucaacgagacccacuucagcgacgacaucgagcagcaggcggacaacaugaucaccgagaugcugcagaaggaguacauggagcgccaggggaagacgccgcugggccugguggaccucuucgucuucuccaccagcuucuaccugaucuccaucuuccugcaccucgugaagauccccacccaccggcacaucgugggcaagagcugccccaagccccaccgccugaaccacauggggaucugcuccugcgggcuguacaagcagccgggcguccccgugaaguggaagcggugaggacuagucccuguucccagagcccacuuuuuuuucuuuuuuugaaauaaaauagccugucuuucagaucucaaaggcucuuuucagagccaccaaaaaaaaaaaaaaaaaaaaaaaaaaaaaaaaaaaaaaaaaaaaaaaaaaaaaaaaaaaaaaaaagaauu

SEQ ID NO: 33340 - RNA, 1717 nt, Artificial Sequence
  mRNA product Design a-1 (hSL-A64-N5) comprising derived and/or modified sequence from LASV(G1442-SLE-2011;Clade IV)__AIT17180__GPCmut8 (opt1)
aggagagucccgcagucggcguccagcggcucugcuuguucgugugugugucguugcaggccuuauucaagcuuaccaugggccagaucgugaccuucuuccaggaggucccccacgugaucgaggaggugaugaacaucguccugaucgcccucagcauccuggccgugcugaaggggcucuacaacguggcgaccugcggccugaucgggcuggucacguuccuccugcugugcggccgcuccugcaccaccacccucuacaaggggguguacgagcugcagacgcuggagcucaacauggagacccugaacaugugcaugccgcugagcugcaccaagaacaacucccaccacuacauccgggugggcaacgagaccggccucgagcugacgcugaccaacaccagcaucaucaaccacaaguucugcaaccucuccgacgcccacaagaagaaccuguacgaccacgcccugaugagcaucaucuccaccuuccaccucagcauccccaacuucaaccaguacgaggccauguccugcgacuucaacgggggcaagaucagcguccaguacaaccugucccacagcuacgccggggacgcggccaaccacugcggcacgguggccaacggggugcugcagaccuucaugcgcauggccuggggcggcuccuacaucgcgcucgacagcgggcggggcaacugggacugcaucaugaccuccuaccaguaccugaucauccagaacaccacgugggacgaccacugccaguucagccgccccucccccaucggguaccugggccuccugagccagcggacccgcgacgucuacaucucccggcgccugcucggcaccuucaccuggacgcugagcgacagcgaggggaaggacaccccgggcggguacugccugacccgguggaugcucaucgaggccgagcugaagugcuucggcaacaccgccguggccaagugcaacgagaagcacgacgaggaguucugcgacaugcugcgccucuucgacuucugcaagcaggccauccagcggcugaaggcgcccgcccagauguccauccagcugaucaacaaggccgugaacgcccucaucaacgaccagcugaucaugaagaaccaccuccgcgacaucauggggauccccuacugcaacuacagcaaguacugcuaccugaacaacacggccaccggcaagaccucccugcccaagugcugccugaucagcaacggcuccuaccucaacgagacccacuucagcgacgacaucgagcaggaggcggacaacaugaucacggagaugcugcagaaggaguacauggagcggcaggggaagaccccgcugggccuggucgaccucuucguguucuccaccagcuucuaccugaucuccaucuuccugcaccucgugaagauccccacccaccgccacaucgucggcaagagcugccccaagccccaccggcugaaccacauggggaucugcuccugcgggcuguacaagcagccgggcgugcccgugcgcuggaagcggugaggacuagucccuguucccagagcccacuuuuuuuucuuuuuuugaaauaaaauagccugucuuucagaucucaaaggcucuuuucagagccaccaaaaaaaaaaaaaaaaaaaaaaaaaaaaaaaaaaaaaaaaaaaaaaaaaaaaaaaaaaaaaaaaagaauu

SEQ ID NO: 33341 - RNA, 1717 nt, Artificial Sequence
  mRNA product Design a-1 (hSL-A64-N5) comprising derived and/or modified sequence from LASV(G3010-SLE-2013;Clade IV)__AIT17344__GPCmut8 (opt1)
aggagagucccgcagucggcguccagcggcucugcuuguucgugugugugucguugcaggccuuauucaagcuuaccaugggccagaucgugaccuucuuccaggaggucccccacgugaucgaggaggugaugaacaucguccugaucgcccucagcauccuggccgugcugaaggggcucuacaacuucgcgaccugcggccugguggggcuggucacguuccuccugcugugcggccgcuccugcaccaccagccucuacaaggggguguacgagcugcagacccuggagcucaacauggagacgcugaacaugugcaugccgcuguccugcaccaagaacaacagccaccacuacaucauggugggcaacgagaccggccucgagcugacccugacgaacaccuccaucaucaaccacaaguucugcaaccucagcgacgcccacaagaagaaccuguacaaccacgcccugauguccaucaucagcaccuuccaccucuccauccccaacuucaaccaguacgaggccaugagcugcgacuucaacgggggcaagaucuccguccaguacaaccugagccacuccuacgccggggacgcggccagccacugcggcaccguggccaacggggugcugcagacguucaugcggauggccuggggcggcuccuacaucgcgcucgacagcggguacggcaagugggacugcaucaugaccuccuaccaguaccugaucauccagaacaccaccugggaggaccacugccaguucagccgccccucccccaucggguaccugggccuccugagccagcggacgcgcgacaucuacaucagccggcgccugcucggcaccuucaccuggacccuguccgacagcgaggggaaggacacgccgggcggguacugccugacccgguggaugcucaucgaggccgagcugaagugcuucggcaacaccgccgucgccaagugcaacgagaagcacgacgaggaguucugcgacaugcugcgccucuucgacuucugcaagcaggccauccagcggcugaagacccccgcgcagauguccauccagcugaucaacaaggccgugaacgcccucaucaacgaccagcugaucaugaagaaccaccuccgcgacaucauggggauccccuacugcaacuacagcaaguacugcuaccugaaccacacgaccaccggcaagaccucccugcccaagugcugccuggugagcaacggcuccuaccucaacgagacgcacuucagcgacgacaucgagcagcaggccgacaacaugaucaccgagaugcugcagaaggaguacauggagcggcaggggaagaccccgcugggccuggucgaccucuucguguucuccaccagcuucuaccugaucuccaucuuccugcaccucgugaagauccccacgcaccgccacaucgucggcaagagcugccccaagccccaccggcugaaccacauggggaucugcuccugcgggcuguacaagcagccgggcgugcccgugcgcuggaagcggugaggacuagucccuguucccagagcccacuuuuuuuucuuuuuuugaaauaaaauagccugucuuucagaucucaaaggcucuuuucagagccaccaaaaaaaaaaaaaaaaaaaaaaaaaaaaaaaaaaaaaaaaaaaaaaaaaaaaaaaaaaaaaaaaagaauu

SEQ ID NO: 33342 - RNA, 1717 nt, Artificial Sequence
  mRNA product Design a-1 (hSL-A64-N5) comprising derived and/or modified sequence from LASV(G502-SLE-2009;Clade IV)__AIT17126__GPCmut8 (opt1)
aggagagucccgcagucggcguccagcggcucugcuuguucgugugugugucguugcaggccuuauucaagcuuaccaugggccagaucgugaccuucuuccaggaggucccccacgugaucgaggaggugaugaacaucguccugaucgcccucagcauccuggccgugcugaaggggcucuacaacuucgcgaccugcggccugguggggcugcucacguuccugcugcucugcggccgcuccugcaccaccgggcuguacaagggcgucuacgagcugcagacccucgagcugaacauggagacgcugaacaugugcaugccgcucagcugcaccaagaacaacucccaccacuacaucauggugggcaacgagaccgggcuggagcugacccucacgaacaccagcaucaucaaccacaaguucugcaaccuguccgacgcccacaagaagaaccuguacgaccacgcccucaugagcaucaucuccaccuuccaccugagcauccccaacuucaaccaguacgaggccauguccugcgacuucaacggcgggaagaucagcgugcaguacaaccugucccacagcuacgccggcgacgcggccgaccacugcgggaccgucgccaacggcgugcuccagacguucaugcggauggccuggggcggguccuacaucgcgcuggacagcggccgcgggcggugggacugcaucaugaccuccuaccaguaccugaucauccagaacaccaccugggaggaccacugccaguucagccgccccucccccaucggcuaccucggccugcugagccagcggacgcgcgacaucuacaucucccggcgccuccuggggaccuucaccuggacccugagcgacagcgagggcaaggacacgcccgggggcuacugccucacccgguggaugcugaucgaggccgagcugaagugcuucgggaacaccgccguggccaagugcaacgagaagcacgacgaggaguucugcgacaugcuccgccuguucgacuucugcaagcaggccauccagcggcugaaggcgccggcccagauguccauccagcucaucaacaaggccgucaacgcccugaucaacgaccagcuggugaugaagaaccaccuccgcgacaucaugggcauccccuacugcaacuacagccgguacugcuaccugaaccacaccacgaccggccgcaccucccugcccaagugcugccucgugagcaacggguccuaccugaacgagacccacuucagcgacgacaucgagcagcaggccgacaacaugaucacggagaugcugcagaaggaguacauggagcggcagggcaagaccccgcuggggcucgucgaccuguucguguucuccaccagcuucuaccugaucuccaucuuccuccaccuggugaagauccccacccaccgccacaucgucggcaagagcugccccaagccccaccggcugaaccacauggggaucugcuccugcggccucuacaagcagccgggcgugcccgugaaguggaagcgcugaggacuagucccuguucccagagcccacuuuuuuuucuuuuuuugaaauaaaauagccugucuuucagaucucaaaggcucuuuucagagccaccaaaaaaaaaaaaaaaaaaaaaaaaaaaaaaaaaaaaaaaaaaaaaaaaaaaaaaaaaaaaaaaaagaauu

SEQ ID NO: 33343 - RNA, 1717 nt, Artificial Sequence
  mRNA product Design a-1 (hSL-A64-N5) comprising derived and/or modified sequence from LASV(G733-SLE-2010;Clade IV)__AIT17154__GPCmut8 (opt1)
aggagagucccgcagucggcguccagcggcucugcuuguucgugugugugucguugcaggccuuauucaagcuuaccaugggccagaucgugaccuucuuccaggaggucccccacgugaucgaggaggugaugaacaucguccugaucgcccucagcauccuggccgugcugaaggggcucuacaacuucgcgaccugcggcaucguggggcuggucuccuuccugcuccugugcggccgcagcugcacgaccucccuguacaaggggguguacgagcuccagacccuggagcugaacauggagacccucaacaugugcaugccgcugagcugcacgaagaacaacucccaccacuacaucauggugggcaacgagaccggccuggagcucacccugaccaacacgagcaucaucaaccacaaguucugcaaccuguccgacgcccacaagaagaaccucuacgaccacgcccugaugagcaucaucuccaccuuccaccugagcauccccaacuucaaccaguacgaggccauguccugcgacuucaacgggggcaagaucagcguccaguacaaccucucccacagcuacgccggggacgcggccaaccacugcggcaccaucgccaacggggugcugcagaccuucaugcggauggccuggggcggcuccuacaucgcgcuggacagcgggcgcgaccggugggacugcaucaugacguccuaccaguaccucaucauccagaacaccaccugggaggaccacugccaguucagccgccccucccccaucggcuaccuggggcugcucagccagcggacccgcgacaucuacaucagccggcgccugcugggcacguucaccuggacccucuccgacagcgagggcaaggacacccccgggggcuacugccugacgcgguggaugcugaucgaggccgagcucaagugcuucgggaacaccgccguggccaagugcaacgagaagcacgacgaggaguucugcgacaugcugcgccuguucgacuucugcaagcaggccauccagcggcucaaggcgccggcccagauguccauccagcugaucaacaaggccgucaacgcccugaucaacgaccagcucaucaugaagaaccaccuccgcgacaucaugggcauccccuacugcaacuacagcaaguacugcuaccugaaccacaccaccacggggaagaccucccugcccaagugcugccuggugagcaacggcuccuaccugaacgagacccacuucagcgacgacaucgagcagcaggccgacaacaugaucaccgagaugcuccagaaggaguacauggagcggcagggcaagacgccgcuggggcugguggaccuguucgucuucuccaccagcuucuaccucaucuccaucuuccugcaccuggugaagauccccacccaccgccacguggucggcaagagcugccccaagccccaccggcucaaccacauggggaucugcuccugcggccuguacgggcagccgggcgugcccgugaaguggaagcgcugaggacuagucccuguucccagagcccacuuuuuuuucuuuuuuugaaauaaaauagccugucuuucagaucucaaaggcucuuuucagagccaccaaaaaaaaaaaaaaaaaaaaaaaaaaaaaaaaaaaaaaaaaaaaaaaaaaaaaaaaaaaaaaaaagaauu

SEQ ID NO: 33344 - RNA, 1717 nt, Artificial Sequence
  mRNA product Design a-1 (hSL-A64-N5) comprising derived and/or modified sequence from MOPV/LASV reassortant(IGS-1;Clade IV)__AFY05576__GPCmut8 (opt1)
aggagagucccgcagucggcguccagcggcucugcuuguucgugugugugucguugcaggccuuauucaagcuuaccaugggccagaucgugaccuucuuccaggaggucccccacgugaucgaggaggugaugaacaucguccugaucgcccucagcgugcuggccgugcugaaggggcucuacaacuucgcgaccugcggccuggucgggcuggugacguuccuccugcugugcggccgcuccugcaccaccagccucuacaaggggguguacgagcugcagacccuggagcucaacauggagacgcugaacaugugcaugccgcuguccugcaccaagaacaacagccaccacuacaucauggucggcaacgagaccggccucgagcugacccugacgaacaccuccaucaucaaccacaaguucugcaaccucagcgacgcccacaagaagaaccuguacgaccacgcccugauguccaucaucagcaccuuccaccucuccauccccaacuucaaccaguacgaggccaugagcugcgacuucaacgggggcaagaucuccgugcaguacaaccugagccacuccuacgccggggacgcggccaaccacugcggcaccguggccaacgggguccugcagacguucaugcggauggccuggggcggcagcuacaucgcgcucgacuccgggcgcggcaacugggacugcaucaugaccagcuaccaguaccugaucauccagaacaccaccugggaggaccacugccaguucucccggcccagccccaucggguaccugggccuccugucccagcgcacgcgggacaucuacaucagccgccggcugcucggcaccuucaccuggacccugagcgacuccgagggggaggacacgccgggcggguacugccugacccgcuggaugcucaucgaggccgagcugaagugcuucggcaacaccgccguggccaagugcaacgagaagcacgacgaggaguucugcgacaugcugcggcuguucgacuucugcaagcaggccauccagcgccugaaggcgcccgcccagaugagcauccagcugaucaacaaggccgugaacgcccucaucaacgaccagcugaucaugaagaaccaccuccgggacaucauggggauccccuacugcaacuacuccaaguacugcuaccucaaccacaccacgaccggccgcaccagccugcccaagugcugccuggucuccaacggcagcuaccucaacgagacccacuucuccgacgacaucgagcagcaggccgacaacaugaucacggagaugcugcagaaggaguacauggagcggcaggggaagaccccgcugggccugguggaccucuucguguucagcaccuccuucuaccugaucagcaucuuccugcaccucgucaagauccccacccaccgccacaucguggggaaguccugccccaagccccaccggcugaaccacaugggcaucugcagcugcgggcuguacaagcagccgggcgugcccgucaaguggaagcgcugaggacuagucccuguucccagagcccacuuuuuuuucuuuuuuugaaauaaaauagccugucuuucagaucucaaaggcucuuuucagagccaccaaaaaaaaaaaaaaaaaaaaaaaaaaaaaaaaaaaaaaaaaaaaaaaaaaaaaaaaaaaaaaaaagaauu

SEQ ID NO: 33345 - RNA, 1717 nt, Artificial Sequence
  mRNA product Design a-1 (hSL-A64-N5) comprising derived and/or modified sequence from LASV(LM765-SLE-2012;Clade IV)__AIT17814__GPCmut8 (opt1)
aggagagucccgcagucggcguccagcggcucugcuuguucgugugugugucguugcaggccuuauucaagcuuaccaugggccagaucgugaccuucuuccaggaggucccccacgugaucgaggaggugaugaacaucguccugaucgcccucagcauccuggccgugcugaaggggcucuacaacuucgcgaccugcggccugguggggcuggucacguuccuccugcugugcggccgcuccugcaccaccagccucuacaaggggguguacgagcugcagacccuggagcucaacauggagacgcugaacaugugcaugccgcuguccugcaccaagaacaacagccaccacuacaucauggugggcaacgagaccggccucgagcugacccugacgaacaccuccaucaucgaccacaaguucugcaaccucagcgacgcccaccggaagaaccuguacgaccacgcccugauguccaucaucagcaccuuccaccucuccauccccaacuucaaccaguacgaggccaugagcugcgacuucaacgggggcaagaucuccguccaguacaaccugagccacuccuacgccaaggacgcggccgaccacugcgggaccguggccaacggcgugcugcagacguucaugcgcauggccuggggcgggagcuacaucgcgcucgacuccggccgggggcgcugggacugcaucaugaccagcuaccaguaccugaucauccagaacaccaccugggaggaccacugccaguucucccggcccagccccaucggcuaccuggggcuccugucccagcgcacgcgggacaucuacaucagccgccggcugcucggcaccuucaccuggacccugagcgacuccgagggcaaggacacgcccgggggcuacugccugacccgcuggaugcucaucgaggccgagcugaagugcuucgggaacaccgccgucgccaagugcaacgagaagcacgacgaggaguucugcgacaugcugcggcuguucgacuucugcaagcaggccauccagcgccugaaggcgccggcccagaugagcauccagcugaucaacaaggccgugaacgcccucaucaacgaccagcugaucaugaagaaccaccuccgggacaucaugggcauccccuacugcaacuacuccaaguacugcuaccucaaccacaccacgaccgggaagaccagccugcccaagugcugccugguguccaacggcagcuaccucaacgagacccacuucuccgacgacaucgagcagcaggccgacaacaugaucacggagaugcugcagaaggaguacauggagcgccagggcaagaccccgcuggggcuggucgaccucuucguguucagcaccuccuucuaccugaucagcaucuuccugcaccucgugaagauccccacccaccggcacaucgucggcaagcccugccccaagccgcaccgccugaaccacauggggaucugcuccugcggccuguacaagcagcccggggugcccgugaaguggaagcggugaggacuagucccuguucccagagcccacuuuuuuuucuuuuuuugaaauaaaauagccugucuuucagaucucaaaggcucuuuucagagccaccaaaaaaaaaaaaaaaaaaaaaaaaaaaaaaaaaaaaaaaaaaaaaaaaaaaaaaaaaaaaaaaaagaauu

SEQ ID NO: 33346 - RNA, 1717 nt, Artificial Sequence
  mRNA product Design a-1 (hSL-A64-N5) comprising derived and/or modified sequence from LASV(LM776-SLE-2012;Clade IV)__AIT17824__GPCmut8 (opt1)
aggagagucccgcagucggcguccagcggcucugcuuguucgugugugugucguugcaggccuuauucaagcuuaccaugggccagaucgugaccuucuuccaggaggucccccacgugaucgaggaggugaugaacaucguccugaucgcccucagcauccuggccgugcugaaggggcucuacaacuucgcgaccugcggccugguggggcuggucacguuccuccugcugugcggccgcuccugcaccaccagcguguacaaggggguguacgagcuccagacccuggagcugaacauggagacgcucaacaugugcaugccgcuguccugcaccaagaacaacagccaccacuacaucauggucggcaacgagaccggccuggagcucacccugacgaacaccuccaucaucaaccacaaguucugcaaccugagcgacgcccacaagaagaaccucuacgaccacgcccugauguccaucaucagcaccuuccaccuguccauccccaacuucaaccaguacgaggccaugagcugcgacuucaacgggggcaagaucuccgugcaguacaaccucagccacuccuacgccggggacgcggccaaccacugcggcaccguggccaacgggguccugcagacguucaugcggauggccuggggcggcagcuacaucgcgcuggacuccgggcacggcaagugggacugcaucaugaccagcuaccaguaccucaucauccagaacaccaccugggaggaccacugccaguucucccgccccagccccaucggguaccugggccugcucucccagcggacgcgcgacaucuacaucagccggcgccugcugggcaccuucaccuggacccucagcgacuccgaggggaaggacacgccgggcggguacugccugacccgguggaugcugaucgaggccgagcucaagugcuucggcaacaccgccguggccaagugcaacgagaagcacgacgaggaguucugcgacaugcugcgccuguucgacuucugcaagcaggccauccagcggcucaaggcgcccgcccagaugagcauccagcugaucaacaaggccgugaacgcccugaucaacgaccagcucaucaugaagaaccaccuccgcgacaucauggggauccccuacugcaacuacuccaaguacugcuaccugaaccacaccacgaccggcaagaccagccugcccaagugcugccuggucuccaacggcagcuaccugaacgagacccacuucuccgacgacaucgagcagcaggccgacaacaugaucacggagaugcuccagaaggaguacauggagcggcaggggaagaccccgcugggccugguggaccuguucguguucagcaccuccuucuaccucaucagcaucuuccugcaccuggucaagauccccacccaccgccacaucguggggaaguccugccccaagccccaccggcucaaccacaugggcaucugcagcugcgggcuguacaagcagccgggcgugcccguccgcuggaagcggugaggacuagucccuguucccagagcccacuuuuuuuucuuuuuuugaaauaaaauagccugucuuucagaucucaaaggcucuuuucagagccaccaaaaaaaaaaaaaaaaaaaaaaaaaaaaaaaaaaaaaaaaaaaaaaaaaaaaaaaaaaaaaaaaagaauu

SEQ ID NO: 33347 - RNA, 1717 nt, Artificial Sequence
  mRNA product Design a-1 (hSL-A64-N5) comprising derived and/or modified sequence from LASV(Mad39;Clade IV)__ANH09722__GPCmut8 (opt1)
aggagagucccgcagucggcguccagcggcucugcuuguucgugugugugucguugcaggccuuauucaagcuuaccaugggccagaucgugaccuucuuccaggaggucccccacgugaucgaggaggugaugaacaucguccugaucgcccucagcauccuggccgugcugaaggggcucuacaacguggcgaccugcggccugaucgggcuggucacguuccuccugcugugcggccgcuccugcaccaccacccucuacaaggggguguacgagcugcaggcccuggagcucaacauggagacgcugaacaugugcaugccgcugagcugcaccaagaacaacucccaccacuacauccgggugggcaacgagaccggccucgagcugacccugacgaacaccagccucaucaaccacaaguucugcaaccuguccgacgcccacaagaagaaccuguacgaccacgcccucaugagcaucaucuccaccuuccaccugagcauccccaacuucaaccaguacgaggccauguccugcgacuucaacgacgggaagaucagcguccaguacaaccugucccacaccuacgcgggcgacacggccaaccacugcgggaccguggccaacggcgugcuccagaccuucaugcgcauggccuggggcgggagcuacaucgcgcuggacuccggccgcgggggcugggacugcaucaugaccagcuaccaguaccugaucauccagaacacgaccugggaggaccacugccaguucucccggcccagccccaucggguaccucggccugcugucccagcggacccgcgacaucuacaucagccggcgccuccugggcaccuucacguggacccuguccgacagcgaggggaaggacaccccgggcggguacugccucacccgguggaugcugaucgaggccgagcugaagugcuucggcaacacggccgucgccaagugcaacgagaagcacgacgaggaguucugcgacaugcuccgccuguucgacuucugcaagcaggccauccagcggcugaaggcgcccgcccagaugagcauccagcucaucaacaaggccgugaacgcccugaucaacgaccagcugaucaugaagaaccaccuccgcgacaucauggggauccccuacugcaacuacuccaaguacugcuaccugaaccacaccgugaccggcaagaccagccugcccaagugcugccucgucuccaacggcagcuaccugaacgagacgcacuucuccgacgacaucgagcagcaggccgacaacaugaucaccgagaugcugcagaaggaguacauggagcggcaggggaagaccccgcugggccucguggaccuguucguguucagcaccuccuucuaccugaucagcaucuuccuccaccuggucaagauccccacgcaccgccacgugguggggaagcccugccccaagccgcaccggcugaaccacaugggcaucugcuccugcggguucuacaagcagcccggcguccccgugcgcuggaagcggugaggacuagucccuguucccagagcccacuuuuuuuucuuuuuuugaaauaaaauagccugucuuucagaucucaaaggcucuuuucagagccaccaaaaaaaaaaaaaaaaaaaaaaaaaaaaaaaaaaaaaaaaaaaaaaaaaaaaaaaaaaaaaaaaagaauu

SEQ ID NO: 33348 - RNA, 1717 nt, Artificial Sequence
  mRNA product Design a-1 (hSL-A64-N5) comprising derived and/or modified sequence from LASV(Z0947-SLE-2011;Clade IV)__AIT17840__GPCmut8 (opt1)
aggagagucccgcagucggcguccagcggcucugcuuguucgugugugugucguugcaggccuuauucaagcuuaccaugggccagaucgugaccuucuuccaggaggucccccacgugaucgaggaggugaugaacaucguccugaucgcccucagcauccuggccgugcugaaggggcucuacaacuucgcgaccugcggccugguggggcuggucacguuccuccugcugugcggccgcuccugcaccaucagccucuacaaggggguguacgagcugcagacccuggagcucaacauggagacccugaacaugugcaugccgcuguccugcacgaagaacaacagccaccacuacaucauggugggcaacgagaccggccucgagcugacccugaccaacacguccaucaucaaccacaaguucugcaaccucagcgacgcccacaagaagaaccuguacgaccacgcccugauguccaucaucagcaccuuccaccucuccauccccaacuucaaccaguacgaggccaugagcugcgacuucaacgggggcaagaucuccguccaguacaaccugagccacuccuacgccggggacgcggccaaccacugcggcaccguggccaacggggugcugcagaccuucaugcggauggccuggggcggcagcuacaucgcgcucgacuccgggcgcgaccggugggacugcaucaugacgagcuaccaguaccugaucauccagaacaccaccugggaggaccacugccaguucucccgccccagccccaucggcuaccuggggcuccugucccagcggacccgcgacaucuacaucagccggcgccugcucggcacguucaccuggacccugagcgacuccgagggcaaggacacccccgggggcuacugccugacgcgguggaugcucaucgaggccgagcugaagugcuucgggaacaccgccgucgccaagugcaacgagaagcacgacgaggaguucugcgacaugcugcgccucuucgacuucugcaagcaggccauccagcggcugaaggcgccggcccagaugagcauccagcugaucaacaaggccgugaacgcccucaucaacgaccagcugaucaugaagaaccaccuccgcgacaucaugggcauccccuacugcaacuacuccaaguacugcuaccugaaccacaccaccacggggaagaccagccugcccaagugcugccugguguccaacggcagcuaccucaacgagacccacuucuccgacgacaucgagcagcaggccgacaacaugaucaccgagaugcugcagaaggaguacauggagcggcagggcaagacgccgcuggggcuggucgaccucuucguguucagcaccuccuucuaccugaucagcaucuuccugcaccucgugaagauccccacccaccgccacaucgucggcaagcccugccccaagccgcaccggcugaaccacauggggaucugcuccugcggccuguacaagcagcccggggugcccgugaaguggaagcgcugaggacuagucccuguucccagagcccacuuuuuuuucuuuuuuugaaauaaaauagccugucuuucagaucucaaaggcucuuuucagagccaccaaaaaaaaaaaaaaaaaaaaaaaaaaaaaaaaaaaaaaaaaaaaaaaaaaaaaaaaaaaaaaaaagaauu

SEQ ID NO: 33349 - RNA, 1717 nt, Artificial Sequence
  mRNA product Design a-1 (hSL-A64-N5) comprising derived and/or modified sequence from LASV(Josiah;Clade IV)__NP_694870__GPCmut8 (opt4)
aggagagucccgcagucggcguccagcggcucugcuuguucgugugugugucguugcaggccuuauucaagcuuaccaugggccagaucgugaccuucuuccaggaggugccccacgugaucgaggaggugaugaacaucgugcugaucgcccugagcgugcuggccgugcugaagggccuguacaacuucgccaccugcggccuggugggccuggugaccuuccugcugcugugcggcagaagcugcaccaccagccuguacaagggcguguacgagcugcagacccuggagcugaacauggagacccugaacaugugcaugccccugagcugcaccaagaacaacagccaccacuacaucauggugggcaacgagaccggccuggagcugacccugaccaacaccagcaucaucaaccacaaguucugcaaccugagcgacgcccacaagaagaaccuguacgaccacgcccugaugagcaucaucagcaccuuccaccugagcauccccaacuucaaccaguacgaggccaugagcugcgacuucaacggcggcaagaucagcgugcaguacaaccugagccacagcuacgccggcgacgccgccaaccacugcggcaccguggccaacggcgugcugcagaccuucaugagaauggccuggggcggcagcuacaucgcccuggacagcggcagaggcaacugggacugcaucaugaccagcuaccaguaccugaucauccagaacaccaccugggaggaccacugccaguucagcagacccagccccaucggcuaccugggccugcugagccagagaaccagagacaucuacaucagcagaagacugcugggcaccuucaccuggacccugagcgacagcgagggcaaggacacccccggcggcuacugccugaccagauggaugcugaucgaggccgagcugaagugcuucggcaacaccgccguggccaagugcaacgagaagcacgacgaggaguucugcgacaugcugagacuguucgacuucugcaagcaggccauccagagacugaaggcccccgcccagaugagcauccagcugaucaacaaggccgugaacgcccugaucaacgaccagcugaucaugaagaaccaccugagagacaucaugggcauccccuacugcaacuacagcaaguacugcuaccugaaccacaccaccaccggcagaaccagccugcccaagugcugccuggugagcaacggcagcuaccugaacgagacccacuucagcgacgacaucgagcagcaggccgacaacaugaucaccgagaugcugcagaaggaguacauggagagacagggcaagaccccccugggccugguggaccuguucguguucagcaccagcuucuaccugaucagcaucuuccugcaccuggugaagauccccacccacagacacaucgugggcaagagcugccccaagccccacagacugaaccacaugggcaucugcagcugcggccuguacaagcagcccggcgugcccgugaaguggaagagaugaggacuagucccuguucccagagcccacuuuuuuuucuuuuuuugaaauaaaauagccugucuuucagaucucaaaggcucuuuucagagccaccaaaaaaaaaaaaaaaaaaaaaaaaaaaaaaaaaaaaaaaaaaaaaaaaaaaaaaaaaaaaaaaaagaauu

SEQ ID NO: 33350 - RNA, 1714 nt, Artificial Sequence
  mRNA product Design a-1 (hSL-A64-N5) comprising derived and/or modified sequence from LASV(LP;Clade I)__AAF86701__GPCmut8 (opt4)
aggagagucccgcagucggcguccagcggcucugcuuguucgugugugugucguugcaggccuuauucaagcuuaccaugggccagaucaucaccuucuuccaggaggugccccacgugaucgaggaggugaugaacaucgugcugaucgcccugagccugcuggccauccugaagggccuguacaacaucgccaccugcggcaucaucggccugguggccuuccuguuccugugcggcaagagcugcagccugacccugaagggcggcuacgagcugcagacccuggagcugaacauggagacccugaacaugugcaugccccugagcugcaccaagaacagcagccaccacuacaucagagugggcaacgagaccggccuggagcugacccugaccaacaccagcaucaucaaccacaaguucugcaaccugagcgacgcccacaagaagaaccuguacgaccacgcccugaugagcaucaucagcaccuuccaccugagcauccccaacuucaaccaguacgaggccaugagcugcgacuucaacggcggcaagaucagcgugcaguacaaccugagccacagcuacgccggcgacgccgccgagcacugcggcaccguggccaacggcgugcugcagaccuucaugagaauggccuggggcggcagauacaucgcccuggacagcggcaagggcaacugggacugcaucaugaccagcuaccaguaccugaucauccagaacaccaccugggaggaccacugccaguucagcagacccagccccaucggcuaccugggccugcugagccagagaaccagagacaucuacaucagcagaagacugcugggcaccuucaccuggacccugagcgacagcgagggcaacgagacccccggcggcuacugccugaccagauggaugcugaucgaggccgagcugaagugcuucggcaacaccgccguggccaagugcaacgagaagcacgacgaggaguucugcgacaugcugagacuguucgacuucugcaagcaggccaucagaagacugaaggcccccgcccagaugagcauccagcugaucaacaaggccgugaacgcccugaucaacgaccagcugaucaugaagaaccaccugagagacaucaugggcauccccuacugcaacuacagcaaguacugcuaccugaaccacaccagcagcggcagaaccagccugcccaagugcugccugaucagcaacggcagcuaccugaacgagacccaguucagcgacgacaucgagcagcaggccgacaacaugaucaccgagaugcugcagaaggaguacaucgagagacagggcaagaccccccugggccugguggacaucuucaucuucagcaccagcuucuaccugaucagcaucuuccugcaccugaucaagauccccacccacagacacaucgugggcaagcccugccccaagccccacagacugaaccacaugggcgugugcagcugcggccuguacaagcaccccggcgugcccaccaaguggaagagaugaggacuagucccuguucccagagcccacuuuuuuuucuuuuuuugaaauaaaauagccugucuuucagaucucaaaggcucuuuucagagccaccaaaaaaaaaaaaaaaaaaaaaaaaaaaaaaaaaaaaaaaaaaaaaaaaaaaaaaaaaaaaaaaaagaauu

SEQ ID NO: 33351 - RNA, 1714 nt, Artificial Sequence
  mRNA product Design a-1 (hSL-A64-N5) comprising derived and/or modified sequence from LASV(803213;Clade II)__AAF86703__GPCmut8 (opt4)
aggagagucccgcagucggcguccagcggcucugcuuguucgugugugugucguugcaggccuuauucaagcuuaccaugggccagaucaucaccuucuuccaggaggugccccacgugaucgaggaggugaugaacaucgugcugaucgcccugagccugcuggccauccugaagggcaucuacaacguggccaccugcggccuguucggccugaucagcuuccugcugcugugcggcagaagcugcagcgugaccuacaagggcguguacgagcugcagacccuggagcugaacauggccaaccugaacaugugcaugccccugagcugcaccaagaacaacagccaccacuacaucauggugggcaacgagaccggccuggagcugacccugaccaacaccagcaucaucaaccacaaguucugcaaccugagcgacgcccacaagaagaaccuguacgaccacgcccugaugagcaucaucagcaccuuccaccugagcauccccaacuucaaccaguacgaggccaugagcugcgacuucaacggcggcaagaucagcgugcaguacaaccugagccacagcuucgccguggacgccgccaaccacugcggcaccaucgccaacggcgugcugcagaccuucaugagaauggccuggggcggcagcuacaucgcccuggacagcggcaagggcaacugggacugcaucaugaccagcuaccaguaccugaucauccagaacaccaccugggaggaccacugccaguucagcagacccagccccaucggcuaccugggccugcugagccagagaaccagagacaucuacaucagcagaagacugcugggcaccuucaccuggacccugagcgacagcgagggcaacgaggcccccggcggcuacugccugaccagauggaugcugaucgaggccgagcugaagugcuucggcaacaccgccguggccaagugcaacgagaagcacgacgaggaguucugcgacaugcugagacuguucgacuucugcaagcaggccaucaagagacugaagacccccgcccagaugagcauccagcugaucaacaaggccgugaacgcccugaucaacgaccagcugaucaugaagaaccaccugagagacaucaugggcauccccuacugcaacuacagcagauacugcuaccugaaccacaccgugaccggcaagaccagccugcccagaugcugccuggugagcaacggcagcuaccugaacgagacccacuucagcgacgacaucgagcagcaggccgacaacaugaucaccgagaugcugcagaaggaguacauggacagacagggcaagaccccccugggccugguggaccuguucguguucagcaccagcuucuaccugaucagcaucuuccugcaccuggugaagauccccacccacagacacaucgugggcaagcccugccccaagccccacagacugaaccacaugggcaucugcagcugcggccuguacaagcaccccggcgugcccgugaaguggaagagaugaggacuagucccuguucccagagcccacuuuuuuuucuuuuuuugaaauaaaauagccugucuuucagaucucaaaggcucuuuucagagccaccaaaaaaaaaaaaaaaaaaaaaaaaaaaaaaaaaaaaaaaaaaaaaaaaaaaaaaaaaaaaaaaaagaauu

SEQ ID NO: 33352 - RNA, 1714 nt, Artificial Sequence
  mRNA product Design a-1 (hSL-A64-N5) comprising derived and/or modified sequence from LASV(GA391;Clade III)__CAA36645__GPCmut8 (opt4)
aggagagucccgcagucggcguccagcggcucugcuuguucgugugugugucguugcaggccuuauucaagcuuaccaugggccagaucgugaccuucuuccaggaggugccccacgugaucgaggaggugaugaacaucgugcugaucgcccugagcauccuggccauccugaagggccuguacaacguggccaccugcggccugaucggccuggugaccuuccugcugcugagcggcagaagcugcagccugaucuacaagggcaccuacgagcugcagacccuggagcugaacauggagacccugaacaugugcaugccccugagcugcaccaagaacaacagccaccacuacaucagagugggcaacgagaccggccuggagcugacccugaccaacaccagcauccugaaccacaaguucugcaaccugagcgacgcccacaagagaaaccuguacgaccacagccugaugagcaucaucagcaccuuccaccugagcauccccaacuucaaccaguacgaggccaugagcugcgacuucaacggcggcaagaucaccgugcaguacaaccugagccacagcuucgccguggacgccgccggccacugcggcacccuggccaacggcgugcugcagaccuucaugagaauggccuggggcggcagcuacaucgcccuggacagcggcagaggcaacugggacugcaucaugaccagcuaccaguaccugaucauccagaacaccaccugggacgaccacugccaguucagcagacccagccccaucggcuaccugggccugcugagccagagaaccagagacaucuacaucagcagaagacugcugggcaccuucaccuggacccugagcgacagcgagggcaacgagacccccggcggcuacugccugaccagauggaugcugaucgaggccgagcugaagugcuucggcaacaccgccguggccaagugcaacgagaagcacgacgaggaguucugcgacaugcugagacuguucgacuucugcaagcaggccaucagaagacugaagacccccgcccagaugagcauccagcugaucaacaaggccgugaacgcccugaucaacgaccagcugaucaugaagaaccaccugagagacaucaugggcauccccuacugcaacuacagcagauacugcuaccugaaccacaccagcaccggcaagaccagccugcccagaugcugccugaucagcaacggcagcuaccugaacgagaccaaguucagcgacgacaucgagcagcaggccgacaacaugaucaccgagaugcugcagaaggaguacaucgacagacagggcaagaccccccugggccugguggaccuguucguguucagcaccagcuucuaccugaucagcaucuuccugcaccuggugaagauccccacccacagacacaucgugggcaagcccugccccaagccccacagacugaaccacaugggcaucugcagcugcggccuguacaagcagcccggcgugcccgugagauggaagagaugaggacuagucccuguucccagagcccacuuuuuuuucuuuuuuugaaauaaaauagccugucuuucagaucucaaaggcucuuuucagagccaccaaaaaaaaaaaaaaaaaaaaaaaaaaaaaaaaaaaaaaaaaaaaaaaaaaaaaaaaaaaaaaaaagaauu

SEQ ID NO: 33353 - RNA, 1717 nt, Artificial Sequence
  mRNA product Design a-1 (hSL-A64-N5) comprising derived and/or modified sequence from LASV(AV;Clade V)__CCA30314__GPCmut8 (opt4)
aggagagucccgcagucggcguccagcggcucugcuuguucgugugugugucguugcaggccuuauucaagcuuaccaugggccagaucgugaccuucuuccaggaggugccccacgugaucgaggaggugaugaacaucgugcugaucgcccugagcauccuggccgugcugaagggccuguacaacaucgccaccugcggccugaucggccugaucaccuuccugcugcugugcggcagaagcugcagcagcaaccuguacaagggcguguacgagcugcagagccuggaccugaacauggagacccugaacaugugcaugccccugagcugcaccaagaacaacagccaccacuacaucagagugggcaacgacaccggccuggagcugacccugaccaacaccagcauccugaaccacaaguucugcaaccugagcgacgcccacaagaaggaccuguacgaccacgcccugaugagcaucaucagcaccuuccaccugagcauccccaacuucaaccaguacgaggccaugagcugcgacuucaacggcggcaagaucagcgugcaguacaaccugagccacagcuacgccaucgacgccgccaaccacugcggcaccguggccaacggcauccugcagaccuucaugagaauggccuggggcggcagcuacaucgcccuggacagcggcagaggcaacugggacugcaucaugaccagcuaccaguaccugaucauccagaacaccaccugggagaaccacugccaguucagcagacccagccccaucggcuaccugggccugcugagccagagaaccagagacaucuacaucagcagaagacugcugggcaccuucaccuggacccugagcgacagcgagggcaacgccacccccggcggcuacugccugaccagauggaugcugaucgaggccgagcugaagugcuucggcaacaccgccguggccaagugcaacgagaagcacgacgaggaguucugcgacaugcugagacuguucgacuucugcaagcaggccaucagcagacugaagagccccgcccagaugagcauccagcugaucaacaaggccgugaacgcccugaucaacgaccagcugaucaugaagaaccaccugagagacaucaugggcauccccuacugcaacuacagcaaguacugcuaccugaaccacaccaucaccggcaagaccagccugcccaagugcugccuggugagcaacggcagcuaccugaacgagacccacuucagcgacgacaucgagcagcaggccgacaacaugaucaccgagaugcugcagaaggaguacauggagagacagggcaagaccccccugggccugguggaccuguucguguucagcaccagcuucuaccugaucagcaucuuccugagacuggugaagauccccacccacagacacaucgugggcaagcccugccccaagccccacagacugaaccacaugggcaucugcagcugcggccuguacaagcagcccggcgugcccgugagauggaagagaugaggacuagucccuguucccagagcccacuuuuuuuucuuuuuuugaaauaaaauagccugucuuucagaucucaaaggcucuuuucagagccaccaaaaaaaaaaaaaaaaaaaaaaaaaaaaaaaaaaaaaaaaaaaaaaaaaaaaaaaaaaaaaaaaagaauu

SEQ ID NO: 33354 - RNA, 1714 nt, Artificial Sequence
  mRNA product Design a-1 (hSL-A64-N5) comprising derived and/or modified sequence from LASV(Togo/2016/7082;Clade VI)__AMR44577__GPCmut8 (opt4)
aggagagucccgcagucggcguccagcggcucugcuuguucgugugugugucguugcaggccuuauucaagcuuaccaugggccagaucaucaccuucuuccaggaggugccccacgugaucgaggaggugaugaacaucgugcugaucgcccugagccugcuggccauccugaagggcguguacaacguggccaccugcggcaucaucggccuggugaccuuccuguuccugugcggcagaagcugcagccugaucuacaagggcagcuacgagcugcagacccuggagcugaacauggagacccugaacaugugcaugccccugagcugcaccaagaacagcagccaccacuacaucagagugggcaacgagaccggccuggagcugacccugaccaacaccagcaucaucaaccacaaguucugcaaccugagcgacgcccacaagagaaaccuguacgaccacgcccugaugagcauccugagcaccuuccaccugagcauccccaacuucaaccaguacgaggccaugagcugcgacuucaacggcggcaagaucagcgugcaguacaaccugagccacgccuacgccguggacgccgccgagcacugcggcaccguggccaacggcgugcugcagaccuucaugagaauggccuggggcggcagcuacaucgcccuggacagcggcagaggcaacugggacugcaucaugaccagcuaccaguaccugaucauccagaacaccaccugggaggaccacugccaguucagcagacccagccccaucggcuaccugggccugcugagccagagaaccagagacaucuacaucagcagaagacugcugggcaccuucaccuggacccugagcgacagcgagggcaacgagacccccggcggcuacugccugaccagauggaugcugaucgaggccgagcugaagugcuucggcaacaccgccguggccaagugcaacgagaagcacgacgaggaguucugcgacaugcugagacuguucgacuucugcaagcaggccauccagagacugaagagccccgcccagaugagcauccagcugaucaacaaggccgugaacgcccugaucaacgaccagcugaucaugaagaaccaccugagagacaugaugggcauccccuacugcaacuacagcaaguacugcuaccugaaccacaccagcagcggcagaaccagccugcccaagugcugccuggugagcaacggcagcuaccugaacgagacccacuucagcgacgacaucgagcagcaggccgacaacaugaucaccgagaugcugcagaaggaguacaucgacagacagggcaagaccccccugggccugguggaccuguucguguucagcaccagcuucuaccugaucagcaucuuccugcaccugaucaagauccccacccacagacacaucgugggcaagcccugccccaagccccacagacugaaccacaugggcaucugcagcugcggccuguacaagcagcccggcgugcccaccagauggaagagaugaggacuagucccuguucccagagcccacuuuuuuuucuuuuuuugaaauaaaauagccugucuuucagaucucaaaggcucuuuucagagccaccaaaaaaaaaaaaaaaaaaaaaaaaaaaaaaaaaaaaaaaaaaaaaaaaaaaaaaaaaaaaaaaaagaauu

SEQ ID NO: 33355 - RNA, 1714 nt, Artificial Sequence
  mRNA product Design a-1 (hSL-A64-N5) comprising derived and/or modified sequence from LASV(KAK-428;Clade n.d. (VII))__ANH09740__GPCmut8 (opt4)
aggagagucccgcagucggcguccagcggcucugcuuguucgugugugugucguugcaggccuuauucaagcuuaccaugggccagaucgugaccuucuuccaggaggugccccacgugaucgaggaggugaugaacaucgugcugaucgcccugagccugcuggccauccugaagggccuguacaacuucgccaccugcggcgugaucggccugaucaccuuccugcugcugugcggcagaagcugcagcgccaccuacaagggccaguacgagcugcagacccuggagcugaacauggagagccugaacaugugcaugccccugagcugcaccaagaacaacagccaccacuacaucagagccggcaacaacaccggccuggagcugacccugaccaacaccagcaucaucagccacaaguucugcaaccugagcgacgcccacaagaagaaccuguacgaccacacccugaugagcaucaucaccaccuuccaccugagcauccccaacuucaaccaguacgaggccaugagcugcgacuucaacggcggcaagaucagcauccaguacaaccugagccacagcuacgccggcgacgccgcccagcacugcggcaccguggccaacggcgugcugcagaccuucaugagaauggccuggggcggcagcuaccuggcccuggacagcggcagaagaggcugggacugcaucaucagcagcuaccaguaccugaucauccagaacaccaccugggacgaccacugccaguucagcagacccagccccaucggcuaccugggcuucgugagccagaagaccagagacaucuacaucagcagaagacugcugggcaccuucaccuggacccugagcgacagcgagggccacgacaugcccggcggcuacugccugaccagauggaugcugaucgaggccgaccugaagugcuucggcaacaccgccguggccaagugcaacgagaagcacgacgaggaguucugcgacauguggagacuguucgacuucugcaagcaggccauccagagacugaaggcccccgcccagaugaacauccagcugaucaacaaggccgugaacgcccugaucaacgaccagcugaugaugaagaaccaccugagagacaucaugggcauccccuacugcaacuacagcaaguucugcuaccugaacaacaccaccaccggcagaaccagccugcccagaugcugccugaucagcaacggcagcuaccugaacgagacccacuucagcgacgacaucgagcagcaggccgacaacaugaucaccgagaugcugcagaaggaguacauggacagacagggcaagaccccccugggccugguggaccuguucguguucagcaccagcuucuaccugaucaccaucuuccugcaccuggugaagauccccacccacagacacaucgugggcaagcccugccccaagccccacagacugaaccacaugggcaucugcagcugcggccuguacaagcagcccggcgugcccgugagauggaagagaugaggacuagucccuguucccagagcccacuuuuuuuucuuuuuuugaaauaaaauagccugucuuucagaucucaaaggcucuuuucagagccaccaaaaaaaaaaaaaaaaaaaaaaaaaaaaaaaaaaaaaaaaaaaaaaaaaaaaaaaaaaaaaaaaagaauu

SEQ ID NO: 33356 - RNA, 1714 nt, Artificial Sequence; identical to SEQ ID NO: 33350
  mRNA product Design a-1 (hSL-A64-N5) comprising derived and/or modified sequence from LASV(Pinneo-NIG-1969;Clade I)__AIT17836__GPCmut8 (opt4)

SEQ ID NO: 33357 - RNA, 1714 nt, Artificial Sequence
  mRNA product Design a-1 (hSL-A64-N5) comprising derived and/or modified sequence from LASV(ISTH0009-NIG-2011;Clade II)__AIT17404__GPCmut8 (opt4)
aggagagucccgcagucggcguccagcggcucugcuuguucgugugugugucguugcaggccuuauucaagcuuaccaugggccagaucaucaccuucuuccaggaggugccccacgugaucgaggaggugaugaacaucgugcugaucgcccugagccugcuggccauccugaagggcaucuacaacguggccaccugcggccuguucggccuggugagcuuccugcugcugugcggcagaagcugcagcaccaccuacaagggcguguacgagcugcagacccuggagcuggacauggccagccugaacaugugcaugccccugagcugcaccaagaacaacagccaccacuacaucauggugggcaacgagaccggccuggagcugacccugaccaacaccagcaucaucaaccacaaguucugcaaccugagcgacgcccacaagaagaaccuguacgaccacgcccugaugagcaucaucagcaccuuccaccugagcauccccaacuucaaccaguacgaggccaugagcugcgacuucaacggcggcaagaucagcgugcaguacaaccugagccacgccuacgccguggacgccgccaaccacugcggcaccaucgccaacggcgugcugcagaccuucaugagaauggccuggggcggcagcuacaucgcccuggacagcggcaagggcagcugggacugcaucaugaccagcuaccaguaccugaucauccagaacaccaccugggaggaccacugccaguucagcagacccagccccaucggcuaccugggccugcugagccagagaaccagagacaucuacaucagcagaagacugcugggcaccuucaccuggacccugagcgacagcgagggcaacgagacccccggcggcuacugccugaccagauggaugcugaucgaggccgagcugaagugcuucggcaacaccgccguggccaagugcaacgagaagcacgacgaggaguucugcgacaugcugagacuguucgacuucugcaagcaggccaucagaagacugaagacccccgcccagaugagcauccagcugaucaacaaggccgugaacgcccugaucaacgaccagcugaucaugaagaaccaccugagagacaucaugggcauccccuacugcaacuacagcaaguacugcuaccugaaccacaccgugaccggcaagaccagccugcccagaugcugccuggugagcaacggcagcuaccugaacgagacccacuucagcgacgacaucgagcagcaggccgacaacaugaucaccgagcugcugcagaaggaguacauggacagacagggcaagaccccccugggccugguggaccuguucguguucagcaccagcuucuaccugaucagcaucuuccugcaccugaucaagauccccacccacagacacaucaccggcaagcccugccccaagccccacagacugaaccacaugggcaucugcagcugcggccuguacaagcaccccggcgugcccgugaaguggaagagaugaggacuagucccuguucccagagcccacuuuuuuuucuuuuuuugaaauaaaauagccugucuuucagaucucaaaggcucuuuucagagccaccaaaaaaaaaaaaaaaaaaaaaaaaaaaaaaaaaaaaaaaaaaaaaaaaaaaaaaaaaaaaaaaaagaauu

SEQ ID NO: 33358 - RNA, 1714 nt, Artificial Sequence
  mRNA product Design a-1 (hSL-A64-N5) comprising derived and/or modified sequence from LASV(ISTH2010-NIG-2012;Clade II)__AIT17482__GPCmut8 (opt4)
aggagagucccgcagucggcguccagcggcucugcuuguucgugugugugucguugcaggccuuauucaagcuuaccaugggccagaucaucaccuucuuccaggaggugccccacgugaucgaggaggugaugaacaucgugcugaucgcccugagccugcuggccauccugaagggcaucuacaacguggccaccugcggccuguucggccuggugagcuuccugcugcugugcggcagaagcugcagcaccaccuacaagggcguguacgagcugcagacccuggagcuggacauggccagccugaacaugugcaugccccugagcugcaccaagaacaacagccaccacuacaucauggugggcaacgagaccggccuggagcugacccugaccaacaccagcaucaucaaccacaaguucugcaaccugagcgacgcccacaagaagaaccuguacgaccacgcccugaugagcaucaucagcaccuuccaccugagcauccccaacuucaaccaguacgaggccaugagcugcgacuucaacggcggcaagaucagcgugcaguacaaccugagccacgccuacgccguggacgccgccaaccacugcggcaccaucgccaacggcgugcugcagaccuucaugagaauggccuggggcggcagcuacaucgcccuggacagcggcaagggcagcugggacugcaucaugaccagcuaccaguaccugaucauccagaacaucaccugggaggaccacugccaguucagcagacccagccccaucggcuaccugggccugcugagccagagaaccagagacaucuacaucagcagaagacugcugggcaccuucaccuggacccugagcgacagcgagggcaacgagacccccggcggcuacugccugaccagauggaugcugaucgaggccgagcugaagugcuucggcaacaccgccguggccaagugcaacgagaagcacgacgaggaguucugcgacaugcugagacuguucgacuucugcaagcaggccaucagaagacugaagacccccgcccagaugagcauccagcugaucaacaaggccgugaacgcccugaucaacgaccagcugaucaugaagaaccaccugagagacaucaugggcauccccuacugcaacuacagcaaguacugcuaccugaaccacaccgugaccggcaagaccagccugcccagaugcugccuggugagcaacggcagcuaccugaacgagacccacuucagcgacgacaucgagcagcaggccgacaacaugaucaccgagcugcugcagaaggaguacaucgacagacagggcaagaccccccugggccugguggaccuguucguguucagcaccagcuucuaccugaucagcaucuuccugcaccuggugaagauccccacccacagacacguggugggcaagcccugccccaagccccacagacugaaccacaugggcaucugcagcugcggccuguacaagcaccccggcgugcccgugaaguggaagagaugaggacuagucccuguucccagagcccacuuuuuuuucuuuuuuugaaauaaaauagccugucuuucagaucucaaaggcucuuuucagagccaccaaaaaaaaaaaaaaaaaaaaaaaaaaaaaaaaaaaaaaaaaaaaaaaaaaaaaaaaaaaaaaaaagaauu

SEQ ID NO: 33359 - RNA, 1714 nt, Artificial Sequence
  mRNA product Design a-1 (hSL-A64-N5) comprising derived and/or modified sequence from LASV(Lassa virus/H.sapiens-wt/NGA/2015/ISTH_0543;Clade II)__AVO03639__GPCmut8 (opt4)
aggagagucccgcagucggcguccagcggcucugcuuguucgugugugugucguugcaggccuuauucaagcuuaccaugggccagaucaucaccuucuuccaggaggugccccacgugaucgaggaggugaugaacaucgugcugaucgcccugagccugcuggccauccugaagggcaucuacaacguggccaccugcggccuguucggccuggugagcuuccugcugcugugcggcagaagcugcagcaccaccuacaagggcguguacgagcugcagacccuggagcuggacauggccaaccugaacaugugcaugccccugagcugcaccaagaacaacagccaccacuacaucauggugggcaacgagaccggccuggagcugacccugaccaacaccagcaucaucaaccacaaguucugcaaccugagcgacgcccacaagaagaaccuguacgaccacgcccugaugagcaucaucagcaccuuccaccugagcauccccaacuucaaccaguacgaggccaugagcugcgacuucaacggcggcaagaucagcgugcaguacaaccugagccacaccuacgccguggacgccgccaaccacugcggcaccaucgccaacggcgugcugcagaccuucaugagaauggccuggggcggcagcuacaucgcccuggacagcggcaagggcagcugggacugcaucaugaccagcuaccaguaccuggugauccagaacaccaccugggaggaccacugccaguucagcagacccagccccaucggcuaccugggccugcugagccagagaaccagagacaucuacaucagcagaagacugcugggcaccuucaccuggacccugagcgacagcgagggcaacgagacccccggcggcuacugccugaccagauggaugcugaucgaggccgagcugaagugcuucggcaacaccgccguggccaagugcaacgagaagcacgacgaggaguucugcgacaugcugagacuguucgacuucugcaagcaggccaucagaagacugaagacccccgcccagaugagcauccagcugaucaacaaggccgugaacgcccugaucaacgaccagcugaucaugaagaaccaccugagagacaucaugggcauccccuacugcaacuacagcaaguacugcuaccugaaccacaccgugaccggcaagaccagccugcccagaugcugccuggugagcaacggcagcuaccugaacgagacccacuucagcgacgacaucgagcagcaggccgacaacaugaucaccgagcugcugcagaaggaguacaucgacagacagggcaagaccccccugggccugguggaccuguucguguucagcaccagcuucuaccugaucagcaucuuccugcaccuggugaagauccccacccacagacacaucaccggcaagcccugccccaagccccacagacugaaccacaugggcaucugcagcugcggccuguacaagcaccccggcgugcccgugaaguggaagagaugaggacuagucccuguucccagagcccacuuuuuuuucuuuuuuugaaauaaaauagccugucuuucagaucucaaaggcucuuuucagagccaccaaaaaaaaaaaaaaaaaaaaaaaaaaaaaaaaaaaaaaaaaaaaaaaaaaaaaaaaaaaaaaaaagaauu

SEQ ID NO: 33360 - RNA, 1714 nt, Artificial Sequence
  mRNA product Design a-1 (hSL-A64-N5) comprising derived and/or modified sequence from LASV(Lassa virus/H.sapiens-wt/NGA/2016/ISTH_0009;Clade II)__AVO03571__GPCmut8 (opt4)
aggagagucccgcagucggcguccagcggcucugcuuguucgugugugugucguugcaggccuuauucaagcuuaccaugggccagaucaucaccuucuuccaggaggugccccacgugaucgaggaggugaugaacaucgugcugaucgcccugagccugcuggccauccugaagggcaucuacaacguggccaccugcggccugcugggccuggugagcuuccugcugcugugcggcagaagcugcagcaccaccuacaagggcguguacgagcugcagacccuggagcuggacauggccagccugaacaugugcaugccccugagcugcaccaagaacaacagccaccacuacaucauggugggcaacgagaccggccuggagcugacccugaccaacaccagcaucaucaaccacaaguucugcaaccugagcgacgcccacaagaagaaccuguacgaccacgcccugaugagcaucaucagcaccuuccaccugagcauccccaacuucaaccaguacgaggccaugagcugcgacuucaacggcggcagaaucagcgugcaguacaaccugagccacagcuacgccguggacgccgccaaccacugcggcaccaucgccaacggcgugcugcagaccuucaugagaauggccuggggcggcagcuacaucgcccuggacagcggcaagggcagcugggacugcaucaugaccagcuaccaguaccugaucauccagaacaccaccugggaggaccacugccaguucagcagacccagccccaucggcuaccugggccugcugagccagagaaccagagacaucuacaucagcagaagacugcugggcaccuucaccuggacccugagcgacagcgagggcaacgagacccccggcggcuacugccugaccagauggaugcugaucgaggccgagcugaagugcuucggcaacaccgccguggccaagugcaacgagaagcacgacgaggaguucugcgacaugcugagacuguucgacuucugcaagcaggccaucagaagacugaagacccccgcccagaugagcauccagcugaucaacaaggccgugaacgcccugaucaacgaccagcugaucaugaagaaccaccugagagacaucaugggcauccccuacugcaacuacagcaaguacugcuaccugaaccacaccgugaccggcaagaccagccugcccagaugcugccuggugagcaacggcagcuaccugaacgagacccacuucagcgacgacaucgagcagcaggccgacaacaugaucaccgagcugcugcagaaggaguacaucgacagacagggcaagaccccccugggccugguggaccuguucguguucagcaccagcuucuaccugaucagcaucuuccugcaccuggugaagauccccacccacagacacaucaccggcaagcccugccccaagccccacagacugaaccacaugggcaucugcagcugcggccuguacaaccaccccggcgugcccgugaaguggaagagaugaggacuagucccuguucccagagcccacuuuuuuuucuuuuuuugaaauaaaauagccugucuuucagaucucaaaggcucuuuucagagccaccaaaaaaaaaaaaaaaaaaaaaaaaaaaaaaaaaaaaaaaaaaaaaaaaaaaaaaaaaaaaaaaaagaauu

SEQ ID NO: 33361 - RNA, 1714 nt, Artificial Sequence
  mRNA product Design a-1 (hSL-A64-N5) comprising derived and/or modified sequence from LASV(Lassa virus/H.sapiens-wt/NGA/2016/ISTH_0017;Clade II)__AVO03567__GPCmut8 (opt4)
aggagagucccgcagucggcguccagcggcucugcuuguucgugugugugucguugcaggccuuauucaagcuuaccaugggccagaucaucaccuucuuccaggaggugccccacgugaucgaggaggugaugaacaucgugcugaucgcccugagccugcuggccauccugaagggcaucuacaacguggccaccugcggccuguucggccuggugagcuuccugcugcugugcggcagaagcugcagcaccaccuacaagggcguguacgagcugcagacccuggagcuggacauggccagccugaacaugugcaugccccugagcugcaccaagaacaacagccaccacuacaucauggugggcaacgagaccggccuggagcugacccugaccaacaccagcaucaucaaccacaaguucugcaaccugagcgacgcccacaagaagaaccuguacgaccacgcccugaugagcaucaucagcaccuuccaccugagcauccccaacuucaaccaguacgaggccaugagcugcgacuucaacggcggcaagaucagcgugcaguacaaccugagccacaccuacgccaucgacgccgccaaccacugcggcaccaucgccaacggcgugcugcagaccuucaugagaauggccuggggcggcagcuacaucgcccuggacagcggcaagggcagcugggacugcaucaugaccagcuaccaguaccugaucauccagaacaccaccugggaggaccacugccaguucagcagacccagccccaucggcuaccugggccugcugagccagagaaccagagacaucuacaucagcagaagacugcugggcaccuucaccuggacccugagcgacagcgagggcaacgagacccccggcggcuacugccugaccagauggaugcugaucgaggccgagcugaagugcuucggcaacaccgccguggccaagugcaacgagaagcacgacgaggaguucugcgacaugcugagacuguucgacuucugcaagcaggccaucagaagacugaagacccccgcccagaugagcauccagcugaucaacaaggccgugaacgcccugaucaacgaccagcugaucaugaagaaccaccugagagacaucaugggcauccccuacugcaacuacagcaaguacugcuaccugaaccacaccgugaccggcaagaccagccugcccagaugcugccuggugagcaacggcagcuaccugaacgagacccacuucagcgacgacaucgagcagcaggccgacaacaugaucaccgagcugcugcagaaggaguacauggacagacagggcaagaccccccugggccugguggaccuguucguguucagcaccagcuucuaccugaucagcaucuuccugcaccuggugagaauccccacccacagacacgugaucggcaagcccugccccaagccccacagacugaaccacaugggcaucugcagcugcggccuguacaagcaccccggcgugcccgugaaguggaagagaugaggacuagucccuguucccagagcccacuuuuuuuucuuuuuuugaaauaaaauagccugucuuucagaucucaaaggcucuuuucagagccaccaaaaaaaaaaaaaaaaaaaaaaaaaaaaaaaaaaaaaaaaaaaaaaaaaaaaaaaaaaaaaaaaagaauu

SEQ ID NO: 33362 - RNA, 1714 nt, Artificial Sequence
  mRNA product Design a-1 (hSL-A64-N5) comprising derived and/or modified sequence from LASV(Lassa virus/H.sapiens-wt/NGA/2018/ISTH_0959;Clade II)__AVV65099__GPCmut8 (opt4)
aggagagucccgcagucggcguccagcggcucugcuuguucgugugugugucguugcaggccuuauucaagcuuaccaugggccagaucaucaccuucuuccaggaggugccccacgugaucgaggaggugaugaacaucgugcugaucgcccugagccugcuggccauccugaagggcaucuacaacguggugaccugcggccuguucggccuggugagcuuccugcugcugugcggcagaagcugcagcaccaccuacaagggcguguacgagcugcagacccuggagcuggacauggccagccugaacaugugcaugccccugagcugcaccaagaacaacagccaccacuacaucauggugggcaacgagaccggccuggagcugacccugaccaacaccagcaucaucaaccacaaguucugcaaccugagcgacgcccacaagaagaaccuguacgaccacgcccugaugagcaucaucagcaccuuccaccugagcauccccaacuucaaccaguacgaggccaugagcugcgacuucaacggcggcaagaucagcgugcaguacaaccugagccacgccuacgccaucgacgccgccaaccacugcggcaccaucgccaacggcgugcugcagaccuucaugagaauggccuggggcggcagcuacaucgcccuggacagcggcaagggcagcugggacugcaucaugaccagcuaccaguaccugaucauccagaacaccaccugggaggaccacugccaguucagcagacccagccccaucggcuaccugggccugcugagccagagaaccagagacaucuacaucagcagaagacugcugggcaccuucaccuggacccugagcgacagcgagggcaacgagacccccggcggcuacugccugaccagauggaugcugaucgaggccgagcugaagugcuucggcaacaccgccguggccaagugcaacgagaagcacgacgaggaguucugcgacaugcugagacuguucgacuucugcaagcaggccaucagaagacugaagacccccgcccagaugagcauccagcugaucaacaaggccgugaacgcccugaucaacgaccagcugaucaugaagaaccaccugagagacaucaugggcauccccuacugcaacuacagcaaguacugcuaccugaaccacaccgugaccggcaagaccagccugcccagaugcugccuggugagcaacggcagcuaccugaacgagacccacuucagcgacgacaucgagcagcaggccgacaacaugaucaccgagcugcugcagaaggaguacaucgacagacagggcaagaccccccugggccugguggaccuguucguguucagcaccagcuucuaccugaucagcaucuuccugcaccuggugaagauccccacccacagacacgugaucggcaagcccugccccaagccccacagacugaaccacaugggcaucugcagcugcggccuguacaagcaccccggcgugcccgugaaguggaagagaugaggacuagucccuguucccagagcccacuuuuuuuucuuuuuuugaaauaaaauagccugucuuucagaucucaaaggcucuuuucagagccaccaaaaaaaaaaaaaaaaaaaaaaaaaaaaaaaaaaaaaaaaaaaaaaaaaaaaaaaaaaaaaaaaagaauu

SEQ ID NO: 33363 - RNA, 1714 nt, Artificial Sequence
  mRNA product Design a-1 (hSL-A64-N5) comprising derived and/or modified sequence from LASV(LASV003-NIG-2008;Clade II)__AIT17580__GPCmut8 (opt4)
aggagagucccgcagucggcguccagcggcucugcuuguucgugugugugucguugcaggccuuauucaagcuuaccaugggccagaucaucaccuucuuccaggaggugccccacgugaucgaggaggugaugaacaucgugcugaucgcccugagccugcuggccauccugaagggcaucuacaacguggccaccugcggccuguucggccuggugagcuuccugcugcugugcggcagaagcugcagcaccaccuacaagggcguguacgagcugcagacccuggagcuggacauggccagccugaacaugugcaugccccugagcugcaccaagaacaacagccaccacuacaucauggugggcaacgagaccggccuggagcugacccugaccaacaccagcaucaucaaccacaaguucugcaaccugagcgacgcccacaagaagaaccuguacgaccacgcccugaugagcaucaucagcaccuuccaccugagcauccccaacuucaaccaguacgaggccaugagcugcgacuucaacggcggcaagaucagcgugcaguacaaccugagccacaccuacgccguggacgccgccaaccacugcggcaccaucgccaacggcgugcugcagaccuucaugagaauggccuggggcggcagcuacaucgcccuggacagcggcaagggcagcugggacugcaucaugaccagcuaccaguaccugaucauccagaacaccaccugggaggaccacugccaguucagcagacccagccccaucggcuaccugggccugcugagccagagaaccagagacaucuacaucagcagaagacugcugggcaccuucaccuggacccugagcgacagcgagagcaacgagacccccggcggcuacugccugaccagauggaugcugaucgaggccgagcugaagugcuucggcaacaccgccguggccaagugcaacgagaagcacgacgaggaguucugcgacaugcugagacuguucgacuucugcaagcaggccaucagaagacugaaggcccccgcccagaugagcauccagcugaucaacaaggccgugaacgcccugaucaacgaccagcugaucaugaagaaccaccugagagacaucaugggcauccccuacugcaacuacagcaaguacugcuaccugaaccacaccgugaccggcagaaccagccugcccagaugcugccuggugagcaacggcagcuaccugaacgagacccacuucagcgacgacaucgagcagcaggccgacaacaugaucaccgagcugcugcagaaggaguacauggacagacagggcaagaccccccugggccugguggaccuguucguguucagcaccagcuucuaccugaucagcaucuuccugcaccuggugaagauccccacccacagacacgugaucggcaagcccugccccaagccccacagacugaaccacaugggcaucugcagcugcggccuguacaagcaccccggcgugcccgugaaguggaagagaugaggacuagucccuguucccagagcccacuuuuuuuucuuuuuuugaaauaaaauagccugucuuucagaucucaaaggcucuuuucagagccaccaaaaaaaaaaaaaaaaaaaaaaaaaaaaaaaaaaaaaaaaaaaaaaaaaaaaaaaaaaaaaaaaagaauu

SEQ ID NO: 33364 - RNA, 1714 nt, Artificial Sequence
  mRNA product Design a-1 (hSL-A64-N5) comprising derived and/or modified sequence from LASV(LASV035-NIG-2009;Clade II)__AIT17588__GPCmut8 (opt4)
aggagagucccgcagucggcguccagcggcucugcuuguucgugugugugucguugcaggccuuauucaagcuuaccaugggccagaucaucaccuucuuccaggaggugccccacgugaucgaggaggugaugaacaucgugcugaucgcccugagccugcuggccauccugaagggcaucuacaacguggccaccugcggccuguucggccuggugagcuuccugcugcugugcggcagaagcugcagcaccaccuacaagggcguguacgagcugcagacccuggagcuggacauggccagccugaacaugugcaugccccugagcugcaccaagaacaacagccaccacuacaucauggugggcaacgagaccggccuggagcugacccugaccaacaccagcaucaucaaccacaaguucugcaaccugagcgacgcccacaagaagaaccuguacgaccacgcccugaugagcaucaucagcaccuuccaccugagcauccccaacuucaaccaguacgaggccaugagcugcgacuucaacggcggcaagaucagcgugcaguacaaccugagccacgccuacgccguggacgccgccaaccacugcggcaccaucgccaacggcgugcugcagaccuucaugagaauggccuggggcggcagcuacaucgcccuggacagcggcaagggcagcugggacugcaucaugaccagcuaccaguaccugaucauccagaacaccaccugggaggaccacugccaguucagcagacccagccccaucggcuaccugggccugcugagccagagaaccagagacaucuacaucagcagaagacugcugggcaccuucaccuggacccugagcgacagcgagggcaacgagacccccggcggcuacugccugaccagauggaugcugaucgaggccgagcugaagugcuucggcaacaccgccguggccaagugcaacgagaagcacgacgaggaguucugcgacaugcugagacuguucgacuucugcaagcaggccaucagaagacugaaggcccccgcccagaugagcauccagcugaucaacaaggccgugaacgcccugaucaacgaccagcugaucaugaagaaccaccugagagacaucaugggcauccccuacugcaacuacagcaaguacugcuaccugaaccacaccgugaccggcaagaccagccugcccagaugcugccuggugagcaacggcagcuaccugaacgagacccacuucagcgacgacaucgagcagcaggccgacaacaugaucaccgagcugcugcagaaggaguacaucgacagacagggcaagaccccccugggccugguggaccuguucguguucagcaccagcuucuaccugaucagcaucuuccugcaccuggugaagauccccacccacagacacgugaucggcaagcccugccccaagccccacagacugaaccacaugggcaucugcagcugcggccuguacaagcaccccggcgugcccgugaaguggaagagaugaggacuagucccuguucccagagcccacuuuuuuuucuuuuuuugaaauaaaauagccugucuuucagaucucaaaggcucuuuucagagccaccaaaaaaaaaaaaaaaaaaaaaaaaaaaaaaaaaaaaaaaaaaaaaaaaaaaaaaaaaaaaaaaaagaauu

SEQ ID NO: 33365 - RNA, 1714 nt, Artificial Sequence
  mRNA product Design a-1 (hSL-A64-N5) comprising derived and/or modified sequence from LASV(LASV1000-NIG-2009;Clade II)__AIT17782__GPCmut8 (opt4)
aggagagucccgcagucggcguccagcggcucugcuuguucgugugugugucguugcaggccuuauucaagcuuaccaugggccagaucaucaccuucuuccaggaggugccccacgugaucgaggaggugaugaacaucgugcugaucgcccugagccugcuggccauccugaagggcaucuacaacguggccaccugcggccuguucggccuggugagcuuccugcugcugugcggcagaagcugcagcaccaccuacaagggcguguacgagcugcagacccuggagcuggacauggccagccugaacaugugcaugccccugagcugcaccaagaacaacagccaccacuacaucauggugggcaacgagaccggccuggagcugacccugaccaacaccagcaucaucaaccacaaguucugcaaccugagcgacgcccacaagaagaaccuguacgaccacgcccugaugagcaucaucagcaccuuccaccugagcauccccaacuucaaccaguacgaggccaugagcugcgacuucaacggcggcaagaucagcgugcaguacaaccugagccacaccuacgccguggacgccgccaaccacugcggcaccaucgccaacggcgugcugcagaccuucaugagaauggccuggggcggcagcuacaucgcccuggacagcggcaagggcagcugggacugcaucaugaccagcuaccaguaccugaucauccagaacaccaccugggaggaccacugccaguucagcagacccagccccaucggcuaccugggccugcugagccagagaaccagagacaucuacaucagcagaagacugcugggcaccuucaccuggacccugagcgacagcgagggcaacgagacccccggcggcuacugccugaccagauggaugcugaucgaggccgagcugaagugcuucggcaacaccgccguggccaagugcaacgagaagcacgacgaggaguucugcgacaugcugagacuguucgacuucugcaagcaggccaucaagagacugaagacccccgcccagaugagcauccagcugaucaacaaggccgugaacgcccugaucaacgaccagcugaucaugaagaaccaccugagagacaucaugggcauccccuacugcaacuacagcaaguacugcuaccugaaccacaccgugaccggcaagaccagccugcccagaugcugccuggugagcaacggcagcuaccugaacgagacccacuucagcgacgacaucgagcagcaggccgacaacaugaucaccgagcugcugcagaaggaguacaucgacagacagggcaagaccccccugggccugguggaccuguucguguucagcaccagcuucuaccugaucagcaucuuccugcaccuggugaagauccccacccacagacacguggugggcaagcccugccccaagccccacagacugaaccacaugggcaucugcagcugcggccuguacaagcaccccggcgugcccgugaaguggaagagaugaggacuagucccuguucccagagcccacuuuuuuuucuuuuuuugaaauaaaauagccugucuuucagaucucaaaggcucuuuucagagccaccaaaaaaaaaaaaaaaaaaaaaaaaaaaaaaaaaaaaaaaaaaaaaaaaaaaaaaaaaaaaaaaaagaauu

SEQ ID NO: 33366 - RNA, 1714 nt, Artificial Sequence
  mRNA product Design a-1 (hSL-A64-N5) comprising derived and/or modified sequence from LASV(LASV221-NIG-2010;Clade II)__AIT17624__GPCmut8 (opt4)
aggagagucccgcagucggcguccagcggcucugcuuguucgugugugugucguugcaggccuuauucaagcuuaccaugggccagaucaucaccuucuuccaggaggugccccacgugaucgaggaggugaugaacaucgugcugaucgcccugagccugcuggccauccugaagggcaucuacaacguggccaccugcggccuguucggccuggugagcuuccugcugcugugcggcagaagcugcagcaccaccuacaagggcguguacgagcugcagacccuggagcuggacauggccagccugaacaugugcaugccccugagcugcaccaagaacaacagccaccacuacaucauggugggcaacgagaccggccuggagcugacccugaccaacaccagcaucaucaaccacaaguucugcaaccugagcgacgcccacaagaagaaccuguacgaccacgcccugaugagcaucaucagcaccuuccaccugagcauccccaacuucaaccaguacgaggccaugagcugcgacuucaacggcggcaagaucagcgugcaguacaaccugagccacaccuacgccaucgacgccgccaaccacugcggcaccaucgccaacggcgugcugcagaccuucaugagaauggccuggggcggcagcuacaucgcccuggacagcggcaagggcagcugggacugcaucaugaccagcuaccaguaccugaucauccagaacaccaccugggaggaccacugccaguucagcagacccagccccaucggcuaccugggccugcugagccagagaaccagagacaucuacaucagcagaagacugcugggcaccuucaccuggacccugagcgacagcgagggcaacgagacccccggcggcuacugccugaccagauggaugcugaucgaggccgagcugaagugcuucggcaacaccgccguggccaagugcaacgagaagcacgacgaggaguucugcgacaugcugagacuguucgacuucugcaagcaggccaucagaagacugaagacccccgcccagaugagcauccagcugaucaacaaggccgugaacgcccugaucaacgaccagcugaucaugaagaaccaccugagagacaucaugggcauccccuacugcaacuacagcaaguacugcuaccugaaccacaccgugaccggcaagaccagccugcccagaugcugccuggugagcaacggcagcuaccugaacgagacccacuucagcgacgacaucgagcagcaggccgacaacaugaucaccgagaugcugcagaaggaguacauggacagacagggcaagaccccccugggccugguggaccuguucguguucagcaccagcuucuaccugaucagcaucuuccugcaccuggugaagauccccacccacagacacgugaucggcaagcccugccccaagccccacagacugaaccacaugggcaucugcagcugcggccuguacaagcaccccggcgugcccgugaaguggaagagaugaggacuagucccuguucccagagcccacuuuuuuuucuuuuuuugaaauaaaauagccugucuuucagaucucaaaggcucuuuucagagccaccaaaaaaaaaaaaaaaaaaaaaaaaaaaaaaaaaaaaaaaaaaaaaaaaaaaaaaaaaaaaaaaaagaauu

SEQ ID NO: 33367 - RNA, 1714 nt, Artificial Sequence
  mRNA product Design a-1 (hSL-A64-N5) comprising derived and/or modified sequence from LASV(LASV237-NIG-2010;Clade II)__AIT17638__GPCmut8 (opt4)
aggagagucccgcagucggcguccagcggcucugcuuguucgugugugugucguugcaggccuuauucaagcuuaccaugggccagaucaucaccuucuuccaggaggugccccacgugaucgaggaggugaugaacaucgugcugaucgcccugagccugcuggccauccugaagggcaucuacaacguggccaccugcggccuguucggccuggugagcuuccugcugcugugcggcagaagcugcagcaccaccuacaagggcguguacgagcugcagacccuggagcuggacauggccagccugaacaugugcaugccccugagcugcaccaagaacaacagccaccacuacaucauggugggcaacgagaccggccuggagcugacccugaccaacaccagcaucaucaaccacaaguucugcaaccugagcgacgcccacaagaaggaccuguacgaccacgcccugaugagcaucaucagcaccuuccaccugagcauccccaacuucaaccaguacgaggccaugagcugcgacuucaacggcggcaagaucagcgugcaguacaaccugagccacaccuacgccguggacgccgccaaccacugcggcaccaucgccaacggcgugcugcagaccuucaugagaauggccuggggcggcagcuacaucgcccuggacagcggcaagggcagcugggacugcaucaugaccagcuaccaguaccugaucauccagaacaccaccugggaggaccacugccaguucagcagacccagccccaucggcuaccugggccugcugagccagagaaccagagacaucuacaucagcagaagacugcugggcaccuucaccuggacccugagcgacagcgagggcaacgagacccccggcggcuacugccugaccagauggaugcugaucgaggccgagcugaagugcuucggcaacaccgccguggccaagugcaacgagaagcacgacgaggaguucugcgacaugcugagacuguucgacuucugcaagcaggccaucagaagacugaagacccccgcccagaugagcauccagcugaucaacaaggccgugaacgcccugaucaacgaccagcugaucaugaagaaccaccugagagacaucaugggcauccccuacugcaacuacagcaaguacugcuaccugaaccacaccgugaccggcaagaccagccugcccagaugcugccuggugagcaacggcagcuaccugaacgagacccacuucagcgacgacaucgagcagcaggccgacaacaugaucaccgagcugcugcagaaggaguacauggacagacagggcaagaccccccugggccugguggaccuguucguguucagcaccagcuucuaccugaucagcaucuuccugcaccugaucaagauccccacccacagacacaucaccggcaagcccugccccaagccccacagacugaaccacaugggcaucugcagcugcggccuguacaagcaccccggcgugcccgugaaguggaagagaugaggacuagucccuguucccagagcccacuuuuuuuucuuuuuuugaaauaaaauagccugucuuucagaucucaaaggcucuuuucagagccaccaaaaaaaaaaaaaaaaaaaaaaaaaaaaaaaaaaaaaaaaaaaaaaaaaaaaaaaaaaaaaaaaagaauu

SEQ ID NO: 33368 - RNA, 1714 nt, Artificial Sequence
  mRNA product Design a-1 (hSL-A64-N5) comprising derived and/or modified sequence from LASV(LASV253-NIG-2011;Clade II)__AIT17670__GPCmut8 (opt4)
aggagagucccgcagucggcguccagcggcucugcuuguucgugugugugucguugcaggccuuauucaagcuuaccaugggccagaucaucaccuucuuccaggaggugccccacgugaucgaggaggugaugaacaucgugcugaucgcccugagccugcuggccauccugaagggcaucuacaacguggccaccugcggccuguucggccuggugagcuuccugcugcugugcggcagaagcugcagcaccaccuacaagggcguguacgagcugcagacccuggagcuggacauggccagccugaacaugugcaugccccugagcugcaccaagaacaacagccaccacuacaucauggugggcaacgagaccggccuggagcugacccugaccaacaccagcaucaucaaccacaaguucugcaaccugagcgacgcccacaagaagaaccuguacgaccacgcccugaugagcaucaucagcaccuuccaccugagcauccccaacuucaaccaguacgaggccaugagcugcgacuucaacggcggcaagaucagcgugcaguacaaccugagccacaccuacgccguggacgccgccaaccacugcggcaccaucgccaacggcgugcugcagaccuucaugagaauggccuggggcggcagcuacaucgcccuggacagcggcaagggcagcugggacugcaucaugaccagcuaccaguaccugaucauccagaacaccaccugggaggaccacugccaguucagcagacccagccccaucggcuaccugggccugcugagccagagaaccagagacaucuacaucagcagaagacugcugggcaccuucaccuggacccugagcgacagcgagggcaacgagacccccggcggcuacugccugaccagauggaugcugaucgaggccgagcugaagugcuucggcaacaccgccguggccaagugcaacgagaagcacgacgaggaguucugcgacaugcugagacuguucgacuucugcaagcaggccaucagaagacugaaggcccccgcccagaugagcauccagcugaucaacaaggccgugaacgcccugaucaacgaccagcugaucaugaagaaccaccugagagacaucaugggcauccccuacugcaacuacagcaaguacugcuaccugaaccacaccgugaccggcagaaccagccugcccagaugcugccuggugagcaacggcagcuaccugaacgagacccacuucagcgacgacaucgagcagcaggccgacaacaugaucaccgagcugcugcagaaggaguacaucgacagacagggcaagaccccccugggccugguggaccuguucguguucagcaccagcuucuaccugaucagcaucuuccugcaccuggugaagauccccacccacagacacaucaucggcaagcccugccccaagccccacagacugaaccacaugggcaucugcagcugcggccuguacaagcaccccggcgugcccgugaaguggaagagaugaggacuagucccuguucccagagcccacuuuuuuuucuuuuuuugaaauaaaauagccugucuuucagaucucaaaggcucuuuucagagccaccaaaaaaaaaaaaaaaaaaaaaaaaaaaaaaaaaaaaaaaaaaaaaaaaaaaaaaaaaaaaaaaaagaauu

SEQ ID NO: 33369 - RNA, 1714 nt, Artificial Sequence
  mRNA product Design a-1 (hSL-A64-N5) comprising derived and/or modified sequence from LASV(LASV254-NIG-2011;Clade II)__AIT17674__GPCmut8 (opt4)
aggagagucccgcagucggcguccagcggcucugcuuguucgugugugugucguugcaggccuuauucaagcuuaccaugggccagaucaucaccuucuuccaggaggugccccacgugaucgaggaggugaugaacaucgugcugaucgcccugagccugcuggccauccugaagggcaucuacaacguggccaccugcggccuguucggccuggugagcuuccugcugcugugcggcagaagcugcagcaccaccuacaagggcguguacgagcugcagacccuggagcuggacaugaccaaccugaacaugugcaugccccugagcugcaccaagaacaacagccaccacuacaucauggugggcaacgagaccggccuggagcugacccugaccaacaccagcaucaucaaccacaaguucugcaaccugagcgacgcccacaagaagaaccuguacaaccacgcccugaugagcaucaucagcaccuuccaccugagcauccccaacuucaaccaguacgaggccaugagcugcgacuucaacggcggcaagaucagcgugcaguacaaccugagccacagcuacgccguggacgccgccaaccacugcggcaccaucgccaacggcgugcugcagaccuucaugagaauggccuggggcggcagcuacaucgcccuggacagcggcaagggcaacugggacugcaucaugaccagcuaccaguaccugaucauccagaacaccaccugggaggaccacugccaguucagcagacccagccccaucggcuaccugggccugcugagccagagaaccagagacaucuacaucagcagaagacugcugggcaccuucaccuggacccugagcgacagcgagggcaacgagacccccggcggcuacugccugaccagauggaugcugaucgaggccgagcugaagugcuucggcaacaccgccguggccaagugcaacgagaagcacgacgaggaguucugcgacaugcugagacuguucgacuucugcaagcaggccaucagaagacugaagacccccgcccaggccaacauccagcugaucaacaaggccgugaacgcccugaucaacgaccagcugaucaugaagaaccaccugagagacaucaugggcauccccuacugcaacuacagcaaguacugcuaccugaaccacaccgugaccggcaagaccagccugcccagaugcugccuggugagcaacggcagcuaccugaacgagacccacuucagcgacgacaucgagcagcaggccgacaacaugaucaccgagcugcugcagaaggaguacauggacagacagggcaagaccccccugggccugguggaccuguucguguucagcaccagcuucuaccugaucagcaucuuccugcaccuggugaagauccccacccacagacacgugaucggcaagcccugccccaagccccacagacugaaccacaugggcaucugcagcugcggccuguacaagcaccccggcgugcccgugaaguggaagagaugaggacuagucccuguucccagagcccacuuuuuuuucuuuuuuugaaauaaaauagccugucuuucagaucucaaaggcucuuuucagagccaccaaaaaaaaaaaaaaaaaaaaaaaaaaaaaaaaaaaaaaaaaaaaaaaaaaaaaaaaaaaaaaaaagaauu

SEQ ID NO: 33370 - RNA, 1714 nt, Artificial Sequence
  mRNA product Design a-1 (hSL-A64-N5) comprising derived and/or modified sequence from LASV(Nig08-A19;Clade III)__ADU56618__GPCmut8 (opt4)
aggagagucccgcagucggcguccagcggcucugcuuguucgugugugugucguugcaggccuuauucaagcuuaccaugggccagaucgugaccuucuuccaggaggugccccacgugaucgaggaggugaugaacaucgugcugaucgcccugagcauccuggccauccugaagggccuguacaacaucgccaccugcggccugaucggccuggugaccuuccugcugcugagcggcagaagcugcagcaugaccuacaagggcguguacgagcugcagacccuggagcugaacaugaacacccugaacaugugcaugccccugagcugcaccaagaacaacagccaccacuacaucauggugggcaacgagaccggccuggagcugacccugaccaacaccagccugcugcaccacaaguucugcaaccugagcgacgcccacaagaagaaccuguacgaccacacccugaugagcaucaucagcaccuuccaccugagcauccccaacuucaaccaguacgaggccaugagcugcgacuucaacggcggcaagaucaccgugcaguacaaccugagccacagcuacgccaucgacgccgccaaccacugcggcaccguggccaacggcgugcugcagaccuucaugagaauggccuggggcggcagcuacaucgcccuggacagcggcagaggcaagugggacugcaucaugaccagcuaccaguaccugaucauccagaacaccaccugggaggaccacugccaguucagcagacccagccccaucggcuaccugggccugcugagccagagaaccagagacaucuacaucagcagaagacugcugggcaccuucaccuggacccugagcgacagcgagggcaacgagacccccggcggcuacugccugaccagauggaugcugaucgaggccgagcugaagugcuucggcaacaccgccguggccaagugcaacgagaagcacgacgaggaguucugcgacaugcugagacuguucgacuucugcaagcaggccaucagaagacugaaggcccccgcccagaugagcauccagcugaucaacaaggccgugaacgcccugaucaacgaccagcugaucaugaagaaccaccugagagacaucaugggcauccccuacugcaacuacagcaaguacugcuaccugaaccacaccagcaccggcagaaccagccugcccagaugcugccuggugagcaacggcagcuaccugaacgagacccacuucagcgacgacaucgagcagcaggccgacaacaugaucaccgagaugcugcagaaggaguaccuggacagacagggcaagaccccccugggccugguggaccuguucguguucagcaccagcuucuaccugaucagcaucuuccugcaccuggugaagauccccacccacagacacaucgugggcaagcccugccccaagccccacagacugaaccacaugggcaucugcagcugcggccuguacaagcagcccggcgugcccgugagauggaagagaugaggacuagucccuguucccagagcccacuuuuuuuucuuuuuuugaaauaaaauagccugucuuucagaucucaaaggcucuuuucagagccaccaaaaaaaaaaaaaaaaaaaaaaaaaaaaaaaaaaaaaaaaaaaaaaaaaaaaaaaaaaaaaaaaagaauu

SEQ ID NO: 33371 - RNA, 1717 nt, Artificial Sequence
  mRNA product Design a-1 (hSL-A64-N5) comprising derived and/or modified sequence from LASV(G1180-SLE-2010;Clade IV)__AIT17168__GPCmut8 (opt4)
aggagagucccgcagucggcguccagcggcucugcuuguucgugugugugucguugcaggccuuauucaagcuuaccaugggccagaucgugaccuucuuccaggaggugccccacgugaucgaggaggugaugaacaucgugcugaucgcccugagcauccuggccgugcugaagggccuguacaacuucgccaccugcggccuggugggccugcugaccuuccugcugcugugcggcagaagcugcaccgccagcagauacaagggcguguacgagcugcagacccuggagcugaacauggagacccugaacaugugcaugccccugagcugcaccaagaacaacagccaccacuacaucauggugggcaacgagaccggccuggagcugacccugaccaacaccagcaucaucaaccacaaguucugcaaccugagcgacgcccacaagaagaaccuguacgaccacgcccugaugagcaucaucagcaccuuccaccugagcauccccaacuucaaccaguacgaggccaugagcugcgacuucaacggcggcaagaucagcgugcaguacaaccugagccacagcuacgccggcgacgccgccaaccacugcggcaccguggccaacggcgugcugcagaccuucaugagaauggccuggggcggcagcuacaucgcccuggacagcggccacggcagcugggacugcaucaugaccagcuaccaguaccugaucauccagaacaccaccugggaggaccacugccaguucagcagacccagccccaucggcuaccugggccugcugagccagagaaccagagacaucuacaucagcagaagacugcugggcaccuucaccuggacccugagcgacagcgagggcaaggacacccccggcggcuacugccugaccagauggaugcugaucgaggccgagcugaagugcuucggcaacaccgccguggccaagugcaacgagaagcacgacgaggaguucugcgacaugcugagacuguucgacuucugcaagcaggccauccagagacugaaggcccccgcccagaugagcauccagcugaucaacaaggccgugaacgcccugaucaacgaccagcugaucaugaagaaccaccugagagacaucaugggcauccccuacugcaacuacagcaaguacugcuaccugaaccacaccaccaccggcaagaccagccugcccaagugcugccuggugagcaacggcagcuaccugaacgagacccacuucagcgacgacaucgagcagcaggccgacaacaugaucaccgagaugcugcagaaggaguacauggagagacagggcaagaccccccugggccugguggaccuguucguguucagcaccagcuucuaccugaucagcaucuuccugcaccuggugaagauccccacccacagacacaucgugggcaagagcugccccaagccccacagacugaaccacaugggcaucugcagcugcggccuguacaagcagcccggcgugcccgugaaguggaagagaugaggacuagucccuguucccagagcccacuuuuuuuucuuuuuuugaaauaaaauagccugucuuucagaucucaaaggcucuuuucagagccaccaaaaaaaaaaaaaaaaaaaaaaaaaaaaaaaaaaaaaaaaaaaaaaaaaaaaaaaaaaaaaaaaagaauu

SEQ ID NO: 33372 - RNA, 1717 nt, Artificial Sequence
  mRNA product Design a-1 (hSL-A64-N5) comprising derived and/or modified sequence from LASV(G1442-SLE-2011;Clade IV)__AIT17180__GPCmut8 (opt4)
aggagagucccgcagucggcguccagcggcucugcuuguucgugugugugucguugcaggccuuauucaagcuuaccaugggccagaucgugaccuucuuccaggaggugccccacgugaucgaggaggugaugaacaucgugcugaucgcccugagcauccuggccgugcugaagggccuguacaacguggccaccugcggccugaucggccuggugaccuuccugcugcugugcggcagaagcugcaccaccacccuguacaagggcguguacgagcugcagacccuggagcugaacauggagacccugaacaugugcaugccccugagcugcaccaagaacaacagccaccacuacaucagagugggcaacgagaccggccuggagcugacccugaccaacaccagcaucaucaaccacaaguucugcaaccugagcgacgcccacaagaagaaccuguacgaccacgcccugaugagcaucaucagcaccuuccaccugagcauccccaacuucaaccaguacgaggccaugagcugcgacuucaacggcggcaagaucagcgugcaguacaaccugagccacagcuacgccggcgacgccgccaaccacugcggcaccguggccaacggcgugcugcagaccuucaugagaauggccuggggcggcagcuacaucgcccuggacagcggcagaggcaacugggacugcaucaugaccagcuaccaguaccugaucauccagaacaccaccugggacgaccacugccaguucagcagacccagccccaucggcuaccugggccugcugagccagagaaccagagacguguacaucagcagaagacugcugggcaccuucaccuggacccugagcgacagcgagggcaaggacacccccggcggcuacugccugaccagauggaugcugaucgaggccgagcugaagugcuucggcaacaccgccguggccaagugcaacgagaagcacgacgaggaguucugcgacaugcugagacuguucgacuucugcaagcaggccauccagagacugaaggcccccgcccagaugagcauccagcugaucaacaaggccgugaacgcccugaucaacgaccagcugaucaugaagaaccaccugagagacaucaugggcauccccuacugcaacuacagcaaguacugcuaccugaacaacaccgccaccggcaagaccagccugcccaagugcugccugaucagcaacggcagcuaccugaacgagacccacuucagcgacgacaucgagcaggaggccgacaacaugaucaccgagaugcugcagaaggaguacauggagagacagggcaagaccccccugggccugguggaccuguucguguucagcaccagcuucuaccugaucagcaucuuccugcaccuggugaagauccccacccacagacacaucgugggcaagagcugccccaagccccacagacugaaccacaugggcaucugcagcugcggccuguacaagcagcccggcgugcccgugagauggaagagaugaggacuagucccuguucccagagcccacuuuuuuuucuuuuuuugaaauaaaauagccugucuuucagaucucaaaggcucuuuucagagccaccaaaaaaaaaaaaaaaaaaaaaaaaaaaaaaaaaaaaaaaaaaaaaaaaaaaaaaaaaaaaaaaaagaauu

SEQ ID NO: 33373 - RNA, 1717 nt, Artificial Sequence
  mRNA product Design a-1 (hSL-A64-N5) comprising derived and/or modified sequence from LASV(G3010-SLE-2013;Clade IV)__AIT17344__GPCmut8 (opt4)
aggagagucccgcagucggcguccagcggcucugcuuguucgugugugugucguugcaggccuuauucaagcuuaccaugggccagaucgugaccuucuuccaggaggugccccacgugaucgaggaggugaugaacaucgugcugaucgcccugagcauccuggccgugcugaagggccuguacaacuucgccaccugcggccuggugggccuggugaccuuccugcugcugugcggcagaagcugcaccaccagccuguacaagggcguguacgagcugcagacccuggagcugaacauggagacccugaacaugugcaugccccugagcugcaccaagaacaacagccaccacuacaucauggugggcaacgagaccggccuggagcugacccugaccaacaccagcaucaucaaccacaaguucugcaaccugagcgacgcccacaagaagaaccuguacaaccacgcccugaugagcaucaucagcaccuuccaccugagcauccccaacuucaaccaguacgaggccaugagcugcgacuucaacggcggcaagaucagcgugcaguacaaccugagccacagcuacgccggcgacgccgccagccacugcggcaccguggccaacggcgugcugcagaccuucaugagaauggccuggggcggcagcuacaucgcccuggacagcggcuacggcaagugggacugcaucaugaccagcuaccaguaccugaucauccagaacaccaccugggaggaccacugccaguucagcagacccagccccaucggcuaccugggccugcugagccagagaaccagagacaucuacaucagcagaagacugcugggcaccuucaccuggacccugagcgacagcgagggcaaggacacccccggcggcuacugccugaccagauggaugcugaucgaggccgagcugaagugcuucggcaacaccgccguggccaagugcaacgagaagcacgacgaggaguucugcgacaugcugagacuguucgacuucugcaagcaggccauccagagacugaagacccccgcccagaugagcauccagcugaucaacaaggccgugaacgcccugaucaacgaccagcugaucaugaagaaccaccugagagacaucaugggcauccccuacugcaacuacagcaaguacugcuaccugaaccacaccaccaccggcaagaccagccugcccaagugcugccuggugagcaacggcagcuaccugaacgagacccacuucagcgacgacaucgagcagcaggccgacaacaugaucaccgagaugcugcagaaggaguacauggagagacagggcaagaccccccugggccugguggaccuguucguguucagcaccagcuucuaccugaucagcaucuuccugcaccuggugaagauccccacccacagacacaucgugggcaagagcugccccaagccccacagacugaaccacaugggcaucugcagcugcggccuguacaagcagcccggcgugcccgugagauggaagagaugaggacuagucccuguucccagagcccacuuuuuuuucuuuuuuugaaauaaaauagccugucuuucagaucucaaaggcucuuuucagagccaccaaaaaaaaaaaaaaaaaaaaaaaaaaaaaaaaaaaaaaaaaaaaaaaaaaaaaaaaaaaaaaaaagaauu

SEQ ID NO: 33374 - RNA, 1717 nt, Artificial Sequence
  mRNA product Design a-1 (hSL-A64-N5) comprising derived and/or modified sequence from LASV(G502-SLE-2009;Clade IV)__AIT17126__GPCmut8 (opt4)
aggagagucccgcagucggcguccagcggcucugcuuguucgugugugugucguugcaggccuuauucaagcuuaccaugggccagaucgugaccuucuuccaggaggugccccacgugaucgaggaggugaugaacaucgugcugaucgcccugagcauccuggccgugcugaagggccuguacaacuucgccaccugcggccuggugggccugcugaccuuccugcugcugugcggcagaagcugcaccaccggccuguacaagggcguguacgagcugcagacccuggagcugaacauggagacccugaacaugugcaugccccugagcugcaccaagaacaacagccaccacuacaucauggugggcaacgagaccggccuggagcugacccugaccaacaccagcaucaucaaccacaaguucugcaaccugagcgacgcccacaagaagaaccuguacgaccacgcccugaugagcaucaucagcaccuuccaccugagcauccccaacuucaaccaguacgaggccaugagcugcgacuucaacggcggcaagaucagcgugcaguacaaccugagccacagcuacgccggcgacgccgccgaccacugcggcaccguggccaacggcgugcugcagaccuucaugagaauggccuggggcggcagcuacaucgcccuggacagcggcagaggcagaugggacugcaucaugaccagcuaccaguaccugaucauccagaacaccaccugggaggaccacugccaguucagcagacccagccccaucggcuaccugggccugcugagccagagaaccagagacaucuacaucagcagaagacugcugggcaccuucaccuggacccugagcgacagcgagggcaaggacacccccggcggcuacugccugaccagauggaugcugaucgaggccgagcugaagugcuucggcaacaccgccguggccaagugcaacgagaagcacgacgaggaguucugcgacaugcugagacuguucgacuucugcaagcaggccauccagagacugaaggcccccgcccagaugagcauccagcugaucaacaaggccgugaacgcccugaucaacgaccagcuggugaugaagaaccaccugagagacaucaugggcauccccuacugcaacuacagcagauacugcuaccugaaccacaccaccaccggcagaaccagccugcccaagugcugccuggugagcaacggcagcuaccugaacgagacccacuucagcgacgacaucgagcagcaggccgacaacaugaucaccgagaugcugcagaaggaguacauggagagacagggcaagaccccccugggccugguggaccuguucguguucagcaccagcuucuaccugaucagcaucuuccugcaccuggugaagauccccacccacagacacaucgugggcaagagcugccccaagccccacagacugaaccacaugggcaucugcagcugcggccuguacaagcagcccggcgugcccgugaaguggaagagaugaggacuagucccuguucccagagcccacuuuuuuuucuuuuuuugaaauaaaauagccugucuuucagaucucaaaggcucuuuucagagccaccaaaaaaaaaaaaaaaaaaaaaaaaaaaaaaaaaaaaaaaaaaaaaaaaaaaaaaaaaaaaaaaaagaauu

SEQ ID NO: 33375 - RNA, 1717 nt, Artificial Sequence
  mRNA product Design a-1 (hSL-A64-N5) comprising derived and/or modified sequence from LASV(G733-SLE-2010;Clade IV)__AIT17154__GPCmut8 (opt4)
aggagagucccgcagucggcguccagcggcucugcuuguucgugugugugucguugcaggccuuauucaagcuuaccaugggccagaucgugaccuucuuccaggaggugccccacgugaucgaggaggugaugaacaucgugcugaucgcccugagcauccuggccgugcugaagggccuguacaacuucgccaccugcggcaucgugggccuggugagcuuccugcugcugugcggcagaagcugcaccaccagccuguacaagggcguguacgagcugcagacccuggagcugaacauggagacccugaacaugugcaugccccugagcugcaccaagaacaacagccaccacuacaucauggugggcaacgagaccggccuggagcugacccugaccaacaccagcaucaucaaccacaaguucugcaaccugagcgacgcccacaagaagaaccuguacgaccacgcccugaugagcaucaucagcaccuuccaccugagcauccccaacuucaaccaguacgaggccaugagcugcgacuucaacggcggcaagaucagcgugcaguacaaccugagccacagcuacgccggcgacgccgccaaccacugcggcaccaucgccaacggcgugcugcagaccuucaugagaauggccuggggcggcagcuacaucgcccuggacagcggcagagacagaugggacugcaucaugaccagcuaccaguaccugaucauccagaacaccaccugggaggaccacugccaguucagcagacccagccccaucggcuaccugggccugcugagccagagaaccagagacaucuacaucagcagaagacugcugggcaccuucaccuggacccugagcgacagcgagggcaaggacacccccggcggcuacugccugaccagauggaugcugaucgaggccgagcugaagugcuucggcaacaccgccguggccaagugcaacgagaagcacgacgaggaguucugcgacaugcugagacuguucgacuucugcaagcaggccauccagagacugaaggcccccgcccagaugagcauccagcugaucaacaaggccgugaacgcccugaucaacgaccagcugaucaugaagaaccaccugagagacaucaugggcauccccuacugcaacuacagcaaguacugcuaccugaaccacaccaccaccggcaagaccagccugcccaagugcugccuggugagcaacggcagcuaccugaacgagacccacuucagcgacgacaucgagcagcaggccgacaacaugaucaccgagaugcugcagaaggaguacauggagagacagggcaagaccccccugggccugguggaccuguucguguucagcaccagcuucuaccugaucagcaucuuccugcaccuggugaagauccccacccacagacacguggugggcaagagcugccccaagccccacagacugaaccacaugggcaucugcagcugcggccuguacggccagcccggcgugcccgugaaguggaagagaugaggacuagucccuguucccagagcccacuuuuuuuucuuuuuuugaaauaaaauagccugucuuucagaucucaaaggcucuuuucagagccaccaaaaaaaaaaaaaaaaaaaaaaaaaaaaaaaaaaaaaaaaaaaaaaaaaaaaaaaaaaaaaaaaagaauu

SEQ ID NO: 33376 - RNA, 1717 nt, Artificial Sequence
  mRNA product Design a-1 (hSL-A64-N5) comprising derived and/or modified sequence from MOPV/LASV reassortant(IGS-1;Clade IV)__AFY05576__GPCmut8 (opt4)
aggagagucccgcagucggcguccagcggcucugcuuguucgugugugugucguugcaggccuuauucaagcuuaccaugggccagaucgugaccuucuuccaggaggugccccacgugaucgaggaggugaugaacaucgugcugaucgcccugagcgugcuggccgugcugaagggccuguacaacuucgccaccugcggccuggugggccuggugaccuuccugcugcugugcggcagaagcugcaccaccagccuguacaagggcguguacgagcugcagacccuggagcugaacauggagacccugaacaugugcaugccccugagcugcaccaagaacaacagccaccacuacaucauggugggcaacgagaccggccuggagcugacccugaccaacaccagcaucaucaaccacaaguucugcaaccugagcgacgcccacaagaagaaccuguacgaccacgcccugaugagcaucaucagcaccuuccaccugagcauccccaacuucaaccaguacgaggccaugagcugcgacuucaacggcggcaagaucagcgugcaguacaaccugagccacagcuacgccggcgacgccgccaaccacugcggcaccguggccaacggcgugcugcagaccuucaugagaauggccuggggcggcagcuacaucgcccuggacagcggcagaggcaacugggacugcaucaugaccagcuaccaguaccugaucauccagaacaccaccugggaggaccacugccaguucagcagacccagccccaucggcuaccugggccugcugagccagagaaccagagacaucuacaucagcagaagacugcugggcaccuucaccuggacccugagcgacagcgagggcgaggacacccccggcggcuacugccugaccagauggaugcugaucgaggccgagcugaagugcuucggcaacaccgccguggccaagugcaacgagaagcacgacgaggaguucugcgacaugcugagacuguucgacuucugcaagcaggccauccagagacugaaggcccccgcccagaugagcauccagcugaucaacaaggccgugaacgcccugaucaacgaccagcugaucaugaagaaccaccugagagacaucaugggcauccccuacugcaacuacagcaaguacugcuaccugaaccacaccaccaccggcagaaccagccugcccaagugcugccuggugagcaacggcagcuaccugaacgagacccacuucagcgacgacaucgagcagcaggccgacaacaugaucaccgagaugcugcagaaggaguacauggagagacagggcaagaccccccugggccugguggaccuguucguguucagcaccagcuucuaccugaucagcaucuuccugcaccuggugaagauccccacccacagacacaucgugggcaagagcugccccaagccccacagacugaaccacaugggcaucugcagcugcggccuguacaagcagcccggcgugcccgugaaguggaagagaugaggacuagucccuguucccagagcccacuuuuuuuucuuuuuuugaaauaaaauagccugucuuucagaucucaaaggcucuuuucagagccaccaaaaaaaaaaaaaaaaaaaaaaaaaaaaaaaaaaaaaaaaaaaaaaaaaaaaaaaaaaaaaaaaagaauu

SEQ ID NO: 33377 - RNA, 1717 nt, Artificial Sequence
  mRNA product Design a-1 (hSL-A64-N5) comprising derived and/or modified sequence from LASV(LM765-SLE-2012;Clade IV)__AIT17814__GPCmut8 (opt4)
aggagagucccgcagucggcguccagcggcucugcuuguucgugugugugucguugcaggccuuauucaagcuuaccaugggccagaucgugaccuucuuccaggaggugccccacgugaucgaggaggugaugaacaucgugcugaucgcccugagcauccuggccgugcugaagggccuguacaacuucgccaccugcggccuggugggccuggugaccuuccugcugcugugcggcagaagcugcaccaccagccuguacaagggcguguacgagcugcagacccuggagcugaacauggagacccugaacaugugcaugccccugagcugcaccaagaacaacagccaccacuacaucauggugggcaacgagaccggccuggagcugacccugaccaacaccagcaucaucgaccacaaguucugcaaccugagcgacgcccacagaaagaaccuguacgaccacgcccugaugagcaucaucagcaccuuccaccugagcauccccaacuucaaccaguacgaggccaugagcugcgacuucaacggcggcaagaucagcgugcaguacaaccugagccacagcuacgccaaggacgccgccgaccacugcggcaccguggccaacggcgugcugcagaccuucaugagaauggccuggggcggcagcuacaucgcccuggacagcggcagaggcagaugggacugcaucaugaccagcuaccaguaccugaucauccagaacaccaccugggaggaccacugccaguucagcagacccagccccaucggcuaccugggccugcugagccagagaaccagagacaucuacaucagcagaagacugcugggcaccuucaccuggacccugagcgacagcgagggcaaggacacccccggcggcuacugccugaccagauggaugcugaucgaggccgagcugaagugcuucggcaacaccgccguggccaagugcaacgagaagcacgacgaggaguucugcgacaugcugagacuguucgacuucugcaagcaggccauccagagacugaaggcccccgcccagaugagcauccagcugaucaacaaggccgugaacgcccugaucaacgaccagcugaucaugaagaaccaccugagagacaucaugggcauccccuacugcaacuacagcaaguacugcuaccugaaccacaccaccaccggcaagaccagccugcccaagugcugccuggugagcaacggcagcuaccugaacgagacccacuucagcgacgacaucgagcagcaggccgacaacaugaucaccgagaugcugcagaaggaguacauggagagacagggcaagaccccccugggccugguggaccuguucguguucagcaccagcuucuaccugaucagcaucuuccugcaccuggugaagauccccacccacagacacaucgugggcaagcccugccccaagccccacagacugaaccacaugggcaucugcagcugcggccuguacaagcagcccggcgugcccgugaaguggaagagaugaggacuagucccuguucccagagcccacuuuuuuuucuuuuuuugaaauaaaauagccugucuuucagaucucaaaggcucuuuucagagccaccaaaaaaaaaaaaaaaaaaaaaaaaaaaaaaaaaaaaaaaaaaaaaaaaaaaaaaaaaaaaaaaaagaauu

SEQ ID NO: 33378 - RNA, 1717 nt, Artificial Sequence
  mRNA product Design a-1 (hSL-A64-N5) comprising derived and/or modified sequence from LASV(LM776-SLE-2012;Clade IV)__AIT17824__GPCmut8 (opt4)
aggagagucccgcagucggcguccagcggcucugcuuguucgugugugugucguugcaggccuuauucaagcuuaccaugggccagaucgugaccuucuuccaggaggugccccacgugaucgaggaggugaugaacaucgugcugaucgcccugagcauccuggccgugcugaagggccuguacaacuucgccaccugcggccuggugggccuggugaccuuccugcugcugugcggcagaagcugcaccaccagcguguacaagggcguguacgagcugcagacccuggagcugaacauggagacccugaacaugugcaugccccugagcugcaccaagaacaacagccaccacuacaucauggugggcaacgagaccggccuggagcugacccugaccaacaccagcaucaucaaccacaaguucugcaaccugagcgacgcccacaagaagaaccuguacgaccacgcccugaugagcaucaucagcaccuuccaccugagcauccccaacuucaaccaguacgaggccaugagcugcgacuucaacggcggcaagaucagcgugcaguacaaccugagccacagcuacgccggcgacgccgccaaccacugcggcaccguggccaacggcgugcugcagaccuucaugagaauggccuggggcggcagcuacaucgcccuggacagcggccacggcaagugggacugcaucaugaccagcuaccaguaccugaucauccagaacaccaccugggaggaccacugccaguucagcagacccagccccaucggcuaccugggccugcugagccagagaaccagagacaucuacaucagcagaagacugcugggcaccuucaccuggacccugagcgacagcgagggcaaggacacccccggcggcuacugccugaccagauggaugcugaucgaggccgagcugaagugcuucggcaacaccgccguggccaagugcaacgagaagcacgacgaggaguucugcgacaugcugagacuguucgacuucugcaagcaggccauccagagacugaaggcccccgcccagaugagcauccagcugaucaacaaggccgugaacgcccugaucaacgaccagcugaucaugaagaaccaccugagagacaucaugggcauccccuacugcaacuacagcaaguacugcuaccugaaccacaccaccaccggcaagaccagccugcccaagugcugccuggugagcaacggcagcuaccugaacgagacccacuucagcgacgacaucgagcagcaggccgacaacaugaucaccgagaugcugcagaaggaguacauggagagacagggcaagaccccccugggccugguggaccuguucguguucagcaccagcuucuaccugaucagcaucuuccugcaccuggugaagauccccacccacagacacaucgugggcaagagcugccccaagccccacagacugaaccacaugggcaucugcagcugcggccuguacaagcagcccggcgugcccgugagauggaagagaugaggacuagucccuguucccagagcccacuuuuuuuucuuuuuuugaaauaaaauagccugucuuucagaucucaaaggcucuuuucagagccaccaaaaaaaaaaaaaaaaaaaaaaaaaaaaaaaaaaaaaaaaaaaaaaaaaaaaaaaaaaaaaaaaagaauu

SEQ ID NO: 33379 - RNA, 1717 nt, Artificial Sequence
  mRNA product Design a-1 (hSL-A64-N5) comprising derived and/or modified sequence from LASV(Mad39;Clade IV)__ANH09722__GPCmut8 (opt4)
aggagagucccgcagucggcguccagcggcucugcuuguucgugugugugucguugcaggccuuauucaagcuuaccaugggccagaucgugaccuucuuccaggaggugccccacgugaucgaggaggugaugaacaucgugcugaucgcccugagcauccuggccgugcugaagggccuguacaacguggccaccugcggccugaucggccuggugaccuuccugcugcugugcggcagaagcugcaccaccacccuguacaagggcguguacgagcugcaggcccuggagcugaacauggagacccugaacaugugcaugccccugagcugcaccaagaacaacagccaccacuacaucagagugggcaacgagaccggccuggagcugacccugaccaacaccagccugaucaaccacaaguucugcaaccugagcgacgcccacaagaagaaccuguacgaccacgcccugaugagcaucaucagcaccuuccaccugagcauccccaacuucaaccaguacgaggccaugagcugcgacuucaacgacggcaagaucagcgugcaguacaaccugagccacaccuacgccggcgacaccgccaaccacugcggcaccguggccaacggcgugcugcagaccuucaugagaauggccuggggcggcagcuacaucgcccuggacagcggcagaggcggcugggacugcaucaugaccagcuaccaguaccugaucauccagaacaccaccugggaggaccacugccaguucagcagacccagccccaucggcuaccugggccugcugagccagagaaccagagacaucuacaucagcagaagacugcugggcaccuucaccuggacccugagcgacagcgagggcaaggacacccccggcggcuacugccugaccagauggaugcugaucgaggccgagcugaagugcuucggcaacaccgccguggccaagugcaacgagaagcacgacgaggaguucugcgacaugcugagacuguucgacuucugcaagcaggccauccagagacugaaggcccccgcccagaugagcauccagcugaucaacaaggccgugaacgcccugaucaacgaccagcugaucaugaagaaccaccugagagacaucaugggcauccccuacugcaacuacagcaaguacugcuaccugaaccacaccgugaccggcaagaccagccugcccaagugcugccuggugagcaacggcagcuaccugaacgagacccacuucagcgacgacaucgagcagcaggccgacaacaugaucaccgagaugcugcagaaggaguacauggagagacagggcaagaccccccugggccugguggaccuguucguguucagcaccagcuucuaccugaucagcaucuuccugcaccuggugaagauccccacccacagacacguggugggcaagcccugccccaagccccacagacugaaccacaugggcaucugcagcugcggcuucuacaagcagcccggcgugcccgugagauggaagagaugaggacuagucccuguucccagagcccacuuuuuuuucuuuuuuugaaauaaaauagccugucuuucagaucucaaaggcucuuuucagagccaccaaaaaaaaaaaaaaaaaaaaaaaaaaaaaaaaaaaaaaaaaaaaaaaaaaaaaaaaaaaaaaaaagaauu

SEQ ID NO: 33380 - RNA, 1717 nt, Artificial Sequence
  mRNA product Design a-1 (hSL-A64-N5) comprising derived and/or modified sequence from LASV(Z0947-SLE-2011;Clade IV)__AIT17840__GPCmut8 (opt4)
aggagagucccgcagucggcguccagcggcucugcuuguucgugugugugucguugcaggccuuauucaagcuuaccaugggccagaucgugaccuucuuccaggaggugccccacgugaucgaggaggugaugaacaucgugcugaucgcccugagcauccuggccgugcugaagggccuguacaacuucgccaccugcggccuggugggccuggugaccuuccugcugcugugcggcagaagcugcaccaucagccuguacaagggcguguacgagcugcagacccuggagcugaacauggagacccugaacaugugcaugccccugagcugcaccaagaacaacagccaccacuacaucauggugggcaacgagaccggccuggagcugacccugaccaacaccagcaucaucaaccacaaguucugcaaccugagcgacgcccacaagaagaaccuguacgaccacgcccugaugagcaucaucagcaccuuccaccugagcauccccaacuucaaccaguacgaggccaugagcugcgacuucaacggcggcaagaucagcgugcaguacaaccugagccacagcuacgccggcgacgccgccaaccacugcggcaccguggccaacggcgugcugcagaccuucaugagaauggccuggggcggcagcuacaucgcccuggacagcggcagagacagaugggacugcaucaugaccagcuaccaguaccugaucauccagaacaccaccugggaggaccacugccaguucagcagacccagccccaucggcuaccugggccugcugagccagagaaccagagacaucuacaucagcagaagacugcugggcaccuucaccuggacccugagcgacagcgagggcaaggacacccccggcggcuacugccugaccagauggaugcugaucgaggccgagcugaagugcuucggcaacaccgccguggccaagugcaacgagaagcacgacgaggaguucugcgacaugcugagacuguucgacuucugcaagcaggccauccagagacugaaggcccccgcccagaugagcauccagcugaucaacaaggccgugaacgcccugaucaacgaccagcugaucaugaagaaccaccugagagacaucaugggcauccccuacugcaacuacagcaaguacugcuaccugaaccacaccaccaccggcaagaccagccugcccaagugcugccuggugagcaacggcagcuaccugaacgagacccacuucagcgacgacaucgagcagcaggccgacaacaugaucaccgagaugcugcagaaggaguacauggagagacagggcaagaccccccugggccugguggaccuguucguguucagcaccagcuucuaccugaucagcaucuuccugcaccuggugaagauccccacccacagacacaucgugggcaagcccugccccaagccccacagacugaaccacaugggcaucugcagcugcggccuguacaagcagcccggcgugcccgugaaguggaagagaugaggacuagucccuguucccagagcccacuuuuuuuucuuuuuuugaaauaaaauagccugucuuucagaucucaaaggcucuuuucagagccaccaaaaaaaaaaaaaaaaaaaaaaaaaaaaaaaaaaaaaaaaaaaaaaaaaaaaaaaaaaaaaaaaagaauu

SEQ ID NO: 33381 - RNA, 1717 nt, Artificial Sequence
  mRNA product Design a-1 (hSL-A64-N5) comprising derived and/or modified sequence from LASV(Josiah;Clade IV)__NP_694870__GPCmut8 (opt5)
aggagagucccgcagucggcguccagcggcucugcuuguucgugugugugucguugcaggccuuauucaagcuuaccaugggccagaucgugaccuucuuucaagaggucccccacguuauugaagaggugaugaacaucgugcugauugcccucagcguccuggcugugcuuaaggggcuguacaauuucgccacaugcggacucguuggccuggugacguuucuucugcucugugggagauccugcaccacaucucuguauaaaggagucuacgaacugcagacccucgagcugaacauggaaacacuuaauauguguaugccucugagcugcaccaagaacaauucccaucacuauaucauggugggcaacgagacagggcucgagcugacccuuacgaauaccucuauuaucaaccauaaauucuguaaucugagcgacgcgcacaagaaaaaccucuacgaucaugcucugauguccaucauuucuacauuucaccugagcaucccgaauuucaaccaguaugaagccauguccugcgacuuuaauggaggcaagauuagcguucaguacaaccucucucacuccuaugccggcgaugcugccaaucauugugggaccguggcuaacggaguccugcaaacauucaugcggauggccuggggcgggagcuacaucgcgcuugacucuggacgcggcaacugggauugcauuaugaccuccuaccaguaucugaucauucagaauacgacaugggaggaccacugucaguuuagcagacccucuccuaucggguaccucggacugcuuucccaacggacccgcgauaucuauauuagcagacggcugcucggcacauucaccuggacccuguccgacucugaaggcaaggauacacccgggggauacugccugacgcgcuggaugcucaucgaggccgagcugaaauguuuuggcaacaccgcuguggccaagugcaaugaaaaacaugacgaggaguucugcgauaugcuuagacuguuugacuucuguaagcaggcuauucagcggcucaaagccccugcgcagaugagcauccaacugauuaacaaggccgugaaugcucuuaucaacgaucagcugaucaugaagaaucaccuccgcgacauuauggggauccccuauugcaacuacuccaaauauuguuaccugaaucacacaaccacaggaagaaccagccugccuaagugcugucucgucucuaacggcuccuaccugaaugaaacgcauuucagcgacgauauugaacagcaagccgacaacaugaucacagagaugcuucagaaagaguauauggaacggcaggggaagaccccgcugggacucguugaucuguuuguguucucuaccagcuuuuaccugauuuccaucuuccuucaccucgugaaaauccccacacaucgccacauugucggcaagucuugcccuaaaccccauagacugaaucacaugggcaucuguagcugcgggcuguauaagcagccuggagugcccguuaaguggaaacggugaggacuagucccuguucccagagcccacuuuuuuuucuuuuuuugaaauaaaauagccugucuuucagaucucaaaggcucuuuucagagccaccaaaaaaaaaaaaaaaaaaaaaaaaaaaaaaaaaaaaaaaaaaaaaaaaaaaaaaaaaaaaaaaaagaauu

SEQ ID NO: 33382 - RNA, 1714 nt, Artificial Sequence
  mRNA product Design a-1 (hSL-A64-N5) comprising derived and/or modified sequence from LASV(LP;Clade I)__AAF86701__GPCmut8 (opt5)
aggagagucccgcagucggcguccagcggcucugcuuguucgugugugugucguugcaggccuuauucaagcuuaccaugggccagaucauuaccuucuuucaagaggugccccacgucaucgaagagguuaugaacauugugcugaucgcccucagccugcuugcuauucugaaggggcucuacaauaucgccacaugcggaaucauuggccugguggcguuccuuuuucugugugggaaauccugcucucucacgcugaagggaggcuaugaacugcagacccucgagcugaacauggaaacacuuaauauguguaugccucugagcugcaccaaaaacuccucucaucacuacaucagagucgggaaugagacaggacucgagcugacccuuacaaacaccagcauuaucaaucauaaguucuguaaccuguccgacgcucacaaaaagaaucucuaugaucaugcccugaugucuauuaucagcacguuucaccuguccauuccgaacuucaaucaguacgaagccaugagcugcgacuuuaacggcggcaagaucucugugcaguauaaucucucccacagcuacgcuggggaugccgcugagcauuguggaaccguugccaacggcgugcugcaaacauucaugcggauggcguggggagggcgcuauaucgcccuugacucuggcaaagggaauugggauugcauuaugaccuccuaccaguaccugaucauucagaacacaaccugggaagaccacugucaguuuagcagacccucuccuaucggauaucucggccugcuuucccaacggacgcgcgauauuuacaucagcagacggcugcucggcacauucaccuggacacuguccgacucugaggggaacgagacccccggaggcuauugccugacccgcuggaugcucaucgaagcugagcugaaguguuuugggaauacagccgucgcuaaaugcaacgaaaagcaugaugaggaguucugcgacaugcuuagacuguuugauuucuguaaacaggccauucggcgccucaaggcgccugcccagaugagcauccagcugauuaauaaggcugugaacgcccuuaucaaugaccaacugauuaugaaaaaccaccucagagauaucaugggaauccccuacugcaauuauuccaaguacuguuaucugaaccacacgagcucuggccggaccucccugccuaaaugcugucucauuagcaaugggucuuaccugaacgaaacacaguucagcgacgacaucgagcagcaagcugauaauaugauuaccgaaaugcuucagaaggaguacaucgaacgccagggaaaaacaccgcugggccucguugacauuuuuaucuucuccaccucuuuuuaucugauuagcaucuuccugcaucuuaucaagauucccacgcacagacauaucgugggcaaaccuugccccaagccucaccggcucaaccauaugggggucuguuccugcggacuguacaagcaccccggcgugccgacaaaauggaagcgcugaggacuagucccuguucccagagcccacuuuuuuuucuuuuuuugaaauaaaauagccugucuuucagaucucaaaggcucuuuucagagccaccaaaaaaaaaaaaaaaaaaaaaaaaaaaaaaaaaaaaaaaaaaaaaaaaaaaaaaaaaaaaaaaaagaauu

SEQ ID NO: 33383 - RNA, 1714 nt, Artificial Sequence
  mRNA product Design a-1 (hSL-A64-N5) comprising derived and/or modified sequence from LASV(803213;Clade II)__AAF86703__GPCmut8 (opt5)
aggagagucccgcagucggcguccagcggcucugcuuguucgugugugugucguugcaggccuuauucaagcuuaccaugggccagaucauuaccuucuuucaagaggugccccacgucaucgaagagguuaugaacauugugcugaucgcccucagccugcuugcuauucugaaggggaucuacaauguggccacaugcggacucuucggccugaucuccuuucuucugcucugugggagaucuugcagcgucacguauaaaggaguguacgaacugcagacccuggagcucaacauggcgaaucugaacauguguaugccucuuuccugcacaaagaauaacucucaucacuauauuaugguuggcaaugaaaccgggcuggagcucacacugaccaacacaagcaucauuaaucauaaauucuguaaccuuuccgacgcucacaagaaaaaucuguacgaucaugcccucaugucuaucauuagcaccuuucaccuguccaucccgaacuucaaucaguaugaggccaugagcugcgacuuuaacggaggcaagauuucugugcaguacaaucugucccacagcuucgcugucgaugccgcuaaccauuguggcacgaucgccaacggggugcuccaaaccuuuaugcggauggcguggggaggcucuuauaucgcccuggacuccgggaagggaaauugggauugcauuaugacaagcuaccaguaccuuaucauucagaacaccacaugggaagaccacugucaguucucucgccccuccccuaucggcuaucuggggcuccugagccaaagaacccgggauauuuacaucucccgcagacuucugggaacguuuacauggacccucucugacagcgagggcaaugaagcucccggcggguauugccugacacgguggaugcugaucgaggccgagcucaaauguuucggaaacaccgcuguugccaagugcaaugaaaaacaugaugaggaauuuugcgacaugcugcgccuuuucgauuucuguaagcaggcgauuaaaagacugaagaccccugcccagauguccauccagcucauuaacaaggcugugaaugcccugaucaacgaccaacuuauuaugaaaaaucaucugcgggauaucaugggcauccccuacugcaacuauagccgcuacuguuaucucaaucacacagucacggggaagaccucucugccuagaugcugucugguguccaacggaagcuaccucaaugagacacacuuuucugacgacauugaacagcaggcugauaacaugaucaccgagaugcugcaaaaagaguacauggaccggcagggcaagacaccgcuugggcugguggaucucuucgucuuuagcaccuccuucuaucugauuucuaucuuucugcaccuuguuaaaauucccacgcaucgccacaucgugggaaagccuugccccaaaccucauagacucaaucacaugggcauuuguagcugcggccuguacaagcaccccggggugccggucaaguggaaacggugaggacuagucccuguucccagagcccacuuuuuuuucuuuuuuugaaauaaaauagccugucuuucagaucucaaaggcucuuuucagagccaccaaaaaaaaaaaaaaaaaaaaaaaaaaaaaaaaaaaaaaaaaaaaaaaaaaaaaaaaaaaaaaaaagaauu

SEQ ID NO: 33384 - RNA, 1714 nt, Artificial Sequence
  mRNA product Design a-1 (hSL-A64-N5) comprising derived and/or modified sequence from LASV(GA391;Clade III)__CAA36645__GPCmut8 (opt5)
aggagagucccgcagucggcguccagcggcucugcuuguucgugugugugucguugcaggccuuauucaagcuuaccaugggccagaucgugaccuucuuucaagaggucccccacguuauugaagaggugaugaacaucgugcugauugcccucagcauccuggcuauucuuaaggggcuguacaaugucgccacaugcggacucaucggccuggugacguuccuucugcucuccgggagaucuuguagccugaucuauaaaggaaccuacgaacugcagacacucgagcugaacauggaaacccuuaauaugugcaugccucuguccuguacaaagaacaauucucaucacuauauucggguuggcaacgagaccgggcucgagcugacacuuaccaauacgagcauccugaaccauaaauuuugcaaucucuccgacgcgcacaagcgcaaccuguacgaucauucucugaugagcauuaucuccaccuuccaccucagcauuccgaauuuuaaccaguaugaagcuaugucuugugacuucaauggaggcaaaaucacagugcaguacaaccugucccacagcuuugccgucgaugccgcuggccauugcgggacccuugccaauggagugcugcaaacauucaugagaauggcuuggggcgggucuuauauugcccucgacuccggacggggcaacugggauuguaucaugaccagcuaccaguaccugaucauucagaacacgacaugggacgaucacugccaguuuucucgccccuccccuaucggguaucuuggacugcucagccaaagaacccgggacauuuacaucucccgcagacugcugggcacauucaccuggacccucucugauagcgagggcaaugaaacacccgggggauauugucugacgcgguggaugcuuauugaggcggagcugaagugcuuuggcaacaccgccguugcuaaguguaaugaaaaacaugacgaggaguucugcgauaugcuccgccuguuugacuucugcaagcaggccaucagacggcuuaaaaccccugcucagauguccauccagcugauuaacaaggccgugaaugcgcucaucaacgaucaacugauuaugaaaaaucaucugcgcgacaucauggggauucccuacuguaacuauagcagauacugcuaucucaaucacacaucuacaggaaagaccucccugccucgguguugccuuaucagcaacggcucuuaccugaaugaaacgaaguucagcgacgauaucgaacagcaggccgacaacaugauuacagagaugcuccaaaaagaguacaucgaucgccaggggaagaccccgcugggacuggucgaccuuuuuguguucuccaccucuuuuuaucucauuagcaucuuccugcaccuggugaaaauucccacacacagacauaucgucggcaagccuugucccaaaccucaccggcucaaucauaugggcauuugcuccugugggcuguacaagcagcccggaguuccggugagauggaaacgcugaggacuagucccuguucccagagcccacuuuuuuuucuuuuuuugaaauaaaauagccugucuuucagaucucaaaggcucuuuucagagccaccaaaaaaaaaaaaaaaaaaaaaaaaaaaaaaaaaaaaaaaaaaaaaaaaaaaaaaaaaaaaaaaaagaauu

SEQ ID NO: 33385 - RNA, 1717 nt, Artificial Sequence
  mRNA product Design a-1 (hSL-A64-N5) comprising derived and/or modified sequence from LASV(AV;Clade V)__CCA30314__GPCmut8 (opt5)
aggagagucccgcagucggcguccagcggcucugcuuguucgugugugugucguugcaggccuuauucaagcuuaccaugggccagaucgugaccuucuuucaagaggucccccacguuauugaagaggugaugaacaucgugcugauugcccucagcauccuggcuguccuuaaggggcuguacaauauugccacaugcggacucaucggccugaucacguuccuucugcucugugggagauccugcucuagcaaccuguauaaaggaguguacgaacugcagucccucgaccugaauauggagacccuuaacauguguaugccucugucuugcacaaagaauaacagccaucacuauauucggguuggcaaugauaccgggcucgaacugacacuuaccaacacauccauccugaaucauaaauuuuguaaccucucugacgcgcacaagaaagaucuguacgaccaugcucugaugagcauuaucuccaccuuccaccucagcauuccgaauuuuaaccaguaugaggccaugucuugcgauuucaauggaggcaagaucuccgugcaguacaaccugagccacucuuaugccauugacgcugccaaucauuguggcacggucgcuaacgggauccuucaaaccuuuaugcgcauggccuggggaggcuccuacaucgcgcuggauagcgggagaggaaacugggacugcauuaugacaucuuaccaguaucucaucauucagaauaccacaugggagaaccacugucaguucucccggcccagcccuaucggcuaccuggggcuucugucccaacgcaccagagauauuuauaucucucggcgccuccugggaacguuuacauggacccugagcgacuccgaaggcaaugccacacccggcggguacugccucaccagauggaugcugaucgaggcugaacuuaaguguuucggaaacaccgccguggcuaaaugcaaugagaagcaugaugaggaauuuugcgacaugcugcgccucuucgauuuuuguaaacaggccauuagccggcugaagucuccugcgcagauguccauccagcuuauuaacaaagccguuaaugcucugaucaacgaccaacucauuaugaagaaucaccugagagacaucaugggcauccccuauugcaacuacagcaaguauuguuaccugaaucacacaauuacggggaaaaccucucucccuaagugcugucuggugagcaacggauccuaccuuaaugagacacauuucucugaugacaucgaacagcaggccgauaacaugauuaccgagaugcugcaaaaagaauauauggagcggcagggcaagacaccgcucgggcuggucgaccuguucguguuuagcaccuccuucuaccuuaucagcauuuuucuccgccuggugaaaauccccacgcacagacauauugucggaaagccuugccccaaaccucaccggcugaaucauaugggcaucuguucuugcggccucuauaagcagcccgggguuccggugcgcuggaagagaugaggacuagucccuguucccagagcccacuuuuuuuucuuuuuuugaaauaaaauagccugucuuucagaucucaaaggcucuuuucagagccaccaaaaaaaaaaaaaaaaaaaaaaaaaaaaaaaaaaaaaaaaaaaaaaaaaaaaaaaaaaaaaaaaagaauu

SEQ ID NO: 33386 - RNA, 1714 nt, Artificial Sequence
  mRNA product Design a-1 (hSL-A64-N5) comprising derived and/or modified sequence from LASV(Togo/2016/7082;Clade VI)__AMR44577__GPCmut8 (opt5)
aggagagucccgcagucggcguccagcggcucugcuuguucgugugugugucguugcaggccuuauucaagcuuaccaugggccagaucauuaccuucuuucaagaggugccccacgucaucgaagagguuaugaacauugugcugaucgcccucagccugcuugcuauucugaaggggguguacaaugucgccacaugcggaaucaucggccucgugacguuccuguuucuuugugggagauccugcucucugauuuauaaaggaagcuacgaacuccagacccuggagcugaacauggaaacacucaauauguguaugccucuguccugcaccaagaacucuagccaucacuauauccggguuggcaaugagacagggcuugagcugacccucacaaacaccuccauuaucaaucauaaauucuguaaccugucugacgcgcacaagcgcaaucuuuacgaucaugcucugaugagcauucucuccacguuucaccugagcaucccgaacuucaaucaguaugaagccaugucuugcgacuuuaacggaggcaaaauuuccgugcaguacaaucugagccacgccuaugcugucgaugccgcugagcauuguggcaccguggccaacgggguucuccaaacauucaugagaauggcguggggaggcucuuacaucgcccuggacuccgggcggggaaauugggauugcaucaugaccagcuaccaguaucuuauuauccagaacacaaccugggaagaccacugucaguuuucucgccccuccccuauuggcuaccuggggcuccugagccaaagaacgcgggauaucuauauuucccgcagacuucugggaacauucaccuggacacucucugacagcgagggcaacgagacccccggcggguacugccugacccgguggaugcugaucgaagcugagcucaaguguuuuggaaauacagccguggcuaagugcaacgaaaaacaugaugaggaguucugcgacaugcugcgccuuuuugauuucuguaagcaggccauccagagacugaaauccccugcgcagaugagcauucaacucaucaauaaggccgucaacgcucugauuaaugaccagcuuaucaugaaaaaccaucugcgggauaugaugggcauucccuauugcaauuacucuaaguauuguuaccucaaccacacguccagcgggcgcaccucucugccuaagugcugucuggugagcaauggauccuaccucaacgaaacacacuucucugacgacaucgagcagcaagccgauaauaugaucaccgaaaugcugcagaaagaguauauugacagacagggcaagacaccgcuugggcugguggaucucuuugucuucagcaccuccuuuuaccugaucagcauuuuccugcaccuuaucaaaauucccacgcaucggcacaucguuggaaagccuugccccaaaccucaucgccucaaccacaugggcauuuguucuugcggccuguauaagcagcccggggugccgacaagauggaaacggugaggacuagucccuguucccagagcccacuuuuuuuucuuuuuuugaaauaaaauagccugucuuucagaucucaaaggcucuuuucagagccaccaaaaaaaaaaaaaaaaaaaaaaaaaaaaaaaaaaaaaaaaaaaaaaaaaaaaaaaaaaaaaaaaagaauu

SEQ ID NO: 33387 - RNA, 1714 nt, Artificial Sequence
  mRNA product Design a-1 (hSL-A64-N5) comprising derived and/or modified sequence from LASV(KAK-428;Clade n.d. (VII))__ANH09740__GPCmut8 (opt5)
aggagagucccgcagucggcguccagcggcucugcuuguucgugugugugucguugcaggccuuauucaagcuuaccaugggccagaucgugaccuucuuucaagaggucccccacguuauugaagaggugaugaacaucgugcugauugcccucagccugcuugcuauccugaaggggcucuacaauuucgccacaugcggagucauuggccugaucacguuucuucugcucugugggagauccugcucugcgaccuauaaaggacaguacgaacugcagacacuggagcucaacauggaaagccugaauauguguaugccucuuuccugcaccaagaacaauucucaucacuauauccgggcuggcaacaauacagggcuggagcucacccugacaaacaccagcauuaucucccauaaauucuguaaucuuucugacgcccacaagaaaaaccuguacgaucauacgcucaugagcauuaucaccacauuucaccuguccauuccgaauuucaaccaguaugaggccaugagcugcgacuuuaauggaggcaagaucucuauucaauacaaccugucccacagcuaugcuggcgaugccgcucagcauugugggaccguggccaauggaguucuccagacauucaugcgcauggcguggggcgggucuuaccuggcccuugacuccggaagacggggcugggauugcaucaucagcucuuaccaguaucugauuauccaaaacaccacgugggacgaucacugucaguuuucccgccccagcccuauuggguaccucggauucgugucccagaagacaagagacaucuauauuucucggcgccugcuuggcaccuuuacauggacccugagcgauuccgaaggccaugacaugcccgggggauacugccucaccagauggaugcugaucgaggcugaucugaaauguuucggcaacacagccgucgcuaagugcaaugaaaaacacgacgaggaguuuugcgauauguggcgccucuucgacuucuguaagcaggccauccaacggcugaaagcgccugcccagaugaacauucagcuuaucaauaaggcugugaacgcccugauuaaugaccaacucaugaugaagaaccaccugagagauaucauggggauucccuauugcaauuacagcaaauuuuguuaucuuaacaauacgaccacaggacggaccucucugccucgcugcugucucaucuccaacggcagcuaccugaaugaaacacauuucucugacgauaucgagcagcaggcugacaacaugauuaccgaaaugcugcagaaggaguacauggauagacaagggaaaacgccgcucggacugguugaccuuuuuguguucagcacauccuuuuaucugaucaccauuuuccuccaccuggucaagauccccacccaucggcacauugugggcaaaccuugccccaagccucaucgccugaaucacaugggcaucuguucuugcgggcuuuacaaacagcccggagugccggucagauggaagcggugaggacuagucccuguucccagagcccacuuuuuuuucuuuuuuugaaauaaaauagccugucuuucagaucucaaaggcucuuuucagagccaccaaaaaaaaaaaaaaaaaaaaaaaaaaaaaaaaaaaaaaaaaaaaaaaaaaaaaaaaaaaaaaaaagaauu

SEQ ID NO: 33388 - RNA, 1714 nt, Artificial Sequence; identical to SEQ ID NO: 33382
  mRNA product Design a-1 (hSL-A64-N5) comprising derived and/or modified sequence from LASV(Pinneo-NIG-1969;Clade I)__AIT17836__GPCmut8 (opt5)

SEQ ID NO: 33389 - RNA, 1714 nt, Artificial Sequence
  mRNA product Design a-1 (hSL-A64-N5) comprising derived and/or modified sequence from LASV(ISTH0009-NIG-2011;Clade II)__AIT17404__GPCmut8 (opt5)
aggagagucccgcagucggcguccagcggcucugcuuguucgugugugugucguugcaggccuuauucaagcuuaccaugggccagaucauuaccuucuuucaagaggugccccacgucaucgaagagguuaugaacauugugcugaucgcccucagccugcuugcuauucugaaggggaucuacaauguggccacaugcggacucuucggccuggucuccuuucuucugcucugugggagaucuugcagcacgaccuauaaaggaguguacgaacugcagacacuggagcucgacauggcgucccugaacauguguaugccucuuucuugcaccaagaauaacagccaucacuauaucaugguuggcaaugaaacagggcuggagcucacccugacaaacaccuccauuaucaaucauaaauucuguaaccuuucugaugcucacaagaaaaaucuguacgaccaugcccucaugagcauuaucuccacguuucaccugagcauuccgaacuucaaucaguaugaggccaugucuugcgauuuuaacggaggcaagaucuccgugcaguacaaucugagccacgcuuaugccgucgacgcugccaaccauuguggcaccauugcgaauggggugcuccaaacauucaugcggauggccuggggaggcucuuacaucgcucuggauuccgggaagggaagcugggacugcaucaugaccucuuaccaguaucuuauuauccagaacacaaccugggaagaucacugucaguuuucccgccccagcccuauuggcuaccuggggcuccugucccaaagaacgcgggacaucuauauuucucgcagacuucugggaacauucaccuggacacucagcgauuccgagggcaacgaaacccccggcggguacugccugacccgguggaugcugaucgaggccgagcucaaauguuuuggaaauacagcuguugccaagugcaacgaaaaacaugacgaggaguucugcgauaugcugcgccuuuuugacuucuguaagcaggcgaucagacggcugaaaacgccugcccagaugagcauucagcucaucaauaaggcugugaacgcccugauuaaugaucaacuuaucaugaagaaccaucugcgcgacauuaugggcauccccuauugcaauuacucuaaauauuguuaccucaaccacaccgucacagggaagaccucccugccuagaugcugucuggugagcaauggaucuuaccucaacgaaacacacuucagcgacgauaucgaacagcaggcugacaauaugauuaccgagcugcuucaaaaagaguauauggaucggcagggcaagacgccgcuggggcucguggaccuguuugucuucuccacaucuuuuuaccugaucagcauuuuccuucaccucaucaaaauucccacccaucgccacaucaccggaaagccuugccccaaaccucauagacugaaccacaugggcauuuguuccugcggccuguauaagcaccccgggguuccggugaaguggaaacggugaggacuagucccuguucccagagcccacuuuuuuuucuuuuuuugaaauaaaauagccugucuuucagaucucaaaggcucuuuucagagccaccaaaaaaaaaaaaaaaaaaaaaaaaaaaaaaaaaaaaaaaaaaaaaaaaaaaaaaaaaaaaaaaaagaauu

SEQ ID NO: 33390 - RNA, 1714 nt, Artificial Sequence
  mRNA product Design a-1 (hSL-A64-N5) comprising derived and/or modified sequence from LASV(ISTH2010-NIG-2012;Clade II)__AIT17482__GPCmut8 (opt5)
aggagagucccgcagucggcguccagcggcucugcuuguucgugugugugucguugcaggccuuauucaagcuuaccaugggccagaucauuaccuucuuucaagaggugccccacgucaucgaagagguuaugaacauugugcugaucgcccucagccugcuugcuauucugaaggggaucuacaauguggccacaugcggacucuucggccuggucuccuuucuucugcucugugggagaucuugcagcacgaccuauaaaggaguguacgaacugcagacacuggagcucgacauggcgucccugaacauguguaugccucuuucuugcaccaagaauaacagccaucacuauaucaugguuggcaaugaaacagggcuggagcucacccugacaaacaccuccauuaucaaucauaaauucuguaaccuuucugaugcucacaagaaaaaucuguacgaccaugcccucaugagcauuaucuccacguuucaccugagcauuccgaacuucaaucaguaugaggccaugucuugcgauuuuaacggaggcaagaucuccgugcaguacaaucugagccacgcuuaugccgucgacgcugccaaccauuguggcaccauugcgaauggggugcuccaaacauucaugcggauggccuggggaggcucuuacaucgcucuggauuccgggaagggaagcugggacugcaucaugaccucuuaccaguaucuuauuauccagaacauuacaugggaagaucacugucaguuuucccgccccagcccuaucggcuaccuggggcuccugucccaaagaacccgggacauuuauaucucucgcagacuucugggaacguucacauggacccucagcgauuccgagggcaacgaaacacccggcggguacugccugacccgguggaugcugaucgaggccgagcucaaauguuuuggaaauaccgcuguugccaagugcaacgaaaaacaugacgaggaguucugcgauaugcugcgccuuuuugacuucuguaagcaggcgauuagacggcugaaaacgccugcccagaugagcauccagcucauuaauaaggcugugaacgcccugaucaaugaucaacuuauuaugaagaaccaucugcgcgacaucaugggcauccccuauugcaauuacucuaaauauuguuaccucaaccacacagucaccgggaagacaucccugccuagaugcugucuggugagcaauggaucuuaccucaacgaaacccacuucagcgacgauauugaacagcaggcugacaauaugaucacagagcugcuucaaaaagaguauauugaucggcagggcaagaccccgcuggggcucguggaccuguuugucuucuccacgucuuuuuaccugaucagcauuuuccuucaccucguuaaaauccccacacaucgccacguggugggaaagccuugccccaaaccucauagacugaaccacaugggcauuuguuccugcggccuguauaagcaccccggggucccggugaaguggaaacggugaggacuagucccuguucccagagcccacuuuuuuuucuuuuuuugaaauaaaauagccugucuuucagaucucaaaggcucuuuucagagccaccaaaaaaaaaaaaaaaaaaaaaaaaaaaaaaaaaaaaaaaaaaaaaaaaaaaaaaaaaaaaaaaaagaauu

SEQ ID NO: 33391 - RNA, 1714 nt, Artificial Sequence
  mRNA product Design a-1 (hSL-A64-N5) comprising derived and/or modified sequence from LASV(Lassa virus/H.sapiens-wt/NGA/2015/ISTH_0543;Clade II)__AVO03639__GPCmut8 (opt5)
aggagagucccgcagucggcguccagcggcucugcuuguucgugugugugucguugcaggccuuauucaagcuuaccaugggccagaucauuaccuucuuucaagaggugccccacgucaucgaagagguuaugaacauugugcugaucgcccucagccugcuugcuauucugaaggggaucuacaauguggccacaugcggacucuucggccuggucuccuuucuucugcucugugggagaucuugcagcacgaccuauaaaggaguguacgaacugcagacacuggagcucgacauggcgaaccugaauauguguaugccucuuuccugcaccaagaacaauucucaucacuauaucaugguuggcaacgaaacagggcuggagcucacccugacaaauaccagcauuaucaaccauaaauucuguaaucuuuccgaugcucacaagaaaaaccuguacgaccaugcccucaugucuauuaucagcacguuucaccuguccauuccgaauuucaaccaguaugaggccaugagcugcgauuuuaauggaggcaagaucucugugcaguacaaccugucccacaccuaugcugucgacgccgcuaaucauuguggcacaauugccaacggggugcuccaaaccuucaugcggauggcguggggaggcagcuacaucgcccuggauucugggaagggauccugggacugcaucaugacaagcuaccaguaucuuguuauucagaacaccacgugggaagaucacugucaguuuucucgccccuccccuaucggcuaccuggggcuccugagccaaagaacacgggacauuuauaucucccgcagacuucugggaaccuucacauggacccucucugauagcgagggcaaugaaacccccggcggguacugccugacacgguggaugcugauugaggcugagcucaaauguuuuggaaacacggccguggcuaagugcaaugaaaaacaugacgaggaguucugcgauaugcugcgccuuuuugacuucuguaagcaggccaucagacggcugaaaaccccugcgcagauguccauccagcucauuaacaaggccgucaaugcucugaucaacgaucaacuuauuaugaagaaucaucugcgcgacaucaugggcauucccuauugcaacuacagcaaauauuguuaccucaaucacacagugaccgggaagacaucucugccuagaugcugucugguguccaacggaagcuaccucaaugaaacccacuucucugacgauaucgaacagcaggccgacaacaugaucacggagcugcuucaaaaagaguauauugaucggcagggcaagacaccgcuggggcucgucgaccuguuuguuuucagcaccuccuuuuaccugaucucuauuuuccuucaccucgugaaaauccccacccaucgccacauuacaggaaagccuugccccaaaccucauagacugaaucacaugggcaucuguagcugcggccuguauaagcaccccggggugccggucaaguggaaacggugaggacuagucccuguucccagagcccacuuuuuuuucuuuuuuugaaauaaaauagccugucuuucagaucucaaaggcucuuuucagagccaccaaaaaaaaaaaaaaaaaaaaaaaaaaaaaaaaaaaaaaaaaaaaaaaaaaaaaaaaaaaaaaaaagaauu

SEQ ID NO: 33392 - RNA, 1714 nt, Artificial Sequence
  mRNA product Design a-1 (hSL-A64-N5) comprising derived and/or modified sequence from LASV(Lassa virus/H.sapiens-wt/NGA/2016/ISTH_0009;Clade II)__AVO03571__GPCmut8 (opt5)
aggagagucccgcagucggcguccagcggcucugcuuguucgugugugugucguugcaggccuuauucaagcuuaccaugggccagaucauuaccuucuuucaagaggugccccacgucaucgaagagguuaugaacauugugcugaucgcccucagccugcuugcuauucugaaggggaucuacaauguggccacaugcggacuccugggccuugucuccuuccugcuccugugugggagaucuugcagcacgaccuauaaaggaguguacgaacugcagacacucgagcuggacauggcgucccuuaacauguguaugccucugucuugcaccaagaauaacagccaucacuauaucaugguuggcaaugaaacagggcucgagcugacccuuacaaacaccuccauuaucaaucauaaauuuuguaaccugucugaugcucacaagaaaaaucucuacgaccaugcccugaugagcauuaucuccacguuccaccugagcauuccgaacuuuaaucaguaugaggccaugucuugcgauuucaacggaggccggaucuccgugcaguacaaucucagccacucuuaugcugucgacgccgcuaaccauuguggcaccauugccaauggggugcugcaaacauuuaugcgcauggcguggggaggcuccuacaucgcccuugauagcgggaagggaucuugggacugcaucaugaccuccuaccaguaucugauuauccagaacacaaccugggaagaucacugucaguucagcagacccuccccuauuggcuaccucgggcugcuuucucaacggacgcgcgacaucuauauuagcagacggcugcucggaacauuuaccuggacacuguccgauagcgagggcaacgaaacccccggcggguacugccugacccgcuggaugcucaucgaggcugagcugaaguguuucggaaauacagccguugcuaaaugcaacgaaaagcaugacgaggaauuuugcgauaugcuuagacuguucgacuuuuguaaacaggccauccggcgccucaagacgccugcgcagaugucuauucagcugaucaauaaagccgugaacgcucuuauuaaugaucaacugaucaugaagaaccaccucagagacauuaugggcauccccuauugcaauuacuccaaguauuguuaccugaaccacaccgucacagggaaaaccagccugccucggugcugucucgugucuaauggaagcuaccugaacgagacacauuucuccgacgauaucgaacagcaggccgacaauaugauuaccgagcuucugcaaaaggaguauaucgaucgccagggcaaaacgccgcucgggcugguggaccuguucgucuuuucuaccagcuucuaccuuauuuccaucuuucuccaccugguuaagauucccacacauagacacaucaccggaaaaccuugccccaagccucaucggcugaaccacaugggcauuuguagcugcggccucuauaaucaccccggggugccggugaaauggaagcgcugaggacuagucccuguucccagagcccacuuuuuuuucuuuuuuugaaauaaaauagccugucuuucagaucucaaaggcucuuuucagagccaccaaaaaaaaaaaaaaaaaaaaaaaaaaaaaaaaaaaaaaaaaaaaaaaaaaaaaaaaaaaaaaaaagaauu

SEQ ID NO: 33393 - RNA, 1714 nt, Artificial Sequence
  mRNA product Design a-1 (hSL-A64-N5) comprising derived and/or modified sequence from LASV(Lassa virus/H.sapiens-wt/NGA/2016/ISTH_0017;Clade II)__AVO03567__GPCmut8 (opt5)
aggagagucccgcagucggcguccagcggcucugcuuguucgugugugugucguugcaggccuuauucaagcuuaccaugggccagaucauuaccuucuuucaagaggugccccacgucaucgaagagguuaugaacauugugcugaucgcccucagccugcuugcuauucugaaggggaucuacaauguggccacaugcggacucuucggccuggucuccuuucuucugcucugugggagaucuugcagcacgaccuauaaaggaguguacgaacugcagacacuggagcucgacauggcgucccugaacauguguaugccucuuucuugcaccaagaauaacagccaucacuauaucaugguuggcaaugaaacagggcuggagcucacccugacaaacaccuccauuaucaaucauaaauucuguaaccuuucugaugcucacaagaaaaaucuguacgaccaugcccucaugagcauuaucuccacguuucaccugagcauuccgaacuucaaucaguaugaggccaugucuugcgauuuuaacggaggcaagaucuccgugcaguacaaucugagccacaccuaugcuauugacgccgcuaaccauuguggcacaaucgccaaugggguccuccaaaccuucaugcggauggcguggggaggcucuuacaucgcccuggauuccgggaagggaagcugggacugcauuaugacaucuuaccaguaucuuaucauucagaacaccacgugggaagaucacugucaguuuucccgccccagcccuaucggcuaccuggggcuccugucccaaagaacacgggacauuuauaucucucgcagacuucugggaaccuucacauggacccucagcgauuccgagggcaacgaaacccccggcggguacugccugacacgguggaugcugaucgaggcugagcucaaauguuuuggaaauacggccguggcuaagugcaacgaaaaacaugacgaggaguucugcgauaugcugcgccuuuuugacuucuguaagcaggccauuagacggcugaaaaccccugcgcagaugagcauccagcucauuaauaaggccguuaacgcucugaucaaugaucaacuuauuaugaagaaccaucugcgcgacaucaugggcauccccuauugcaauuacucuaaauauuguuaccucaaccacacagugaccgggaagacaucccugccuagaugcugucuggucagcaauggaucuuaccucaacgaaacccacuucagcgacgauauugaacagcaggccgacaauaugaucacggagcugcuucaaaaagaguauauggaucggcagggcaagacaccgcuggggcucguggaccuguuuguguucuccaccucuuuuuaccugauuagcaucuuccuucaccucguccgcauucccacccauagacacguuaucggaaaaccuugccccaagccucaucggcugaaccacaugggcauuuguuccugcggccuguauaaacaccccggggugccggugaaguggaagcgcugaggacuagucccuguucccagagcccacuuuuuuuucuuuuuuugaaauaaaauagccugucuuucagaucucaaaggcucuuuucagagccaccaaaaaaaaaaaaaaaaaaaaaaaaaaaaaaaaaaaaaaaaaaaaaaaaaaaaaaaaaaaaaaaaagaauu

SEQ ID NO: 33394 - RNA, 1714 nt, Artificial Sequence
  mRNA product Design a-1 (hSL-A64-N5) comprising derived and/or modified sequence from LASV(Lassa virus/H.sapiens-wt/NGA/2018/ISTH_0959;Clade II)__AVV65099__GPCmut8 (opt5)
aggagagucccgcagucggcguccagcggcucugcuuguucgugugugugucguugcaggccuuauucaagcuuaccaugggccagaucauuaccuucuuucaagaggugccccacgucaucgaagagguuaugaacauugugcugaucgcccucagccugcuugcuauucugaaggggaucuacaauguggucacaugcggacucuucggccugguguccuuucuucugcucugugggagaucuugcagcacgaccuauaaaggaguuuacgaacugcagacacuggagcucgacauggccucccugaacauguguaugccucuuucuugcaccaagaauaacagccaucacuauaucauggugggcaaugaaacagggcuggagcucacccugacaaacaccuccauuaucaaucauaaauucuguaaccuuucugaugcgcacaagaaaaaucuguacgaccaugcucucaugagcauuaucuccacguuucaccugagcauuccgaacuucaaucaguaugaggccaugucuugcgauuuuaacggaggcaagaucuccguccaguacaaucugagccacgccuaugcuauugacgccgcuaaccauuguggcaccaucgccaauggggugcuccaaacauucaugcggauggcguggggaggcucuuacaucgcccuggauuccgggaagggaagcugggacugcauuaugaccucuuaccaguaucuuaucauucagaacacaaccugggaagaucacugucaguuuucccgccccagcccuaucggcuaccuggggcuccugucccaaagaacgcgggacauuuauaucucucgcagacuucugggaacauucaccuggacacucagcgauuccgagggcaacgaaacccccggcggguacugccugacccgguggaugcugaucgaggcugagcucaaauguuuuggaaauacagccguugcuaagugcaacgaaaaacaugacgaggaguucugcgauaugcugcgccuuuuugacuucuguaagcaggccauuagacggcugaaaacgccugcgcagaugagcauccagcucauuaauaaggccgugaacgcucugaucaaugaucaacuuauuaugaagaaccaucugcgcgacaucaugggcauccccuauugcaauuacucuaaauauuguuaccucaaccacaccgucacagggaagaccucccugccuagaugcugucuggugagcaauggaucuuaccucaacgaaacacacuucagcgacgauauugaacagcaggccgacaauaugaucaccgagcugcuucaaaaagaguauauugaucggcagggcaagacgccgcuggggcucguggaccuguuugucuucuccacaucuuuuuaccugaucagcauuuuccuucaccucguuaaaauccccacccaucgccacgugauuggaaagccuugccccaaaccucauagacugaaccacaugggcaucuguuccugcggccuguauaagcaccccggggugccggucaaguggaaacggugaggacuagucccuguucccagagcccacuuuuuuuucuuuuuuugaaauaaaauagccugucuuucagaucucaaaggcucuuuucagagccaccaaaaaaaaaaaaaaaaaaaaaaaaaaaaaaaaaaaaaaaaaaaaaaaaaaaaaaaaaaaaaaaaagaauu

SEQ ID NO: 33395 - RNA, 1714 nt, Artificial Sequence
  mRNA product Design a-1 (hSL-A64-N5) comprising derived and/or modified sequence from LASV(LASV003-NIG-2008;Clade II)__AIT17580__GPCmut8 (opt5)
aggagagucccgcagucggcguccagcggcucugcuuguucgugugugugucguugcaggccuuauucaagcuuaccaugggccagaucauuaccuucuuucaagaggugccccacgucaucgaagagguuaugaacauugugcugaucgcccucagccugcuugcuauucugaaggggaucuacaauguggccacaugcggacucuucggccuggucuccuuucuucugcucugugggagaucuugcagcacgaccuauaaaggaguguacgaacugcagacacuggagcucgacauggcgucccugaacauguguaugccucuuucuugcaccaagaauaacagccaucacuauaucaugguuggcaaugaaacagggcuggagcucacccugacaaacaccuccauuaucaaucauaaauucuguaaccuuucugaugcucacaagaaaaaucuguacgaccaugcccucaugagcauuaucuccacguuucaccugagcauuccgaacuucaaucaguaugaggccaugucuugcgauuuuaacggaggcaagaucuccgugcaguacaaucugagccacaccuaugcugucgacgccgcuaaccauuguggcacaauugccaauggggugcuccaaaccuucaugcggauggcguggggaggcucuuacaucgcccuggauuccgggaagggaagcugggacugcaucaugacaucuuaccaguaucuuauuauccagaacaccacgugggaagaucacugucaguuuucccgccccagcccuauuggcuaccuggggcuccugucccaaagaacacgggacaucuauauuucucgcagacuucugggaaccuucacauggacccucagcgauuccgagagcaacgaaacccccggcggcuacugccugacacgguggaugcugaucgaggcugagcucaaauguuuugggaauacggccguugcuaagugcaacgaaaaacaugacgaggaguucugcgauaugcugcgccuuuuugacuucuguaagcaggccaucagacggcugaaagcgccugcccagaugucuauucagcucaucaauaaggcugugaacgcccugauuaaugaucaacuuaucaugaagaaccaucugcgcgacauuaugggaauccccuauugcaauuacuccaaauauuguuaccucaaccacaccgucacaggcagaaccagccugccucggugcugucuggugucuaaugggagcuaccucaacgaaacacacuucuccgacgauaucgaacagcaggcugacaauaugauuaccgagcugcuucaaaaggaguauauggaucgccagggaaaaacgccgcugggccucguggaccuguuugucuucucuaccagcuuuuaccugaucuccauuuuccuucaccucguuaagauccccacacauagacacgugauugggaaaccuugccccaagccucaucggcugaaccacaugggaaucuguagcugcggccuguauaaacaccccggcgugccggucaaguggaagcgcugaggacuagucccuguucccagagcccacuuuuuuuucuuuuuuugaaauaaaauagccugucuuucagaucucaaaggcucuuuucagagccaccaaaaaaaaaaaaaaaaaaaaaaaaaaaaaaaaaaaaaaaaaaaaaaaaaaaaaaaaaaaaaaaaagaauu

SEQ ID NO: 33396 - RNA, 1714 nt, Artificial Sequence
  mRNA product Design a-1 (hSL-A64-N5) comprising derived and/or modified sequence from LASV(LASV035-NIG-2009;Clade II)__AIT17588__GPCmut8 (opt5)
aggagagucccgcagucggcguccagcggcucugcuuguucgugugugugucguugcaggccuuauucaagcuuaccaugggccagaucauuaccuucuuucaagaggugccccacgucaucgaagagguuaugaacauugugcugaucgcccucagccugcuugcuauucugaaggggaucuacaauguggccacaugcggacucuucggccuggucuccuuucuucugcucugugggagaucuugcagcacgaccuauaaaggaguguacgaacugcagacacuggagcucgacauggcgucccugaacauguguaugccucuuucuugcaccaagaauaacagccaucacuauaucaugguuggcaaugaaacagggcuggagcucacccugacaaacaccuccauuaucaaucauaaauucuguaaccuuucugaugcucacaagaaaaaucuguacgaccaugcccucaugagcauuaucuccacguuucaccugagcauuccgaacuucaaucaguaugaggccaugucuugcgauuuuaacggaggcaagaucuccgugcaguacaaucugagccacgcuuaugccgucgacgcugccaaccauuguggcaccauugcgaauggggugcuccaaacauucaugcggauggccuggggaggcucuuacaucgcucuggauuccgggaagggaagcugggacugcaucaugaccucuuaccaguaucuuauuauccagaacacaaccugggaagaucacugucaguuuucccgccccagcccuauuggcuaccuggggcuccugucccaaagaacgcgggacaucuauauuucucgcagacuucugggaacauucaccuggacacucagcgauuccgagggcaacgaaacccccggcggguacugccugacccgguggaugcugaucgaggccgagcucaaauguuuuggaaauacagcuguugccaagugcaacgaaaaacaugacgaggaguucugcgauaugcugcgccuuuuugacuucuguaagcaggcgaucagacggcugaaagccccugcucagaugagcauucagcucaucaauaaggccgugaacgcucugauuaaugaucaacuuaucaugaagaaccaucugcgcgacauuaugggcauccccuauugcaauuacucuaaauauuguuaccucaaccacacggucaccgggaagacaucccugccuagaugcugucuggugagcaauggaucuuaccucaacgaaacccacuucagcgacgauaucgaacagcaggccgacaauaugauuacagagcugcuucaaaaagaguauaucgaucggcagggcaagaccccgcuggggcucguggaccuguuugucuucuccacgucuuuuuaccugauuagcaucuuccuucaccucguuaaaauucccacacaucgccacgugaucggaaagccuugccccaaaccucauagacugaaccacaugggcauuuguuccugcggccuguauaagcaccccggggugccggucaaguggaaacggugaggacuagucccuguucccagagcccacuuuuuuuucuuuuuuugaaauaaaauagccugucuuucagaucucaaaggcucuuuucagagccaccaaaaaaaaaaaaaaaaaaaaaaaaaaaaaaaaaaaaaaaaaaaaaaaaaaaaaaaaaaaaaaaaagaauu

SEQ ID NO: 33397 - RNA, 1714 nt, Artificial Sequence
  mRNA product Design a-1 (hSL-A64-N5) comprising derived and/or modified sequence from LASV(LASV1000-NIG-2009;Clade II)__AIT17782__GPCmut8 (opt5)
aggagagucccgcagucggcguccagcggcucugcuuguucgugugugugucguugcaggccuuauucaagcuuaccaugggccagaucauuaccuucuuucaagaggugccccacgucaucgaagagguuaugaacauugugcugaucgcccucagccugcuugcuauucugaaggggaucuacaauguggccacaugcggacucuucggccuggucuccuuucuucugcucugugggagaucuugcagcacgaccuauaaaggaguguacgaacugcagacacuggagcucgacauggcgucccugaacauguguaugccucuuucuugcaccaagaauaacagccaucacuauaucaugguuggcaaugaaacagggcuggagcucacccugacaaacaccuccauuaucaaucauaaauucuguaaccuuucugaugcucacaagaaaaaucuguacgaccaugcccucaugagcauuaucuccacguuucaccugagcauuccgaacuucaaucaguaugaggccaugucuugcgauuuuaacggaggcaagaucuccgugcaguacaaucugagccacaccuaugcugucgacgccgcuaaccauuguggcacaauugccaauggggugcuccaaaccuucaugcggauggcguggggaggcucuuacaucgcccuggauuccgggaagggaagcugggacugcaucaugacaucuuaccaguaucuuauuauccagaacaccacgugggaagaucacugucaguuuucccgccccagcccuauuggcuaccuggggcuccugucccaaagaacacgggacaucuauauuucucgcagacuucugggaaccuucacauggacccucagcgauuccgagggcaacgaaacccccggcggguacugccugacacgguggaugcugaucgaggcugagcucaaauguuuuggaaauacggccguugcuaagugcaacgaaaaacaugacgaggaguucugcgauaugcugcgccuuuuugacuucuguaagcaggccaucaaaagacugaagaccccugcgcagaugagcauucagcucaucaauaaggccgugaacgcucugauuaaugaucaacuuaucaugaaaaaccaucugcgggacauuaugggcauccccuauugcaauuacucuaaguauuguuaccucaaccacacagucaccgggaaaacaucccugccucgcugcugucuggugagcaauggaucuuaccucaacgaaacccacuucagcgacgauaucgaacagcaggccgacaauaugauuacggagcugcuucaaaaggaguauaucgauagacagggcaaaacaccgcuggggcucguggaccuguuugucuucuccaccucuuuuuaccugauuagcaucuuccuucaccucguuaagauucccacccaucggcacguggugggaaaaccuugccccaagccucaucgccugaaccacaugggcaucuguuccugcggccuguauaagcaccccggggucccggugaaauggaagagaugaggacuagucccuguucccagagcccacuuuuuuuucuuuuuuugaaauaaaauagccugucuuucagaucucaaaggcucuuuucagagccaccaaaaaaaaaaaaaaaaaaaaaaaaaaaaaaaaaaaaaaaaaaaaaaaaaaaaaaaaaaaaaaaaagaauu

SEQ ID NO: 33398 - RNA, 1714 nt, Artificial Sequence
  mRNA product Design a-1 (hSL-A64-N5) comprising derived and/or modified sequence from LASV(LASV221-NIG-2010;Clade II)__AIT17624__GPCmut8 (opt5)
aggagagucccgcagucggcguccagcggcucugcuuguucgugugugugucguugcaggccuuauucaagcuuaccaugggccagaucauuaccuucuuucaagaggugccccacgucaucgaagagguuaugaacauugugcugaucgcccucagccugcuugcuauucugaaggggaucuacaauguggccacaugcggacucuucggccuggucuccuuucuucugcucugugggagaucuugcagcacgaccuauaaaggaguguacgaacugcagacacuggagcucgacauggcgucccugaacauguguaugccucuuucuugcaccaagaauaacagccaucacuauaucaugguuggcaaugaaacagggcuggagcucacccugacaaacaccuccauuaucaaucauaaauucuguaaccuuucugaugcucacaagaaaaaucuguacgaccaugcccucaugagcauuaucuccacguuucaccugagcauuccgaacuucaaucaguaugaggccaugucuugcgauuuuaacggaggcaagaucuccgugcaguacaaucugagccacaccuaugcuauugacgccgcuaaccauuguggcacaaucgccaaugggguccuccaaaccuucaugcggauggcguggggaggcucuuacaucgcccuggauuccgggaagggaagcugggacugcauuaugacaucuuaccaguaucuuaucauucagaacaccacgugggaagaucacugucaguuuucccgccccagcccuaucggcuaccuggggcuccugucccaaagaacacgggacauuuauaucucucgcagacuucugggaaccuucacauggacccucagcgauuccgagggcaacgaaacccccggcggguacugccugacacgguggaugcugaucgaggcugagcucaaauguuuuggaaauacggccguggcuaagugcaacgaaaaacaugacgaggaguucugcgauaugcugcgccuuuuugacuucuguaagcaggccauuagacggcugaaaaccccugcgcagaugagcauccagcucauuaauaaggccguuaacgcucugaucaaugaucaacuuauuaugaagaaccaucugcgcgacaucaugggcauccccuauugcaauuacucuaaauauuguuaccucaaccacacagugaccgggaagacaucccugccuagaugcugucuggucagcaauggaucuuaccucaacgaaacccacuucagcgacgauauugaacagcaggccgacaauaugaucacggagaugcugcaaaaagaguauauggaucggcagggcaagacaccgcuugggcugguggaccucuuuguguucuccaccucuuuuuaccugauuagcaucuuccugcaccuugucaaaauucccacccaucgccacguuaucggaaagccuugccccaaaccucauagacucaaccacaugggcauuuguuccugcggccuguauaagcaccccggggugccggugaaguggaaacggugaggacuagucccuguucccagagcccacuuuuuuuucuuuuuuugaaauaaaauagccugucuuucagaucucaaaggcucuuuucagagccaccaaaaaaaaaaaaaaaaaaaaaaaaaaaaaaaaaaaaaaaaaaaaaaaaaaaaaaaaaaaaaaaaagaauu

SEQ ID NO: 33399 - RNA, 1714 nt, Artificial Sequence
  mRNA product Design a-1 (hSL-A64-N5) comprising derived and/or modified sequence from LASV(LASV237-NIG-2010;Clade II)__AIT17638__GPCmut8 (opt5)
aggagagucccgcagucggcguccagcggcucugcuuguucgugugugugucguugcaggccuuauucaagcuuaccaugggccagaucauuaccuucuuucaagaggugccccacgucaucgaagagguuaugaacauugugcugaucgcccucagccugcuugcuauucugaaggggaucuacaauguggccacaugcggacucuucggccuggucuccuuucuucugcucugugggagaucuugcagcacgaccuauaaaggaguguacgaacugcagacacuggagcucgacauggcgucccugaacauguguaugccucuuucuugcaccaagaauaacagccaucacuauaucaugguuggcaaugaaacagggcuggagcucacccugacaaacaccuccauuaucaaucauaaauucuguaaccuuucugaugcucacaagaaagaccuguacgaucaugcccucaugagcauuaucuccacguuucaccugagcauuccgaauuucaaccaguaugaggccaugucuugcgacuuuaauggaggcaagaucuccgugcaguacaaccugagccacaccuaugcugucgaugccgcuaaucauuguggcacaauugccaacggggugcuccaaaccuucaugcggauggcguggggaggcucuuacaucgcccuggacuccgggaagggaagcugggauugcaucaugacaucuuaccaguaucuuauuauccagaauaccacgugggaagaccacugucaguuuucccgccccagcccuauuggcuaccuggggcuccugucccaaagaacacgggauaucuauauuucucgcagacuucugggaaccuucacauggacccucagcgacuccgagggcaacgaaacccccggcggguacugccugacacgguggaugcugaucgaggcugagcucaaauguuuuggaaacacggccguugcuaagugcaaugaaaaacaugaugaggaguucugcgacaugcugcgccuuuuugauuucuguaagcaggccaucagacggcugaaaaccccugcgcagaugagcauucagcucaucaacaaggccgugaaugcucugauuaacgaccaacuuaucaugaagaaucaucugcgcgacauuaugggcauccccuauugcaacuacucuaaauauuguuaccucaaucacacagucaccgggaagacaucccugccuagaugcugucuggugagcaacggaucuuaccucaaugaaacccacuucagcgaugacaucgaacagcaggccgauaacaugauuacggagcugcuucaaaaagaguauauggaccggcagggcaagacaccgcuggggcucguggaucuguuugucuucuccaccucuuuuuaccugaucagcauuuuccuucaccucaucaaaauucccacccaucgccacaucacaggaaagccuugccccaaaccucauagacugaaucacaugggcauuuguuccugcggccuguauaagcaccccgggguuccggugaaguggaaacggugaggacuagucccuguucccagagcccacuuuuuuuucuuuuuuugaaauaaaauagccugucuuucagaucucaaaggcucuuuucagagccaccaaaaaaaaaaaaaaaaaaaaaaaaaaaaaaaaaaaaaaaaaaaaaaaaaaaaaaaaaaaaaaaaagaauu

SEQ ID NO: 33400 - RNA, 1714 nt, Artificial Sequence
  mRNA product Design a-1 (hSL-A64-N5) comprising derived and/or modified sequence from LASV(LASV253-NIG-2011;Clade II)__AIT17670__GPCmut8 (opt5)
aggagagucccgcagucggcguccagcggcucugcuuguucgugugugugucguugcaggccuuauucaagcuuaccaugggccagaucauuaccuucuuucaagaggugccccacgucaucgaagagguuaugaacauugugcugaucgcccucagccugcuugcuauucugaaggggaucuacaauguggccacaugcggacucuucggccuggucuccuuucuucugcucugugggagaucuugcagcacgaccuauaaaggaguguacgaacugcagacacuggagcucgacauggcgucccugaacauguguaugccucuuucuugcaccaagaauaacagccaucacuauaucaugguuggcaaugaaacagggcuggagcucacccugacaaacaccuccauuaucaaucauaaauucuguaaccuuucugaugcucacaagaaaaaucuguacgaccaugcccucaugagcauuaucuccacguuucaccugagcauuccgaacuucaaucaguaugaggccaugucuugcgauuuuaacggaggcaagaucuccgugcaguacaaucugagccacaccuaugcugucgacgccgcuaaccauuguggcacaauugccaauggggugcuccaaaccuucaugcggauggcguggggaggcucuuacaucgcccuggauuccgggaagggaagcugggacugcaucaugacaucuuaccaguaucuuauuauccagaacaccacgugggaagaucacugucaguuuucccgccccagcccuauuggcuaccuggggcuccugucccaaagaacacgggacaucuauauuucucgcagacuucugggaaccuucacauggacccucagcgauuccgagggcaacgaaacccccggcggguacugccugacacgguggaugcugaucgaggcugagcucaaauguuuuggaaauacggccguugcuaagugcaacgaaaaacaugacgaggaguucugcgauaugcugcgccuuuuugacuucuguaagcaggccaucagacggcugaaagcgccugcccagaugagcauucagcucaucaauaaggcugugaacgcccugauuaaugaucaacuuaucaugaagaaccaucugcgcgacauuaugggcauccccuauugcaauuacucuaaauauuguuaccucaaccacaccgucacagggagaaccucccugccucggugcugucuggugagcaauggaucuuaccucaacgaaacacacuucagcgacgauaucgaacagcaggcugacaauaugauuaccgagcugcuucaaaaggaguauaucgaucgccagggcaaaacgccgcuggggcucguggaccuguuugucuucuccacaucuuuuuaccugauuagcaucuuccuucaccucguuaagauucccacccauagacacaucauuggaaaaccuugccccaagccucaucggcugaaccacaugggcaucuguuccugcggccuguauaaacaccccggggugccggugaaguggaagcgcugaggacuagucccuguucccagagcccacuuuuuuuucuuuuuuugaaauaaaauagccugucuuucagaucucaaaggcucuuuucagagccaccaaaaaaaaaaaaaaaaaaaaaaaaaaaaaaaaaaaaaaaaaaaaaaaaaaaaaaaaaaaaaaaaagaauu

SEQ ID NO: 33401 - RNA, 1714 nt, Artificial Sequence
  mRNA product Design a-1 (hSL-A64-N5) comprising derived and/or modified sequence from LASV(LASV254-NIG-2011;Clade II)__AIT17674__GPCmut8 (opt5)
aggagagucccgcagucggcguccagcggcucugcuuguucgugugugugucguugcaggccuuauucaagcuuaccaugggccagaucauuaccuucuuucaagaggugccccacgucaucgaagagguuaugaacauugugcugaucgcccucagccugcuugcuauucugaaggggaucuacaauguggccacaugcggacucuucggccuggucuccuuucuucugcucugugggagaucuugcagcacgaccuauaaaggaguguacgaacugcagacacuggagcucgacaugaccaaccugaauauguguaugccucuuuccugcacaaagaacaauucucaucacuauaucaugguuggcaacgaaaccgggcuggagcucacacugaccaauacgagcauuaucaaccauaaauucuguaaucuuuccgaugcgcacaagaaaaaccuguacaaucaugcucucaugucuauuaucagcaccuuucaccuguccauuccgaacuucaaucaguaugaggccaugagcugcgacuuuaacggaggcaagaucucugugcaguacaaucugucccacagcuaugccgucgaugcugccaaccauuguggcacaauugcuaacggggugcuccaaaccuucaugcggauggccuggggaggcucuuacaucgcgcuggacuccgggaagggaaauugggauugcaucaugacaagcuaccaguaucuuauuauccagaacaccacgugggaagaccacugucaguuuucucgccccuccccuauuggcuaccuggggcuccugagccaaagaacacgggauaucuauauuucccgcagacuucugggaaccuucacauggacccucucugacagcgagggcaaugaaacccccggcggguacugccugacacgguggaugcugaucgaggccgagcucaaauguuuuggaaacacggcuguugccaagugcaaugaaaaacaugaugaggaguucugcgacaugcugcgccuuuuugauuucuguaagcaggcuaucagacggcugaaaaccccugcccaggcgaacauucagcucaucaauaaggccgugaacgcucugauuaaugaccaacuuaucaugaagaaccaucugcgcgauauuaugggcauccccuauugcaauuacuccaaauauuguuaccucaaccacacagucaccgggaagacaagccugccuagaugcugucuggugucuaauggauccuaccucaacgaaacccacuucagcgacgacaucgaacagcaggccgauaauaugauuacggagcugcuucaaaaagaguauauggaccggcagggcaagacaccgcuggggcucguggaucuguuugucuucucuaccagcuuuuaccugaucuccauuuuccuucaccucguuaaaauccccacccaucgccacgugauuggaaagccuugccccaaaccucauagacugaaccacaugggcaucuguucuugcggccuguauaagcaccccggggugccggucaaguggaaacggugaggacuagucccuguucccagagcccacuuuuuuuucuuuuuuugaaauaaaauagccugucuuucagaucucaaaggcucuuuucagagccaccaaaaaaaaaaaaaaaaaaaaaaaaaaaaaaaaaaaaaaaaaaaaaaaaaaaaaaaaaaaaaaaaagaauu

SEQ ID NO: 33402 - RNA, 1714 nt, Artificial Sequence
  mRNA product Design a-1 (hSL-A64-N5) comprising derived and/or modified sequence from LASV(Nig08-A19;Clade III)__ADU56618__GPCmut8 (opt5)
aggagagucccgcagucggcguccagcggcucugcuuguucgugugugugucguugcaggccuuauucaagcuuaccaugggccagaucgugaccuucuuucaagaggucccccacguuauugaagaggugaugaacaucgugcugauugcccucagcauccuggcuauucuuaaggggcuguacaauaucgccacaugcggacucaucggccuggucacguuccuucugcucuccgggagaucuuguagcaugaccuauaaaggaguguacgaacugcagacacuggagcucaacaugaauacccugaacaugugcaugccucuuuccuguacaaagaauaacucucaucacuauauuaugguuggcaaugaaaccgggcuggagcucacacugaccaacacgagccuucugcaucacaaauuuugcaaucucuccgacgcgcauaagaaaaaccuguacgaucacacccugaugucuaucauuagcacauuccaccucuccaucccgaauuuuaaccaguaugaggcuaugagcugugacuucaauggaggcaagauuaccgugcaguacaaccugucucauuccuaugccaucgaugccgcuaaucacugcggcacagucgccaacggggugcuucaaaccuuuaugcggauggcuuggggaggcagcuacauugcccuggacucugggcgcggaaagugggauuguaucaugacguccuaccaguaucucaucauucagaacacaaccugggaagaccauugccaguucagcagacccucuccuaucggcuaccuggggcuucugucccaacggacacgcgauauuuauaucagcagacggcuccugggaaccuuuaccuggacacuguccgacucugagggcaaugaaacgcccggcggguacugucucacccgcuggaugcugauugaggcggagcuuaaaugcuucggaaacacagccguugcuaaguguaaugaaaaacacgaugaggaauuuugcgacaugcugagacucuucgauuuuugcaagcaggccauccggcgccugaaagcuccugcccagaugagcauccagcuuauuaacaaggcggugaaugcccugaucaacgaccaacucauuaugaagaaucaccugagagauaucaugggcauucccuauuguaacuacuccaaauauugcuaccugaaucauaccagcacagggcggaccucucucccucgcuguugccuggucuccaacggaagcuaccuuaaugagacgcacuucucugacgacaucgaacagcaggcugauaacaugaucacagagaugcugcaaaaggaguaucucgacagacagggcaaaaccccgcuggggcugguggaucuuuucguguuuagcaccuccuucuaccucauuucuaucuuucugcaucuggucaagauucccacacaccggcauaucguuggaaaaccuugucccaagccucaccgccucaaucacaugggcauuugcagcuguggccuguauaaacagcccggggugccggugagauggaagcggugaggacuagucccuguucccagagcccacuuuuuuuucuuuuuuugaaauaaaauagccugucuuucagaucucaaaggcucuuuucagagccaccaaaaaaaaaaaaaaaaaaaaaaaaaaaaaaaaaaaaaaaaaaaaaaaaaaaaaaaaaaaaaaaaagaauu

SEQ ID NO: 33403 - RNA, 1717 nt, Artificial Sequence
  mRNA product Design a-1 (hSL-A64-N5) comprising derived and/or modified sequence from LASV(G1180-SLE-2010;Clade IV)__AIT17168__GPCmut8 (opt5)
aggagagucccgcagucggcguccagcggcucugcuuguucgugugugugucguugcaggccuuauucaagcuuaccaugggccagaucgugaccuucuuucaagaggucccccacguuauugaagaggugaugaacaucgugcugauugcccucagcauccuggcuguccuuaaggggcuguacaauuucgccacaugcggacucgugggccugcuuacguuucugcuccugugugggagauccugcaccgcgucucgguauaaaggaguuuacgaacugcagacacucgagcugaacauggaaacccuuaauauguguaugccucugagcugcacaaagaacaauucccaucacuauauuauggugggcaacgagaccgggcucgagcugacacuuaccaauacgucuaucaucaaccauaaauucuguaaucugagcgacgcucacaagaaaaaccucuacgaucaugcccugauguccauuaucucuaccuuucaccugagcauuccgaauuucaaccaguaugaagccauguccugcgacuuuaauggaggcaagaucagcguccaguacaaccucucucacuccuaugcuggcgaugccgcuaaucauugugggacaguggccaacggaguucugcaaaccuucaugcgcauggcguggggcgggagcuacauugcccuugacucuggacacggcuccugggauugcaucaugacaagcuaccaguaucugauuauccagaacaccacgugggaggaccauugucaguuuucuagacccuccccuaucggguaccucggacugcuuagccaacggacacgcgauauuuauaucuccagacggcugcucggcaccuucacauggacccugucugacagcgaaggcaaggauacccccgggggauacugccugacacgcuggaugcucauugaggcugagcugaaauguuuuggcaauacggccguggcuaagugcaacgaaaaacacgacgaggaguucugcgauaugcuuagacuguuugacuucuguaagcaggccauccagcggcucaaagcgccugcccagauguccauucaacugaucaauaaggcugucaacgcccuuaucaaugaucagcugauuaugaagaaccaccuccgcgacaucauggggauucccuauugcaauuacagcaaauauuguuaccugaaccauaccacaaccggaaagacaucucugccuaaaugcugucucguguccaauggcagcuaccugaacgaaacccacuucucugacgauaucgaacagcaagcugacaauaugauuacggagaugcuucagaaggaguauauggaaagacaggggaaaacaccgcugggacucguggaucuguuugucuucagcaccuccuuuuaccugaucucuaucuuccuucaucucguuaagauucccacccaccggcauaucgugggcaaaagcugcccuaagccccaccgccugaaccacaugggcauuuguuccugcgggcuguauaagcagccuggagugcccgucaaauggaagagaugaggacuagucccuguucccagagcccacuuuuuuuucuuuuuuugaaauaaaauagccugucuuucagaucucaaaggcucuuuucagagccaccaaaaaaaaaaaaaaaaaaaaaaaaaaaaaaaaaaaaaaaaaaaaaaaaaaaaaaaaaaaaaaaaagaauu

SEQ ID NO: 33404 - RNA, 1717 nt, Artificial Sequence
  mRNA product Design a-1 (hSL-A64-N5) comprising derived and/or modified sequence from LASV(G1442-SLE-2011;Clade IV)__AIT17180__GPCmut8 (opt5)
aggagagucccgcagucggcguccagcggcucugcuuguucgugugugugucguugcaggccuuauucaagcuuaccaugggccagaucgugaccuucuuucaagaggucccccacguuauugaagaggugaugaacaucgugcugauugcccucagcauccuggcuguccuuaaggggcuguacaauguggccacaugcggacucauuggccugguuacguuccuucugcucugugggagauccugcaccacaacccuguauaaaggaguguacgaacugcagacacucgagcugaacauggaaacccuuaauauguguaugccucugucuugcacaaagaacaauagccaucacuauauccgggucggcaacgagaccgggcucgagcugacgcuuaccaauacauccaucauuaaccauaaauuuuguaaucugucugacgcgcacaagaaaaaccucuacgaucaugcucugaugagcaucauuuccaccuuccaccugucuaucccgaauuuuaaccaguaugaagccaugagcugcgacuucaauggaggcaagauuuccgugcaguacaaccucagccacucuuaugccggcgaugcugccaaucauugugggacaguugcuaacggagugcugcaaaccuuuaugcgcauggccuggggcggguccuacaucgcgcuugacagcggaagaggcaacugggauugcauuaugacgucuuaccaguaucugaucauccagaauacaaccugggacgaucacugucaguucucccggcccagcccuauuggguaccucggacugcuuucucaacgcacaagagacgucuauaucucccggcgccugcucggcaccuuuaccuggacacugagcgauuccgagggcaaggacacgcccgggggauacugccugaccagauggaugcucauugaagccgagcugaaauguuucggcaacacagcuguggccaagugcaaugagaaacaugaugaagaguuuugcgacaugcuucggcuguucgauuuuuguaagcaggcuauccagcgccucaaagccccugcgcagaugucuauucaacugaucaacaaggccgugaaugcucuuaucaacgaccagcugauuaugaagaaucaccucagagacaucauggggauucccuauugcaacuacagcaaauauuguuaccugaauaacaccgccacaggaaagaccucccugccuaaaugcugucucaucagcaauggcucuuaccugaacgaaacgcacuucuccgaugacauugagcaggaagcugauaauaugaucacagagaugcuucaaaaggaguauauggaacggcaggggaaaaccccgcugggacucgucgaccuguucguuuuuagcaccucuuucuaccugaucagcauuuuucuucaucucgugaagauccccacacaccgccauauugugggcaaauccugcccuaagccccacagacugaaccauaugggcaucuguucuugcgggcuguauaagcagccuggaguccccgugcgguggaaacgcugaggacuagucccuguucccagagcccacuuuuuuuucuuuuuuugaaauaaaauagccugucuuucagaucucaaaggcucuuuucagagccaccaaaaaaaaaaaaaaaaaaaaaaaaaaaaaaaaaaaaaaaaaaaaaaaaaaaaaaaaaaaaaaaaagaauu

SEQ ID NO: 33405 - RNA, 1717 nt, Artificial Sequence
  mRNA product Design a-1 (hSL-A64-N5) comprising derived and/or modified sequence from LASV(G3010-SLE-2013;Clade IV)__AIT17344__GPCmut8 (opt5)
aggagagucccgcagucggcguccagcggcucugcuuguucgugugugugucguugcaggccuuauucaagcuuaccaugggccagaucgugaccuucuuucaagaggucccccacguuauugaagaggugaugaacaucgugcugauugcccucagcauccuggcuguccuuaaggggcuguacaauuucgccacaugcggacucgugggccugguuacguuucuucugcucugugggagauccugcaccacaucucuguauaaaggaguguacgaacugcagacccucgagcugaacauggaaacacuuaauauguguaugccucugagcugcaccaagaacaauucccaucacuauauuauggucggcaacgagacagggcucgagcugacccuuacgaauaccucuaucaucaaccauaaauucuguaaucugagcgacgcgcacaagaaaaaccucuacaaucaugcucugauguccauuaucucuacauuucaccugagcauuccgaacuucaaucaguaugaagccauguccugcgauuuuaacggaggcaagaucagcgugcaguacaaucucucucacuccuaugccggcgacgcugccagccauugugggaccguugcuaacggagugcugcaaacauucaugcggauggccuggggcgggucuuacauugcgcuugauuccggauacggcaagugggacugcaucaugaccagcuaucaguaccugauuauccagaacacgacaugggaggaucacugucaguuuucucgccccuccccuaucggguaucucggacugcuuagccaaagaacccgggacauuuacaucucccgcagacugcucggcacauucaccuggacccugucugauagcgaaggcaaagacacacccgggggauauugccugacgcgguggaugcucauugaggccgagcugaaguguuuuggcaauaccgcugucgccaaaugcaacgaaaagcaugaugaggaguucugcgacaugcuucgccuguuugauuucuguaaacaggcuauccagagacucaagaccccugcccagauguccauucaacugaucaauaaggcggugaacgcccuuaucaaugaccagcugauuaugaaaaaccaccuccgggauaucauggggauucccuacugcaauuauagcaaguacuguuaccugaaccacacaacaaccggaaaaacgucucugccuaagugcugucucguguccaauggcagcuaucugaacgaaacacauuucucugacgacaucgaacagcaagcugauaauaugauuaccgagaugcuucagaaagaguacauggaacgccaggggaagaccccgcugggacucgucgaccuguuuguuuucagcacauccuuuuaucugaucucuaucuuccuucaccucgugaaaauucccacccauagacacaucgugggcaagagcugcccuaagccccaucggcugaaccacaugggcauuuguuccugcgggcuguacaaacagccuggaguccccgugcgcuggaagagaugaggacuagucccuguucccagagcccacuuuuuuuucuuuuuuugaaauaaaauagccugucuuucagaucucaaaggcucuuuucagagccaccaaaaaaaaaaaaaaaaaaaaaaaaaaaaaaaaaaaaaaaaaaaaaaaaaaaaaaaaaaaaaaaaagaauu

SEQ ID NO: 33406 - RNA, 1717 nt, Artificial Sequence
  mRNA product Design a-1 (hSL-A64-N5) comprising derived and/or modified sequence from LASV(G502-SLE-2009;Clade IV)__AIT17126__GPCmut8 (opt5)
aggagagucccgcagucggcguccagcggcucugcuuguucgugugugugucguugcaggccuuauucaagcuuaccaugggccagaucgugaccuucuuucaagaggucccccacguuauugaagaggugaugaacaucgugcugauugcccucagcauccuggcuguccuuaaggggcuguacaauuucgccacaugcggacucgugggccugcuuacguuucugcuccugugugggagauccugcaccacaggacuguauaaaggcguuuacgaacuccagacccuggagcuuaacauggaaacacugaauauguguaugccucucucuugcaccaagaacaauagccaucacuauauuaugguggggaacgagacaggacuggagcuuacccugacgaauaccuccaucaucaaccauaaauucuguaaucucucugacgcgcacaagaaaaaccuguacgaucaugcucugaugagcauuaucuccacauuucaccucucuauuccgaauuucaaccaguaugaagccaugagcugcgacuuuaauggcggcaagaucuccguccaguacaaccugagccacucuuaugccggggaugcugccgaccauuguggaaccguggcuaauggcguucuucaaacauucaugcggauggccuggggaggguccuacauugcgcuggauagcggccgcgggagaugggacugcaucaugaccucuuaccaguaucucauuauccagaacacgacaugggaggaucacugucaguuuucccggcccagcccuaucggauaccugggccuucugucucaacgcaccagagacauuuauaucucccggcgccuccugggcacauucaccuggacccugagcgauuccgaagggaaggacacacccggaggcuacugccucacgagauggaugcugauugaggccgagcuuaaauguuuugggaacaccgcuguggccaagugcaaugaaaaacaugaugaggaguucugcgacaugcugcggcucuuugauuucuguaagcaggcuauccagcgccugaaagccccugcgcagaugucuauucaacuuaucaacaaggccgucaaugcucugaucaacgaccagcucgugaugaagaaucaccugagagacauuaugggaauccccuauugcaacuacagccgguauuguuaccugaaucacacaaccacaggccgcaccucccucccuaaaugcugucuggugagcaacgggucuuaccuuaaugaaacgcauuucuccgaugacauugaacagcaagccgauaacaugaucacagagaugcugcagaaggaguauauggaaagacagggaaaaaccccgcucggccuggucgaccuguuuguuuucagcaccucuuuuuaccuuauuagcaucuuccuccaccuggugaagauccccacacaucggcacauugugggcaaauccugcccuaagccccaucgccugaaucacauggggaucuguucuugcggacucuauaaacagccuggcguccccgugaaguggaagagaugaggacuagucccuguucccagagcccacuuuuuuuucuuuuuuugaaauaaaauagccugucuuucagaucucaaaggcucuuuucagagccaccaaaaaaaaaaaaaaaaaaaaaaaaaaaaaaaaaaaaaaaaaaaaaaaaaaaaaaaaaaaaaaaaagaauu

SEQ ID NO: 33407 - RNA, 1717 nt, Artificial Sequence
  mRNA product Design a-1 (hSL-A64-N5) comprising derived and/or modified sequence from LASV(G733-SLE-2010;Clade IV)__AIT17154__GPCmut8 (opt5)
aggagagucccgcagucggcguccagcggcucugcuuguucgugugugugucguugcaggccuuauucaagcuuaccaugggccagaucgugaccuucuuucaagaggucccccacguuauugaagaggugaugaacaucgugcugauugcccucagcauccuggcuguccuuaaggggcuguacaauuucgccacaugcggaauugugggccucguuuccuuucugcuucugugugggagaucuugcacgaccagccucuauaaaggaguguacgaacugcagacacuggagcucaacauggaaacccugaauauguguaugccucuuuccugcacaaagaacaauucucaucacuauaucauggucggcaacgagaccgggcuggagcucacacugaccaauacgagcaucauuaaccauaaauucuguaaucuuuccgacgcgcacaagaaaaaccuguacgaucaugcucucaugucuaucauuagcaccuuucaccuguccaucccgaauuucaaccaguaugaagccaugagcugcgacuuuaauggaggcaagauuucugugcaguacaaccugucccacagcuaugccggcgaugcugccaaucauugugggacaaucgcuaacggaguucuccaaaccuucaugcggauggccuggggcgggucuuacauugcgcuggacuccggacgcgauagaugggacugcaucaugacaagcuaccaguaucuuaucauucagaacaccacgugggaggaucacugucaguuuucucggcccuccccuaucggcuaccuggggcuccugagccaacgcacaagagacauuuauaucucccggcgccuucugggaaccuucacauggacccucucugauagcgaaggcaaggacacccccggcggguacugccugacaagauggaugcugauugaggccgagcucaaauguuuuggaaauacggcuguggccaagugcaacgaaaaacaugaugaggaguucugcgacaugcugcggcuuuuugauuucuguaagcaggcuauccagcgccugaaagccccugcgcagauguccauccaacucauuaauaaggccgucaacgcucugaucaaugaccagcuuauuaugaagaaccaccugagagacaucaugggcauucccuauugcaauuacagcaaauauuguuaccucaaccacaccacaaccgggaagacaucucugccuaaaugcugucugguguccaauggaagcuaccucaacgaaacccauuucucugaugacaucgaacagcaagccgauaauaugaucacggagaugcugcagaaggaguauauggaacggcagggcaaaacaccgcuugggcugguggaccucuuugucuucagcaccuccuuuuaccugauuucuaucuuccugcaccuuguuaagauucccacccaucgccacguggugggaaaaagcugcccuaagccccauagacucaaccacaugggcaucuguuccugcggccuguaugggcagccuggaguccccgugaaguggaaacggugaggacuagucccuguucccagagcccacuuuuuuuucuuuuuuugaaauaaaauagccugucuuucagaucucaaaggcucuuuucagagccaccaaaaaaaaaaaaaaaaaaaaaaaaaaaaaaaaaaaaaaaaaaaaaaaaaaaaaaaaaaaaaaaaagaauu

SEQ ID NO: 33408 - RNA, 1717 nt, Artificial Sequence
  mRNA product Design a-1 (hSL-A64-N5) comprising derived and/or modified sequence from MOPV/LASV reassortant(IGS-1;Clade IV)__AFY05576__GPCmut8 (opt5)
aggagagucccgcagucggcguccagcggcucugcuuguucgugugugugucguugcaggccuuauucaagcuuaccaugggccagaucgugaccuucuuucaagaggucccccacguuauugaagaggugaugaacaucgugcugauugcccucagcguccuggcugugcuuaaggggcuguacaauuucgccacaugcggacucguuggccuggugacguuucuucugcucugugggagauccugcaccacaucucuguauaaaggagucuacgaacugcagacccucgagcugaacauggaaacacuuaauauguguaugccucugagcugcaccaagaacaauucccaucacuauaucauggugggcaacgagacagggcucgagcugacccuuacgaauaccucuauuaucaaccauaaauucuguaaucugagcgacgcgcacaagaaaaaccucuacgaucaugcucugauguccaucauuucuacauuucaccugagcaucccgaauuucaaccaguaugaagccauguccugcgacuuuaauggaggcaagauuagcguucaguacaaccucucucacuccuaugccggcgaugcugccaaucauugugggaccguggcuaacggaguccugcaaacauucaugcggauggccuggggcgggagcuacaucgcgcuugacucuggacgcggcaacugggauugcauuaugaccuccuaccaguaucugaucauucagaauacgacaugggaggaccacugucaguuuagcagacccucuccuaucggguaccucggacugcuuucccaacggacccgcgauaucuauauuagcagacggcugcucggcacauucaccuggacccuguccgacucugaaggcgaggauacacccgggggauacugccugacgcgcuggaugcucaucgaggccgaacugaaguguuuuggcaacaccgcuguggccaaaugcaaugagaagcaugacgaagaguucugcgauaugcuuagacuguuugacuucuguaaacaggcuauucagcggcucaaggccccugcgcagaugagcauccaacugauuaacaaagccgugaaugcucuuaucaacgaucagcugaucaugaagaaucaccuccgcgacauuauggggauccccuauugcaacuacuccaaguauuguuaccugaaucacacaaccacaggaagaaccagccugccuaaaugcugucucgucucuaacggcuccuaccugaaugaaacgcauuucagcgacgauauugagcagcaagccgacaacaugaucacagagaugcuucagaaggaauauauggagcggcaggggaaaaccccgcugggacucguugaucuguuuguguucucuaccagcuuuuaccugauuuccaucuuccuucaccucgugaagauccccacacaucgccacauugucggcaaaucuugcccuaagccccauagacugaaucacaugggcaucuguagcugcgggcuguauaaacagccuggagugcccguuaaguggaagcggugaggacuagucccuguucccagagcccacuuuuuuuucuuuuuuugaaauaaaauagccugucuuucagaucucaaaggcucuuuucagagccaccaaaaaaaaaaaaaaaaaaaaaaaaaaaaaaaaaaaaaaaaaaaaaaaaaaaaaaaaaaaaaaaaagaauu

SEQ ID NO: 33409 - RNA, 1717 nt, Artificial Sequence
  mRNA product Design a-1 (hSL-A64-N5) comprising derived and/or modified sequence from LASV(LM765-SLE-2012;Clade IV)__AIT17814__GPCmut8 (opt5)
aggagagucccgcagucggcguccagcggcucugcuuguucgugugugugucguugcaggccuuauucaagcuuaccaugggccagaucgugaccuucuuucaagaggucccccacguuauugaagaggugaugaacaucgugcugauugcccucagcauccuggcuguccuuaaggggcuguacaauuucgccacaugcggacucgugggccugguuacguuucuucugcucugugggagauccugcaccacaucucuguauaaaggaguguacgaacugcagacccucgagcugaacauggaaacacuuaauauguguaugccucugagcugcaccaagaacaauucccaucacuauauuauggucggcaacgagacagggcucgagcugacccuuacgaauaccucuaucaucgaccauaaauucuguaaccugagcgaugcgcaccggaagaaucucuacgaccaugcucugauguccauuaucucuacauuucaccugagcauuccgaacuucaaucaguaugaagccauguccugcgauuuuaacggaggcaaaaucagcgugcaguacaaucucucucacuccuaugccaaggacgcugccgaucauuguggcaccguugcuaacggggugcugcaaacauucaugcgcauggccuggggaggcagcuacauugcgcuugacucugggagaggacggugggauugcaucaugaccuccuaccaguaucugauuauccagaauacgacaugggaggaccacugucaguuuagccgccccucuccuaucggcuaccucgggcugcuuucccaaagaacccgggauauuuauaucagccgcagacugcucggaacauucaccuggacccuguccgacucugaaggcaaggauacacccggcggguacugccugacgcgguggaugcucauugaggccgagcugaaauguuuuggaaacaccgcugucgccaagugcaacgaaaaacaugacgaggaguucugcgauaugcuucgccuguuugacuucuguaagcaggcuauccagagacucaaagccccugcgcagaugagcauucaacugaucaauaaggccgugaacgcucuuaucaaugaccagcugauuaugaagaaccaccuccgggauaucaugggcauucccuauugcaauuacuccaaauauuguuaccugaaccacacaaccacagggaagaccagccugccuaaaugcugucucgugucuaauggauccuaccugaacgaaacgcauuucagcgacgauaucgaacagcaagccgacaauaugauuacagagaugcuucagaaggaguauauggaacgccagggcaaaaccccgcuggggcucgucgaucuguuuguuuucucuaccagcuuuuaccugaucuccaucuuccuucaccucgugaagauucccacacauagacacaucgugggaaaaccuugccccaagccucaucggcugaaccacaugggcauuuguucuugcggccuguauaagcagcccggggucccggugaaauggaagcgcugaggacuagucccuguucccagagcccacuuuuuuuucuuuuuuugaaauaaaauagccugucuuucagaucucaaaggcucuuuucagagccaccaaaaaaaaaaaaaaaaaaaaaaaaaaaaaaaaaaaaaaaaaaaaaaaaaaaaaaaaaaaaaaaaagaauu

SEQ ID NO: 33410 - RNA, 1717 nt, Artificial Sequence
  mRNA product Design a-1 (hSL-A64-N5) comprising derived and/or modified sequence from LASV(LM776-SLE-2012;Clade IV)__AIT17824__GPCmut8 (opt5)
aggagagucccgcagucggcguccagcggcucugcuuguucgugugugugucguugcaggccuuauucaagcuuaccaugggccagaucgugaccuucuuucaagaggucccccacguuauugaagaggugaugaacaucgugcugauugcccucagcauccuggcuguccuuaaggggcuguacaauuucgccacaugcggacucgugggccugguuacguuucuucugcucugugggagauccugcaccacaucuguguauaaaggagucuacgaacugcagacccuggagcucaacauggaaacacugaauauguguaugccucuuagcugcaccaagaacaauucccaucacuauauuauggugggcaacgagacagggcuggagcucacccugacgaauaccucuaucaucaaccauaaauucuguaaucuuagcgacgcgcacaagaaaaaccuguacgaucaugcucucauguccauuaucucuacauuucaccugagcauuccgaauuucaaccaguaugaagccauguccugcgacuuuaauggaggcaagaucagcguucaguacaaccugucucacuccuaugccggcgaugcugccaaucauugugggaccguggcuaacggaguccuccaaacauucaugcggauggccuggggcgggagcuacauugcgcuggacucuggacacggcaagugggauugcaucaugaccuccuaccaguaucuuauuauccagaacacgacaugggaggaccauugucaguuuagccgccccucuccuaucggguaccugggacuccugucccaaagaacccgggauauuuauaucagccgcagacuucugggcacauucaccuggacccucuccgacucugaaggcaaagauacacccgggggauacugccugacgcgguggaugcugauugaggccgagcucaaguguuuuggcaauaccgcuguggccaaaugcaacgaaaagcacgacgaggaguucugcgauaugcugcgccuuuuugacuucuguaaacaggcuauccagagacugaaggccccugcgcagaugagcauucaacucaucaauaaggccgugaacgcucugaucaaugaucagcuuauuaugaaaaaccaucugcgggacaucauggggauucccuauugcaauuacuccaaguauuguuaccucaaccacacaaccacaggaaaaaccagccugccuaagugcugucuggucucuaauggcuccuaccucaacgaaacgcacuucagcgacgauaucgaacagcaagccgacaauaugauuacagagaugcugcagaaagaguauauggaacgccaggggaagaccccgcuuggacugguugaucucuuuguguucucuaccagcuuuuaccugaucuccaucuuccugcaucuugugaaaauucccacacacagacauaucgucggcaagucuugcccuaagccccaccggcucaaccacaugggcauuuguagcugcgggcuguauaaacagccuggagugcccguucgcuggaagagaugaggacuagucccuguucccagagcccacuuuuuuuucuuuuuuugaaauaaaauagccugucuuucagaucucaaaggcucuuuucagagccaccaaaaaaaaaaaaaaaaaaaaaaaaaaaaaaaaaaaaaaaaaaaaaaaaaaaaaaaaaaaaaaaaagaauu

SEQ ID NO: 33411 - RNA, 1717 nt, Artificial Sequence
  mRNA product Design a-1 (hSL-A64-N5) comprising derived and/or modified sequence from LASV(Mad39;Clade IV)__ANH09722__GPCmut8 (opt5)
aggagagucccgcagucggcguccagcggcucugcuuguucgugugugugucguugcaggccuuauucaagcuuaccaugggccagaucgugaccuucuuucaagaggucccccacguuauugaagaggugaugaacaucgugcugauugcccucagcauccuggcuguccuuaaggggcuguacaauguggccacaugcggacucauuggccugguuacguuccuucugcucugugggagauccugcaccacaacccuguauaaaggaguguacgaacugcaggcgcucgagcugaacauggaaacacuuaauauguguaugccucugucuugcaccaagaacaauagccaucacuauauccgggucggcaacgagacagggcucgagcugacccuuacgaauaccucccugaucaaccauaaauuuuguaaucucucugacgcucacaagaaaaaccuguacgaucaugcccugaugagcauuaucuccacauuccaccucucuauuccgaauuuuaaccaguaugaagccaugagcugcgacuucaaugauggaaagaucuccgugcaguacaaccugagccacaccuaugcuggcgacacagccaaucauuguggcaccguugcuaacggggugcuucaaacguuuaugcgcauggccuggggaggcucuuacauugcgcuggauuccgggagaggaggcugggacugcaucaugacaagcuaccaguaucucauuauccagaacaccacaugggaggaucacugucaguucucucggcccuccccuaucggguaccugggacuucugagccaacgcaccagagacauuuauaucucucggcgccuccugggcaccuuuacauggacgcuguccgauagcgaaggcaaggacacccccgggggauacugccucacaagauggaugcugauugaggccgagcuuaaauguuucggcaauaccgcugucgccaagugcaacgaaaaacaugaugaggaauuuugcgacaugcugcgccucuucgauuuuuguaagcaggcuauccagcggcugaaagccccugcgcagauguccauucaacuuaucaauaaggccgugaacgcucugaucaaugaccagcucauuaugaagaaccaccugagagacaucauggggauucccuauugcaauuacucuaaauauuguuaccugaaccacacagugaccggaaagacgagccucccuaaaugcugucuggucuccaauggcagcuaccuuaacgagacacauuucucugaugacaucgaacagcaagccgauaauaugauuaccgagaugcugcagaaggaguauauggaacggcaggggaaaaccccgcucggacugguugaccuguucguguuuuccaccagcuucuaccuuaucucuaucuuucuccaccuggugaagauucccacacaucgccacgucgugggcaaaccuugccccaagccucauagacugaaccacaugggcaucuguagcugcggguucuauaagcagcccggaguuccggugcgguggaaacgcugaggacuagucccuguucccagagcccacuuuuuuuucuuuuuuugaaauaaaauagccugucuuucagaucucaaaggcucuuuucagagccaccaaaaaaaaaaaaaaaaaaaaaaaaaaaaaaaaaaaaaaaaaaaaaaaaaaaaaaaaaaaaaaaaagaauu

SEQ ID NO: 33412 - RNA, 1717 nt, Artificial Sequence
  mRNA product Design a-1 (hSL-A64-N5) comprising derived and/or modified sequence from LASV(Z0947-SLE-2011;Clade IV)__AIT17840__GPCmut8 (opt5)
aggagagucccgcagucggcguccagcggcucugcuuguucgugugugugucguugcaggccuuauucaagcuuaccaugggccagaucgugaccuucuuucaagaggucccccacguuauugaagaggugaugaacaucgugcugauugcccucagcauccuggcuguccuuaaggggcuguacaauuucgccacaugcggacucgugggccugguuacguuucuucugcucugugggagauccugcaccauuucucuguauaaaggaguguacgaacugcagacacucgagcugaacauggaaacccuuaauauguguaugccucugagcugcacaaagaacaauucccaucacuauaucauggucggcaacgagaccgggcucgagcugacacuuaccaauacgucuaucauuaaccauaaauucuguaaucugagcgacgcgcacaagaaaaaccucuacgaucaugcucugauguccaucauuucuaccuuucaccugagcaucccgaauuucaaccaguaugaagccauguccugcgacuuuaauggaggcaagauuagcgugcaguacaaccucucucacuccuaugccggcgaugcugccaaucauugugggacaguugcuaacggagugcugcaaaccuucaugcggauggccuggggcgggagcuacaucgcgcuugacucuggacgcgauagaugggacugcauuaugacauccuaccaguaucugaucauccagaacaccacgugggaggaucacugucaguuuagccggcccucuccuauuggcuaccucgggcugcuuucccaacgcacaagagacaucuauauuagccggcgccugcucggaaccuucacauggacccuguccgauucugaaggcaaggacacccccggcggguacugccugacaagauggaugcucaucgaggccgagcugaaauguuuuggaaauacggcugucgccaagugcaacgaaaaacaugaugaggaguucugcgacaugcuucggcuguuugauuucuguaagcaggcuauucagcgccucaaagccccugcgcagaugagcauccaacugaucaauaaggccgugaacgcucuuauuaaugaccagcugaucaugaagaaccaccucagagacauuaugggcauccccuauugcaauuacuccaaauauuguuaccugaaccacaccacaaccgggaagacaagccugccuaaaugcugucucgugucuaauggauccuaccugaacgaaacccauuucagcgaugacauugaacagcaagccgauaauaugaucacggagaugcuucagaaggaguauauggaacggcagggcaaaacaccgcuggggcucgucgaccuguuuguuuucucuaccagcuuuuaccugaucuccauuuuccuucaccucgugaagauccccacccaucgccacauugugggaaaaccuugccccaagccucauagacugaaccacaugggcaucuguucuugcggccuguauaagcagcccggggucccggugaaauggaagcggugaggacuagucccuguucccagagcccacuuuuuuuucuuuuuuugaaauaaaauagccugucuuucagaucucaaaggcucuuuucagagccaccaaaaaaaaaaaaaaaaaaaaaaaaaaaaaaaaaaaaaaaaaaaaaaaaaaaaaaaaaaaaaaaaagaauu

SEQ ID NO: 33413 - RNA, 1748 nt, Artificial Sequence
  mRNA product Design a-1 (hSL-A100) comprising derived and/or modified sequence from LASV(Josiah;Clade IV)__NP_694870__GPCmut8 (opt1)
aggagagucccgcagucggcguccagcggcucugcuuguucgugugugugucguugcaggccuuauucaagcuuaccaugggccagaucgugaccuucuuccaggaggucccccacgugaucgaggaggugaugaacaucguccugaucgcccucagcgugcuggccgugcugaaggggcucuacaacuucgcgaccugcggccuggucgggcuggugacguuccuccugcugugcggccgcuccugcaccaccagccucuacaaggggguguacgagcugcagacccuggagcucaacauggagacgcugaacaugugcaugccgcuguccugcaccaagaacaacagccaccacuacaucauggucggcaacgagaccggccucgagcugacgcugaccaacaccuccaucaucaaccacaaguucugcaaccucagcgacgcccacaagaagaaccuguacgaccacgcccugauguccaucaucagcaccuuccaccucuccauccccaacuucaaccaguacgaggccaugagcugcgacuucaacgggggcaagaucuccgugcaguacaaccugagccacuccuacgccggggacgcggccaaccacugcggcacgguggccaacgggguccugcagaccuucaugcggauggccuggggcggcagcuacaucgcgcucgacuccgggcgcggcaacugggacugcaucaugaccagcuaccaguaccugaucauccagaacaccacgugggaggaccacugccaguucucccggcccagccccaucggguaccugggccuccugucccagcgcacccgggacaucuacaucagccgccggcugcucggcaccuucaccuggacgcugagcgacuccgaggggaaggacaccccgggcggguacugccugacccgcuggaugcucaucgaggccgagcugaagugcuucggcaacaccgccguggccaagugcaacgagaagcacgacgaggaguucugcgacaugcugcggcuguucgacuucugcaagcaggccauccagcgccugaaggcgcccgcccagaugagcauccagcugaucaacaaggccgugaacgcccucaucaacgaccagcugaucaugaagaaccaccuccgggacaucauggggauccccuacugcaacuacuccaaguacugcuaccucaaccacacgaccaccggccgcaccagccugcccaagugcugccuggucuccaacggcagcuaccucaacgagacgcacuucuccgacgacaucgagcagcaggccgacaacaugaucaccgagaugcugcagaaggaguacauggagcggcaggggaagacgccccugggccucguggaccuguucguguucagcaccuccuucuaccugaucagcaucuuccugcaccucgucaagaucccgacccaccgccacaucguggggaaguccugccccaagccccaccggcugaaccacaugggcaucugcagcugcgggcuguacaagcagcccggcgugccggucaaguggaagcgcugaggacuagucccuguucccagagcccacuuuuuuuucuuuuuuugaaauaaaauagccugucuuucagaucucaaaggcucuuuucagagccaccaaaaaaaaaaaaaaaaaaaaaaaaaaaaaaaaaaaaaaaaaaaaaaaaaaaaaaaaaaaaaaaaaaaaaaaaaaaaaaaaaaaaaaaaaaaaaaaaaaaaa

SEQ ID NO: 33414 - RNA, 1745 nt, Artificial Sequence
  mRNA product Design a-1 (hSL-A100) comprising derived and/or modified sequence from LASV(LP;Clade I)__AAF86701__GPCmut8 (opt1)
aggagagucccgcagucggcguccagcggcucugcuuguucgugugugugucguugcaggccuuauucaagcuuaccaugggccagaucaucaccuucuuccaggaggugccccacgucaucgaggaggugaugaacaucgugcugaucgcccucagccugcuggccauccucaaggggcuguacaacaucgcgaccugcggcaucaucgggcuggucgccuuccucuuccugugcggcaaguccugcagccugacgcucaagggcggguacgagcugcagacccuggagcucaacauggagacccugaacaugugcaugccgcuguccugcacgaagaacagcucccaccacuacauccgcgugggcaacgagaccgggcucgagcugacccugaccaacacgagcaucaucaaccacaaguucugcaaccucuccgacgcccacaagaagaaccuguacgaccacgcccugaugagcaucaucuccaccuuccaccucagcauccccaacuucaaccaguacgaggccauguccugcgacuucaacggcgggaagaucagcgugcaguacaaccugucccacagcuacgcgggcgacgccgccgagcacugcgggaccgucgccaacggcgugcugcagaccuucaugcggauggcguggggcgggcgcuacaucgcccucgacuccggcaaggggaacugggacugcaucaugacgagcuaccaguaccugaucauccagaacaccaccugggaggaccacugccaguucucccggcccagccccaucggcuaccugggccuccugucccagcgcacccgggacaucuacaucagccgccggcugcucgggacguucaccuggacccugagcgacuccgagggcaacgagacccccgggggcuacugccugacgcgcuggaugcucaucgaggccgagcugaagugcuucgggaacaccgccguggccaagugcaacgagaagcacgacgaggaguucugcgacaugcugcggcuguucgacuucugcaagcaggcgauccgccggcugaaggcccccgcccagaugagcauccagcugaucaacaaggccgucaacgcccucaucaacgaccagcugaucaugaagaaccaccuccgcgacaucaugggcauccccuacugcaacuacuccaaguacugcuaccucaaccacaccagcuccggccggaccagccugcccaagugcugccugaucuccaacgggagcuaccucaacgagacgcaguucuccgacgacaucgagcagcaggcggacaacaugaucaccgagaugcugcagaaggaguacaucgagcgccagggcaagaccccgcuggggcucguggacaucuucaucuucagcaccuccuucuaccugaucagcaucuuccugcaccugaucaagaucccgacgcaccggcacaucgugggcaagcccugccccaagccccaccgccucaaccacaugggggucugcuccugcggccuguacaagcacccgggcgugcccaccaaguggaagcggugaggacuagucccuguucccagagcccacuuuuuuuucuuuuuuugaaauaaaauagccugucuuucagaucucaaaggcucuuuucagagccaccaaaaaaaaaaaaaaaaaaaaaaaaaaaaaaaaaaaaaaaaaaaaaaaaaaaaaaaaaaaaaaaaaaaaaaaaaaaaaaaaaaaaaaaaaaaaaaaaaaaaa

SEQ ID NO: 33415 - RNA, 1745 nt, Artificial Sequence
  mRNA product Design a-1 (hSL-A100) comprising derived and/or modified sequence from LASV(803213;Clade II)__AAF86703__GPCmut8 (opt1)
aggagagucccgcagucggcguccagcggcucugcuuguucgugugugugucguugcaggccuuauucaagcuuaccaugggccagaucaucaccuucuuccaggaggugccccacgucaucgaggaggugaugaacaucgugcugaucgcccucagccugcuggccauccucaaggggaucuacaacgucgcgaccugcggccuguucgggcugaucuccuuccuccugcugugcggccgcagcugcuccgugacguacaaggggguguacgagcuccagacccuggagcugaacauggccaaccucaacaugugcaugccgcugagcugcaccaagaacaacucccaccacuacaucauggucggcaacgagacgggccuggagcucacccugaccaacaccagcaucaucaaccacaaguucugcaaccuguccgacgcccacaagaagaaccucuacgaccacgcccugaugagcaucaucuccacguuccaccugagcauccccaacuucaaccaguacgaggccauguccugcgacuucaacgggggcaagaucagcgugcaguacaaccucucccacagcuucgcgguggacgccgccaaccacugcgggaccaucgccaacggcguccugcagaccuucaugcggauggcguggggcggguccuacaucgcccuggacagcggcaaggggaacugggacugcaucaugaccuccuaccaguaccucaucauccagaacacgaccugggaggaccacugccaguucagccgccccucccccaucggcuaccuggggcugcucagccagcggacccgcgacaucuacaucagccggcgccugcugggcaccuucacguggacccucuccgacagcgagggcaacgaggcccccgggggcuacugccugacccgguggaugcugaucgaggccgagcucaagugcuucgggaacaccgccguggcgaagugcaacgagaagcacgacgaggaguucugcgacaugcugcgccuguucgacuucugcaagcaggccaucaagcggcucaagacgcccgcccagauguccauccagcugaucaacaaggccgugaacgcccugaucaacgaccagcucaucaugaagaaccaccuccgcgacaucaugggcauccccuacugcaacuacagccgguacugcuaccugaaccacaccgucaccgggaagaccucccugccccgcugcugccuggugagcaacggcuccuaccugaacgagacgcacuucagcgacgacaucgagcagcaggcggacaacaugaucaccgagaugcuccagaaggaguacauggaccggcagggcaagaccccgcuggggcugguggaccucuucgucuucuccaccagcuucuaccugaucuccaucuuccugcaccuggugaagaucccgacgcaccgccacaucgugggcaagcccugccccaagccccaccggcucaaccacauggggaucugcagcugcggccuguacaagcacccggggguccccgugaaguggaagcgcugaggacuagucccuguucccagagcccacuuuuuuuucuuuuuuugaaauaaaauagccugucuuucagaucucaaaggcucuuuucagagccaccaaaaaaaaaaaaaaaaaaaaaaaaaaaaaaaaaaaaaaaaaaaaaaaaaaaaaaaaaaaaaaaaaaaaaaaaaaaaaaaaaaaaaaaaaaaaaaaaaaaaa

SEQ ID NO: 33416 - RNA, 1745 nt, Artificial Sequence
  mRNA product Design a-1 (hSL-A100) comprising derived and/or modified sequence from LASV(GA391;Clade III)__CAA36645__GPCmut8 (opt1)
aggagagucccgcagucggcguccagcggcucugcuuguucgugugugugucguugcaggccuuauucaagcuuaccaugggccagaucgugaccuucuuccaggaggucccccacgugaucgaggaggugaugaacaucguccugaucgcccucagcauccuggccauccugaaggggcucuacaacguggcgaccugcggccugaucgggcuggugacguuccuccugcuguccggccgcagcugcucccucaucuacaaggggaccuacgagcugcagacccuggagcucaacauggagacccugaacaugugcaugccgcugagcugcaccaagaacaacucccaccacuacauccgggucggcaacgagaccggccucgagcugacccugacgaacaccagcauccucaaccacaaguucugcaaccuguccgacgcccacaagcgcaaccuguacgaccacagccucauguccaucaucagcaccuuccaccuguccauccccaacuucaaccaguacgaggccaugagcugcgacuucaacgggggcaagaucaccgugcaguacaaccugucccacagcuucgccguggacgccgcggggcacugcggcacgcucgccaacgggguccugcagaccuucaugcggauggccuggggcggcuccuacaucgcccuggacagcgggcgcggcaacugggacugcaucaugaccuccuaccaguaccucaucauccagaacaccacgugggacgaccacugccaguucagccggcccucccccaucggguaccugggccugcucagccagcgcacccgggacaucuacaucagccgccggcugcugggcaccuucaccuggacgcucuccgacagcgaggggaacgagaccccgggcggguacugccugacccgcuggaugcugaucgaggcggagcucaagugcuucggcaacaccgccguggccaagugcaacgagaagcacgacgaggaguucugcgacaugcugcggcuguucgacuucugcaagcaggccauccgccggcucaagacgcccgcccagauguccauccagcugaucaacaaggcggugaacgcccugaucaacgaccagcucaucaugaagaaccaccuccgcgacaucauggggauccccuacugcaacuacagccgguacugcuaccugaaccacaccuccaccggcaagaccagccugccccgcugcugccugaucuccaacggcagcuaccugaacgagacgaaguucuccgacgacaucgagcagcaggccgacaacaugaucaccgagaugcuccagaaggaguacaucgaccggcaggggaagacgccccugggccuggucgaccuguucguguucagcaccuccuucuaccucaucagcaucuuccugcaccuggugaagaucccgacccaccgccacaucgucgggaagcccugccccaagccccaccggcucaaccacaugggcaucugcuccugcgggcuguacaagcagccgggcgugcccgugcgcuggaagcggugaggacuagucccuguucccagagcccacuuuuuuuucuuuuuuugaaauaaaauagccugucuuucagaucucaaaggcucuuuucagagccaccaaaaaaaaaaaaaaaaaaaaaaaaaaaaaaaaaaaaaaaaaaaaaaaaaaaaaaaaaaaaaaaaaaaaaaaaaaaaaaaaaaaaaaaaaaaaaaaaaaaaa

SEQ ID NO: 33417 - RNA, 1748 nt, Artificial Sequence
  mRNA product Design a-1 (hSL-A100) comprising derived and/or modified sequence from LASV(AV;Clade V)__CCA30314__GPCmut8 (opt1)
aggagagucccgcagucggcguccagcggcucugcuuguucgugugugugucguugcaggccuuauucaagcuuaccaugggccagaucgugaccuucuuccaggaggucccccacgugaucgaggaggugaugaacaucguccugaucgcccucagcauccuggccgugcugaaggggcucuacaacaucgcgaccugcggccugaucgggcugaucacguuccuccugcugugcggccgcuccugcagcuccaaccucuacaaggggguguacgagcugcagagccuggaccucaacauggagacccugaacaugugcaugccgcuguccugcaccaagaacaacagccaccacuacauccgggucggcaacgacacgggccucgagcugacccugaccaacaccuccauccucaaccacaaguucugcaaccugagcgacgcccacaagaaggaccuguacgaccacgcccucauguccaucaucagcacguuccaccuguccauccccaacuucaaccaguacgaggccaugagcugcgacuucaacgggggcaagaucuccgugcaguacaaccugagccacuccuacgccaucgacgcggccaaccacugcgggaccguggccaacggcauccuccagaccuucaugcgcauggccuggggcgggagcuacaucgcgcuggacuccggccgggggaacugggacugcaucaugaccagcuaccaguaccugaucauccagaacacgaccugggagaaccacugccaguucucccgccccagccccaucggcuaccucgggcugcugagccagcggacccgcgacaucuacaucucccggcgccuccugggcaccuucacguggacccugagcgacuccgagggcaacgccacccccgggggcuacugccucacccgguggaugcugaucgaggccgagcugaagugcuucgggaacacggccgucgccaagugcaacgagaagcacgacgaggaguucugcgacaugcuccgccuguucgacuucugcaagcaggcgaucagccggcugaagucccccgcccagaugagcauccagcucaucaacaaggccgugaacgcccugaucaacgaccagcugaucaugaagaaccaccuccgcgacaucaugggcauccccuacugcaacuacuccaaguacugcuaccugaaccacaccaucaccgggaagaccagccugcccaagugcugccucguguccaacggcagcuaccugaacgagacgcacuucuccgacgacaucgagcagcaggccgacaacaugaucaccgagaugcugcagaaggaguacauggagcggcagggcaagaccccgcucgggcuggucgaccuguucguguucagcaccuccuucuaccugaucagcaucuuccuccgccuggugaagaucccgacgcaccggcacaucgucggcaagcccugccccaagccccaccgccugaaccacauggggaucugcuccugcggccucuacaagcagccgggggugcccgugcgguggaagcgcugaggacuagucccuguucccagagcccacuuuuuuuucuuuuuuugaaauaaaauagccugucuuucagaucucaaaggcucuuuucagagccaccaaaaaaaaaaaaaaaaaaaaaaaaaaaaaaaaaaaaaaaaaaaaaaaaaaaaaaaaaaaaaaaaaaaaaaaaaaaaaaaaaaaaaaaaaaaaaaaaaaaaa

SEQ ID NO: 33418 - RNA, 1745 nt, Artificial Sequence
  mRNA product Design a-1 (hSL-A100) comprising derived and/or modified sequence from LASV(Togo/2016/7082;Clade VI)__AMR44577__GPCmut8 (opt1)
aggagagucccgcagucggcguccagcggcucugcuuguucgugugugugucguugcaggccuuauucaagcuuaccaugggccagaucaucaccuucuuccaggaggugccccacgucaucgaggaggugaugaacaucgugcugaucgcccucagccugcuggccauccucaagggggucuacaacguggcgaccugcggcaucaucgggcuggugacguuccuguuccucugcggccgcuccugcagccugaucuacaagggguccuacgagcugcagacccucgagcugaacauggagacccugaacaugugcaugccgcucagcugcacgaagaacuccagccaccacuacauccgggucggcaacgagaccggccuggagcugacccucaccaacacguccaucaucaaccacaaguucugcaaccugagcgacgcccacaagcgcaaccuguacgaccacgcccucauguccauccugagcaccuuccaccuguccauccccaacuucaaccaguacgaggccaugagcugcgacuucaacgggggcaagaucuccgugcaguacaaccucagccacgccuacgcgguggacgccgccgagcacugcgggaccgucgccaacggcgugcugcagaccuucaugcggauggcguggggcggguccuacaucgcccuggacagcggccgcgggaacugggacugcaucaugacguccuaccaguaccucaucauccagaacaccaccugggaggaccacugccaguucagccggcccucccccaucggcuaccuggggcugcucagccagcgcacccgggacaucuacaucagccgccggcugcugggcacguucaccuggacccucuccgacagcgagggcaacgagacccccgggggcuacugccugacgcgcuggaugcugaucgaggccgagcucaagugcuucgggaacaccgccguggccaagugcaacgagaagcacgacgaggaguucugcgacaugcugcggcuguucgacuucugcaagcaggcgauccagcgccucaagucccccgcccagaugagcauccagcugaucaacaaggccgucaacgcccugaucaacgaccagcucaucaugaagaaccaccuccgggacaugaugggcauccccuacugcaacuacuccaaguacugcuaccugaaccacaccagcuccgggcgcaccagccugcccaagugcugccugguguccaacggcagcuaccugaacgagacgcacuucuccgacgacaucgagcagcaggccgacaacaugaucaccgagaugcuccagaaggaguacaucgaccggcagggcaagaccccgcuggggcugguggaccucuucgucuucagcaccuccuucuaccugaucagcaucuuccugcaccugaucaagaucccgacgcaccgccacaucgugggcaagcccugccccaagccccaccggcucaaccacauggggaucugcuccugcggccuguacaagcagccgggggugcccacccgcuggaagcggugaggacuagucccuguucccagagcccacuuuuuuuucuuuuuuugaaauaaaauagccugucuuucagaucucaaaggcucuuuucagagccaccaaaaaaaaaaaaaaaaaaaaaaaaaaaaaaaaaaaaaaaaaaaaaaaaaaaaaaaaaaaaaaaaaaaaaaaaaaaaaaaaaaaaaaaaaaaaaaaaaaaaa

SEQ ID NO: 33419 - RNA, 1745 nt, Artificial Sequence
  mRNA product Design a-1 (hSL-A100) comprising derived and/or modified sequence from LASV(KAK-428;Clade n.d. (VII))__ANH09740__GPCmut8 (opt1)
aggagagucccgcagucggcguccagcggcucugcuuguucgugugugugucguugcaggccuuauucaagcuuaccaugggccagaucgugaccuucuuccaggaggucccccacgugaucgaggaggugaugaacaucguccugaucgcccucagccugcuggccauccucaaggggcuguacaacuucgcgaccugcggcgugaucgggcugaucacguuccuccugcugugcggccgcuccugcagcgccaccuacaaggggcaguacgagcuccagacccuggagcugaacauggagucccucaacaugugcaugccgcugagcugcacgaagaacaacucccaccacuacauccgggccggcaacaacaccggccuggagcucacccugaccaacacgagcaucaucucccacaaguucugcaaccugagcgacgcccacaagaagaaccucuacgaccacacccugauguccaucaucaccaccuuccaccugagcauccccaacuucaaccaguacgaggccauguccugcgacuucaacgggggcaagaucagcauccaguacaaccucucccacagcuacgcgggggacgccgcccagcacugcggcacgguggccaacgggguccugcagaccuucaugcgcauggcguggggcggcuccuaccuggcccucgacagcgggcggcgcggcugggacugcaucaucuccagcuaccaguaccugaucauccagaacaccaccugggacgaccacugccaguucucccggcccagccccaucggguaccugggcuucgugagccagaagacgcgcgacaucuacaucucccggcgccuccugggcaccuucaccuggacccugagcgacuccgaggggcacgacaugccgggcggguacugccucacgcgguggaugcugaucgaggccgaccugaagugcuucggcaacaccgccguggccaagugcaacgagaagcacgacgaggaguucugcgacauguggcgccucuucgacuucugcaagcaggcgauccagcggcugaaggcccccgcccagaugaacauccagcugaucaacaaggccgucaacgcccucaucaacgaccagcugaugaugaagaaccaccuccgcgacaucauggggauccccuacugcaacuacagcaaguucugcuaccugaacaacaccaccacgggccggaccucccugccccgcugcugccugaucagcaacggcuccuaccucaacgagacccacuucagcgacgacaucgagcagcaggcggacaacaugaucaccgagaugcugcagaaggaguacauggaccggcaggggaagacgccccugggccucguggaccuguucguguucuccaccagcuucuaccugaucaccaucuuccuccaccuggucaagaucccgacccaccgccacaucguggggaagcccugccccaagccccaccggcugaaccacaugggcaucugcuccugcgggcuguacaagcagccgggcgugcccguccgcuggaagcggugaggacuagucccuguucccagagcccacuuuuuuuucuuuuuuugaaauaaaauagccugucuuucagaucucaaaggcucuuuucagagccaccaaaaaaaaaaaaaaaaaaaaaaaaaaaaaaaaaaaaaaaaaaaaaaaaaaaaaaaaaaaaaaaaaaaaaaaaaaaaaaaaaaaaaaaaaaaaaaaaaaaaa

SEQ ID NO: 33420 - RNA, 1745 nt, Artificial Sequence; identical to SEQ ID NO: 33414
  mRNA product Design a-1 (hSL-A100) comprising derived and/or modified sequence from LASV(Pinneo-NIG-1969;Clade I)__AIT17836__GPCmut8 (opt1)

SEQ ID NO: 33421 - RNA, 1745 nt, Artificial Sequence
  mRNA product Design a-1 (hSL-A100) comprising derived and/or modified sequence from LASV(ISTH0009-NIG-2011;Clade II)__AIT17404__GPCmut8 (opt1)
aggagagucccgcagucggcguccagcggcucugcuuguucgugugugugucguugcaggccuuauucaagcuuaccaugggccagaucaucaccuucuuccaggaggugccccacgucaucgaggaggugaugaacaucgugcugaucgcccucagccugcuggccauccucaaggggaucuacaacgucgcgaccugcggccuguucgggcugguguccuuccuccugcugugcggccgcagcugcuccacgaccuacaaggggguguacgagcuccagacccuggagcuggacauggccagccucaacaugugcaugccgcuguccugcacgaagaacaacagccaccacuacaucauggucggcaacgagaccggccuggagcucacccugaccaacacguccaucaucaaccacaaguucugcaaccugagcgacgcccacaagaagaaccucuacgaccacgcccugauguccaucaucagcaccuuccaccuguccauccccaacuucaaccaguacgaggccaugagcugcgacuucaacgggggcaagaucuccgugcaguacaaccucagccacgcguacgccguggacgccgccaaccacugcgggaccaucgcgaacggcguccugcagaccuucaugcggauggccuggggcggguccuacaucgcccuggacagcggcaagggguccugggacugcaucaugacgagcuaccaguaccucaucauccagaacaccaccugggaggaccacugccaguucucccgccccagccccaucggcuaccuggggcugcucagccagcggacccgcgacaucuacaucucccggcgccugcugggcacguucaccuggacccucagcgacuccgagggcaacgagacccccgggggcuacugccugacgcgguggaugcugaucgaggccgagcucaagugcuucgggaacaccgccguggcgaagugcaacgagaagcacgacgaggaguucugcgacaugcugcgccuguucgacuucugcaagcaggccauccggcgccucaagacccccgcccagaugagcauccagcugaucaacaaggccgugaacgcccugaucaacgaccagcucaucaugaagaaccaccuccgggacaucaugggcaucccguacugcaacuacuccaaguacugcuaccugaaccacaccgucacggggaagaccagccugccccgcugcugccugguguccaacggcagcuaccugaacgagacccacuucuccgacgacaucgagcagcaggcggacaacaugaucaccgagcuccugcagaaggaguacauggaccggcagggcaagacgccccuggggcucguggaccuguucgucuucagcaccuccuucuaccugaucagcaucuuccugcaccucaucaagaucccgacccaccgccacaucaccggcaagcccugccccaagccccaccggcugaaccacauggggaucugcuccugcggccuguacaagcacccgggggugcccgugaaguggaagcgcugaggacuagucccuguucccagagcccacuuuuuuuucuuuuuuugaaauaaaauagccugucuuucagaucucaaaggcucuuuucagagccaccaaaaaaaaaaaaaaaaaaaaaaaaaaaaaaaaaaaaaaaaaaaaaaaaaaaaaaaaaaaaaaaaaaaaaaaaaaaaaaaaaaaaaaaaaaaaaaaaaaaaa

SEQ ID NO: 33422 - RNA, 1745 nt, Artificial Sequence
  mRNA product Design a-1 (hSL-A100) comprising derived and/or modified sequence from LASV(ISTH2010-NIG-2012;Clade II)__AIT17482__GPCmut8 (opt1)
aggagagucccgcagucggcguccagcggcucugcuuguucgugugugugucguugcaggccuuauucaagcuuaccaugggccagaucaucaccuucuuccaggaggugccccacgucaucgaggaggugaugaacaucgugcugaucgcccucagccugcuggccauccucaaggggaucuacaacgucgcgaccugcggccuguucgggcugguguccuuccuccugcugugcggccgcagcugcuccacgaccuacaaggggguguacgagcuccagacccuggagcuggacauggccagccucaacaugugcaugccgcuguccugcacgaagaacaacagccaccacuacaucauggucggcaacgagaccggccuggagcucacccugaccaacacguccaucaucaaccacaaguucugcaaccugagcgacgcccacaagaagaaccucuacgaccacgcccugauguccaucaucagcaccuuccaccuguccauccccaacuucaaccaguacgaggccaugagcugcgacuucaacgggggcaagaucuccgugcaguacaaccucagccacgcguacgccguggacgccgccaaccacugcgggaccaucgcgaacggcguccugcagaccuucaugcggauggccuggggcggguccuacaucgcccuggacagcggcaagggguccugggacugcaucaugacgagcuaccaguaccucaucauccagaacaucaccugggaggaccacugccaguucucccgccccagccccaucggcuaccuggggcugcucagccagcggacccgcgacaucuacaucucccggcgccugcugggcaccuucacguggacccucagcgacuccgagggcaacgagacccccgggggcuacugccugacccgguggaugcugaucgaggccgagcucaagugcuucgggaacacggccguggcgaagugcaacgagaagcacgacgaggaguucugcgacaugcugcgccuguucgacuucugcaagcaggccauccggcgccucaagacccccgcccagaugagcauccagcugaucaacaaggccgugaacgcccugaucaacgaccagcucaucaugaagaaccaccuccgggacaucaugggcauccccuacugcaacuacuccaaguacugcuaccugaaccacaccgucaccgggaagacgagccugccccgcugcugccugguguccaacggcagcuaccugaacgagacccacuucuccgacgacaucgagcagcaggcggacaacaugaucaccgagcuccugcagaaggaguacaucgaccggcagggcaagaccccgcuggggcucguggaccuguucgucuucagcacguccuucuaccugaucagcaucuuccugcaccucgugaagaucccgacccaccgccacguggucggcaagcccugccccaagccccaccggcugaaccacauggggaucugcuccugcggccuguacaagcacccgggggugcccgugaaguggaagcgcugaggacuagucccuguucccagagcccacuuuuuuuucuuuuuuugaaauaaaauagccugucuuucagaucucaaaggcucuuuucagagccaccaaaaaaaaaaaaaaaaaaaaaaaaaaaaaaaaaaaaaaaaaaaaaaaaaaaaaaaaaaaaaaaaaaaaaaaaaaaaaaaaaaaaaaaaaaaaaaaaaaaaa

SEQ ID NO: 33423 - RNA, 1745 nt, Artificial Sequence
  mRNA product Design a-1 (hSL-A100) comprising derived and/or modified sequence from LASV(Lassa virus/H.sapiens-wt/NGA/2015/ISTH_0543;Clade II)__AVO03639__GPCmut8 (opt1)
aggagagucccgcagucggcguccagcggcucugcuuguucgugugugugucguugcaggccuuauucaagcuuaccaugggccagaucaucaccuucuuccaggaggugccccacgucaucgaggaggugaugaacaucgugcugaucgcccucagccugcuggccauccucaaggggaucuacaacgucgcgaccugcggccuguucgggcugguguccuuccuccugcugugcggccgcagcugcuccacgaccuacaaggggguguacgagcuccagacccuggagcuggacauggccaaccucaacaugugcaugccgcugagcugcacgaagaacaacucccaccacuacaucauggucggcaacgagaccggccuggagcucacccugaccaacacgagcaucaucaaccacaaguucugcaaccuguccgacgcccacaagaagaaccucuacgaccacgcccugaugagcaucaucuccaccuuccaccugagcauccccaacuucaaccaguacgaggccauguccugcgacuucaacgggggcaagaucagcgugcaguacaaccucucccacaccuacgcgguggacgccgccaaccacugcgggaccaucgccaacggcguccugcagacguucaugcggauggcguggggcgggagcuacaucgcccuggacuccggcaaggggagcugggacugcaucaugaccuccuaccaguaccucgugauccagaacaccaccugggaggaccacugccaguucagccgccccucccccaucggcuaccuggggcugcucagccagcggacgcgcgacaucuacaucagccggcgccugcugggcaccuucaccuggacccucuccgacagcgagggcaacgagacgcccgggggcuacugccugacccgguggaugcugaucgaggccgagcucaagugcuucgggaacaccgccguggccaagugcaacgagaagcacgacgaggaguucugcgacaugcugcgccuguucgacuucugcaagcaggcgauccggcgccucaagacccccgcccagauguccauccagcugaucaacaaggccgucaacgcccugaucaacgaccagcucaucaugaagaaccaccuccgggacaucaugggcauccccuacugcaacuacagcaaguacugcuaccugaaccacacggugaccgggaagaccucccugccccgcugcugccuggugagcaacggcuccuaccugaacgagacccacuucagcgacgacaucgagcagcaggccgacaacaugaucacggagcuccugcagaaggaguacaucgaccggcagggcaagaccccgcuggggcucgucgaccuguucguguucuccaccagcuucuaccugaucuccaucuuccugcaccucgugaagaucccgacccaccgccacaucacgggcaagcccugccccaagccccaccggcugaaccacauggggaucugcagcugcggccuguacaagcacccggggguccccgugaaguggaagcgcugaggacuagucccuguucccagagcccacuuuuuuuucuuuuuuugaaauaaaauagccugucuuucagaucucaaaggcucuuuucagagccaccaaaaaaaaaaaaaaaaaaaaaaaaaaaaaaaaaaaaaaaaaaaaaaaaaaaaaaaaaaaaaaaaaaaaaaaaaaaaaaaaaaaaaaaaaaaaaaaaaaaaa

SEQ ID NO: 33424 - RNA, 1745 nt, Artificial Sequence
  mRNA product Design a-1 (hSL-A100) comprising derived and/or modified sequence from LASV(Lassa virus/H.sapiens-wt/NGA/2016/ISTH_0009;Clade II)__AVO03571__GPCmut8 (opt1)
aggagagucccgcagucggcguccagcggcucugcuuguucgugugugugucguugcaggccuuauucaagcuuaccaugggccagaucaucaccuucuuccaggaggugccccacgucaucgaggaggugaugaacaucgugcugaucgcccucagccugcuggccauccucaaggggaucuacaacgucgcgaccugcggccugcuggggcucguguccuuccugcugcucugcggccgcagcugcuccacgaccuacaaggggguguacgagcugcagacccuggagcucgacauggccagccugaacaugugcaugccgcuguccugcacgaagaacaacagccaccacuacaucauggucggcaacgagaccggccucgagcugacccugaccaacacguccaucaucaaccacaaguucugcaaccucagcgacgcccacaagaagaaccuguacgaccacgcccugauguccaucaucagcaccuuccaccucuccauccccaacuucaaccaguacgaggccaugagcugcgacuucaacgggggccggaucuccgugcaguacaaccugagccacuccuacgcgguggacgccgccaaccacugcgggaccaucgccaacggcguccugcagaccuucaugcgcauggcguggggcgggagcuacaucgcccucgacuccggcaaggggagcugggacugcaucaugacguccuaccaguaccugaucauccagaacaccaccugggaggaccacugccaguucagccggcccagccccaucggcuaccuggggcuccugucccagcgcacccgggacaucuacaucagccgccggcugcucggcacguucaccuggacccuguccgacagcgagggcaacgagacccccgggggcuacugccugacgcgcuggaugcucaucgaggccgagcugaagugcuucgggaacaccgccguggccaagugcaacgagaagcacgacgaggaguucugcgacaugcugcggcuguucgacuucugcaagcaggcgauccgccggcugaagacccccgcccagauguccauccagcugaucaacaaggccgugaacgcccucaucaacgaccagcugaucaugaagaaccaccuccgcgacaucaugggcaucccguacugcaacuacagcaaguacugcuaccucaaccacaccgucacggggaagaccucccugccccggugcugccuggugagcaacggcuccuaccucaacgagacccacuucagcgacgacaucgagcagcaggccgacaacaugaucaccgagcugcugcagaaggaguacaucgaccgccagggcaagacgccccucgggcugguggaccuguucgucuucuccaccagcuucuaccugaucuccaucuuccuccaccuggugaagaucccgacccaccggcacaucaccggcaagcccugccccaagccccaccgccugaaccacauggggaucugcagcugcggccucuacaaccacccgggggugcccgucaaguggaagcggugaggacuagucccuguucccagagcccacuuuuuuuucuuuuuuugaaauaaaauagccugucuuucagaucucaaaggcucuuuucagagccaccaaaaaaaaaaaaaaaaaaaaaaaaaaaaaaaaaaaaaaaaaaaaaaaaaaaaaaaaaaaaaaaaaaaaaaaaaaaaaaaaaaaaaaaaaaaaaaaaaaaaa

SEQ ID NO: 33425 - RNA, 1745 nt, Artificial Sequence
  mRNA product Design a-1 (hSL-A100) comprising derived and/or modified sequence from LASV(Lassa virus/H.sapiens-wt/NGA/2016/ISTH_0017;Clade II)__AVO03567__GPCmut8 (opt1)
aggagagucccgcagucggcguccagcggcucugcuuguucgugugugugucguugcaggccuuauucaagcuuaccaugggccagaucaucaccuucuuccaggaggugccccacgucaucgaggaggugaugaacaucgugcugaucgcccucagccugcuggccauccucaaggggaucuacaacgucgcgaccugcggccuguucgggcugguguccuuccuccugcugugcggccgcagcugcuccacgaccuacaaggggguguacgagcuccagacccuggagcuggacauggccagccucaacaugugcaugccgcuguccugcacgaagaacaacagccaccacuacaucauggucggcaacgagaccggccuggagcucacccugaccaacacguccaucaucaaccacaaguucugcaaccugagcgacgcccacaagaagaaccucuacgaccacgcccugauguccaucaucagcaccuuccaccuguccauccccaacuucaaccaguacgaggccaugagcugcgacuucaacgggggcaagaucuccgugcaguacaaccucagccacaccuacgcgaucgacgccgccaaccacugcgggaccaucgccaacggcgugcugcagacguucaugcggauggcguggggcggguccuacaucgcccuggacagcggcaagggguccugggacugcaucaugaccagcuaccaguaccucaucauccagaacaccaccugggaggaccacugccaguucucccgccccagccccaucggcuaccuggggcugcucagccagcggacgcgcgacaucuacaucucccggcgccugcugggcaccuucaccuggacccucagcgacuccgagggcaacgagacgcccgggggcuacugccugacccgguggaugcugaucgaggccgagcucaagugcuucgggaacaccgccgucgccaagugcaacgagaagcacgacgaggaguucugcgacaugcugcgccuguucgacuucugcaagcaggcgauccggcgccucaagacccccgcccagaugagcauccagcugaucaacaaggccgugaacgcccugaucaacgaccagcucaucaugaagaaccaccuccgggacaucaugggcauccccuacugcaacuacuccaaguacugcuaccugaaccacacggugaccgggaagaccagccugccccgcugcugccuggucuccaacggcagcuaccugaacgagacccacuucuccgacgacaucgagcagcaggccgacaacaugaucacggagcuccugcagaaggaguacauggaccggcagggcaagaccccgcuggggcucguggaccuguucguguucagcaccuccuucuaccugaucagcaucuuccugcaccucguccgcaucccgacccaccggcacgugaucggcaagcccugccccaagccccaccgccugaaccacauggggaucugcuccugcggccuguacaagcacccgggggugcccgucaaguggaagcggugaggacuagucccuguucccagagcccacuuuuuuuucuuuuuuugaaauaaaauagccugucuuucagaucucaaaggcucuuuucagagccaccaaaaaaaaaaaaaaaaaaaaaaaaaaaaaaaaaaaaaaaaaaaaaaaaaaaaaaaaaaaaaaaaaaaaaaaaaaaaaaaaaaaaaaaaaaaaaaaaaaaaa

SEQ ID NO: 33426 - RNA, 1745 nt, Artificial Sequence
  mRNA product Design a-1 (hSL-A100) comprising derived and/or modified sequence from LASV(Lassa virus/H.sapiens-wt/NGA/2018/ISTH_0959;Clade II)__AVV65099__GPCmut8 (opt1)
aggagagucccgcagucggcguccagcggcucugcuuguucgugugugugucguugcaggccuuauucaagcuuaccaugggccagaucaucaccuucuuccaggaggugccccacgucaucgaggaggugaugaacaucgugcugaucgcccucagccugcuggccauccucaaggggaucuacaacgucgugaccugcggccuguucgggcugguguccuuccuccugcugugcggccgcagcugcuccacgaccuacaagggggucuacgagcuccagacccuggagcuggacauggcgagccucaacaugugcaugccgcuguccugcacgaagaacaacagccaccacuacaucauggugggcaacgagaccggccuggagcucacccugaccaacacguccaucaucaaccacaaguucugcaaccugagcgacgcccacaagaagaaccucuacgaccacgcccugauguccaucaucagcaccuuccaccuguccauccccaacuucaaccaguacgaggccaugagcugcgacuucaacgggggcaagaucuccgugcaguacaaccucagccacgccuacgcgaucgacgccgccaaccacugcgggaccaucgccaacggcguccugcagaccuucaugcggauggcguggggcggguccuacaucgcccuggacagcggcaagggguccugggacugcaucaugacgagcuaccaguaccucaucauccagaacaccaccugggaggaccacugccaguucucccgccccagccccaucggcuaccuggggcugcucagccagcggacccgcgacaucuacaucucccggcgccugcugggcacguucaccuggacccucagcgacuccgagggcaacgagacccccgggggcuacugccugacgcgguggaugcugaucgaggccgagcucaagugcuucgggaacaccgccguggccaagugcaacgagaagcacgacgaggaguucugcgacaugcugcgccuguucgacuucugcaagcaggcgauccggcgccucaagacccccgcccagaugagcauccagcugaucaacaaggccgugaacgcccugaucaacgaccagcucaucaugaagaaccaccuccgggacaucaugggcaucccguacugcaacuacuccaaguacugcuaccugaaccacaccgucacggggaagaccagccugccccgcugcugccugguguccaacggcagcuaccugaacgagacccacuucuccgacgacaucgagcagcaggccgacaacaugaucaccgagcuccugcagaaggaguacaucgaccggcagggcaagacgccccuggggcucguggaccuguucgucuucagcaccuccuucuaccugaucagcaucuuccugcaccucgugaagaucccgacccaccgccacgugaucggcaagcccugccccaagccccaccggcugaaccacauggggaucugcuccugcggccuguacaagcacccggggguccccgugaaguggaagcgcugaggacuagucccuguucccagagcccacuuuuuuuucuuuuuuugaaauaaaauagccugucuuucagaucucaaaggcucuuuucagagccaccaaaaaaaaaaaaaaaaaaaaaaaaaaaaaaaaaaaaaaaaaaaaaaaaaaaaaaaaaaaaaaaaaaaaaaaaaaaaaaaaaaaaaaaaaaaaaaaaaaaaa

SEQ ID NO: 33427 - RNA, 1745 nt, Artificial Sequence
  mRNA product Design a-1 (hSL-A100) comprising derived and/or modified sequence from LASV(LASV003-NIG-2008;Clade II)__AIT17580__GPCmut8 (opt1)
aggagagucccgcagucggcguccagcggcucugcuuguucgugugugugucguugcaggccuuauucaagcuuaccaugggccagaucaucaccuucuuccaggaggugccccacgucaucgaggaggugaugaacaucgugcugaucgcccucagccugcuggccauccucaaggggaucuacaacgucgcgaccugcggccuguucgggcugguguccuuccuccugcugugcggccgcagcugcuccacgaccuacaaggggguguacgagcuccagacccuggagcuggacauggccagccucaacaugugcaugccgcuguccugcacgaagaacaacagccaccacuacaucauggucggcaacgagaccggccuggagcucacccugaccaacacguccaucaucaaccacaaguucugcaaccugagcgacgcccacaagaagaaccucuacgaccacgcccugauguccaucaucagcaccuuccaccuguccauccccaacuucaaccaguacgaggccaugagcugcgacuucaacgggggcaagaucuccgugcaguacaaccucagccacaccuacgcgguggacgccgccaaccacugcgggaccaucgccaacggcguccugcagacguucaugcggauggcguggggcggguccuacaucgcccuggacagcggcaagggguccugggacugcaucaugaccagcuaccaguaccucaucauccagaacaccaccugggaggaccacugccaguucucccgccccagccccaucggcuaccuggggcugcucagccagcggacgcgcgacaucuacaucucccggcgccugcugggcaccuucaccuggacccucagcgacuccgagagcaacgagacgccgggcggguacugccugacccgguggaugcugaucgaggccgagcucaagugcuucggcaacaccgccguggccaagugcaacgagaagcacgacgaggaguucugcgacaugcugcgccuguucgacuucugcaagcaggcgauccggcgccucaaggcccccgcccagauguccauccagcugaucaacaaggccgugaacgcccugaucaacgaccagcucaucaugaagaaccaccuccgggacaucauggggauccccuacugcaacuacagcaaguacugcuaccugaaccacaccgucacgggccgcaccucccugccccggugcugccuggugagcaacggguccuaccugaacgagacccacuucagcgacgacaucgagcagcaggcggacaacaugaucaccgagcuccugcagaaggaguacauggaccgccagggcaagacgccccugggccucguggaccuguucgucuucuccaccagcuucuaccugaucuccaucuuccugcaccucgugaagaucccgacccaccggcacgugaucgggaagcccugccccaagccccaccgccugaaccacaugggcaucugcagcugcgggcuguacaagcacccgggcguccccgugaaguggaagcggugaggacuagucccuguucccagagcccacuuuuuuuucuuuuuuugaaauaaaauagccugucuuucagaucucaaaggcucuuuucagagccaccaaaaaaaaaaaaaaaaaaaaaaaaaaaaaaaaaaaaaaaaaaaaaaaaaaaaaaaaaaaaaaaaaaaaaaaaaaaaaaaaaaaaaaaaaaaaaaaaaaaaa

SEQ ID NO: 33428 - RNA, 1745 nt, Artificial Sequence
  mRNA product Design a-1 (hSL-A100) comprising derived and/or modified sequence from LASV(LASV035-NIG-2009;Clade II)__AIT17588__GPCmut8 (opt1)
aggagagucccgcagucggcguccagcggcucugcuuguucgugugugugucguugcaggccuuauucaagcuuaccaugggccagaucaucaccuucuuccaggaggugccccacgucaucgaggaggugaugaacaucgugcugaucgcccucagccugcuggccauccucaaggggaucuacaacgucgcgaccugcggccuguucgggcugguguccuuccuccugcugugcggccgcagcugcuccacgaccuacaaggggguguacgagcuccagacccuggagcuggacauggccagccucaacaugugcaugccgcuguccugcacgaagaacaacagccaccacuacaucauggucggcaacgagaccggccuggagcucacccugaccaacacguccaucaucaaccacaaguucugcaaccugagcgacgcccacaagaagaaccucuacgaccacgcccugauguccaucaucagcaccuuccaccuguccauccccaacuucaaccaguacgaggccaugagcugcgacuucaacgggggcaagaucuccgugcaguacaaccucagccacgcguacgccguggacgccgccaaccacugcgggaccaucgcgaacggcguccugcagaccuucaugcggauggccuggggcggguccuacaucgcccuggacagcggcaagggguccugggacugcaucaugacgagcuaccaguaccucaucauccagaacaccaccugggaggaccacugccaguucucccgccccagccccaucggcuaccuggggcugcucagccagcggacccgcgacaucuacaucucccggcgccugcugggcacguucaccuggacccucagcgacuccgagggcaacgagacccccgggggcuacugccugacgcgguggaugcugaucgaggccgagcucaagugcuucgggaacaccgccguggcgaagugcaacgagaagcacgacgaggaguucugcgacaugcugcgccuguucgacuucugcaagcaggccauccggcgccucaaggcccccgcccagaugagcauccagcugaucaacaaggccgugaacgcgcugaucaacgaccagcucaucaugaagaaccaccuccgggacaucaugggcauccccuacugcaacuacuccaaguacugcuaccugaaccacaccgucaccgggaagacgagccugccccgcugcugccugguguccaacggcagcuaccugaacgagacccacuucuccgacgacaucgagcagcaggccgacaacaugaucaccgagcuccugcagaaggaguacaucgaccggcagggcaagaccccgcuggggcucguggaccuguucgucuucagcacguccuucuaccugaucagcaucuuccugcaccucgugaagaucccgacccaccgccacgugaucggcaagcccugccccaagccccaccggcugaaccacauggggaucugcuccugcggccuguacaagcacccggggguccccgugaaguggaagcgcugaggacuagucccuguucccagagcccacuuuuuuuucuuuuuuugaaauaaaauagccugucuuucagaucucaaaggcucuuuucagagccaccaaaaaaaaaaaaaaaaaaaaaaaaaaaaaaaaaaaaaaaaaaaaaaaaaaaaaaaaaaaaaaaaaaaaaaaaaaaaaaaaaaaaaaaaaaaaaaaaaaaaa

SEQ ID NO: 33429 - RNA, 1745 nt, Artificial Sequence
  mRNA product Design a-1 (hSL-A100) comprising derived and/or modified sequence from LASV(LASV1000-NIG-2009;Clade II)__AIT17782__GPCmut8 (opt1)
aggagagucccgcagucggcguccagcggcucugcuuguucgugugugugucguugcaggccuuauucaagcuuaccaugggccagaucaucaccuucuuccaggaggugccccacgucaucgaggaggugaugaacaucgugcugaucgcccucagccugcuggccauccucaaggggaucuacaacgucgcgaccugcggccuguucgggcugguguccuuccuccugcugugcggccgcagcugcuccacgaccuacaaggggguguacgagcuccagacccuggagcuggacauggccagccucaacaugugcaugccgcuguccugcacgaagaacaacagccaccacuacaucauggucggcaacgagaccggccuggagcucacccugaccaacacguccaucaucaaccacaaguucugcaaccugagcgacgcccacaagaagaaccucuacgaccacgcccugauguccaucaucagcaccuuccaccuguccauccccaacuucaaccaguacgaggccaugagcugcgacuucaacgggggcaagaucuccgugcaguacaaccucagccacaccuacgcgguggacgccgccaaccacugcgggaccaucgccaacggcguccugcagacguucaugcggauggcguggggcggguccuacaucgcccuggacagcggcaagggguccugggacugcaucaugaccagcuaccaguaccucaucauccagaacaccaccugggaggaccacugccaguucucccgccccagccccaucggcuaccuggggcugcucagccagcggacgcgcgacaucuacaucucccggcgccugcugggcaccuucaccuggacccucagcgacuccgagggcaacgagacgcccgggggcuacugccugacccgguggaugcugaucgaggccgagcucaagugcuucgggaacaccgccguggccaagugcaacgagaagcacgacgaggaguucugcgacaugcugcgccuguucgacuucugcaagcaggcgaucaagcggcucaagacccccgcccagaugagcauccagcugaucaacaaggccgugaacgcccugaucaacgaccagcucaucaugaagaaccaccuccgcgacaucaugggcauccccuacugcaacuacuccaaguacugcuaccugaaccacacggucaccgggaagaccagccugccccggugcugccugguguccaacggcagcuaccugaacgagacccacuucuccgacgacaucgagcagcaggccgacaacaugaucacggagcuccugcagaaggaguacaucgaccgccagggcaagaccccgcuggggcucguggaccuguucgucuucagcaccuccuucuaccugaucagcaucuuccugcaccucgugaagaucccgacccaccggcacguggucggcaagcccugccccaagccccaccgccugaaccacauggggaucugcuccugcggccuguacaagcacccgggggugcccgugaaguggaagcggugaggacuagucccuguucccagagcccacuuuuuuuucuuuuuuugaaauaaaauagccugucuuucagaucucaaaggcucuuuucagagccaccaaaaaaaaaaaaaaaaaaaaaaaaaaaaaaaaaaaaaaaaaaaaaaaaaaaaaaaaaaaaaaaaaaaaaaaaaaaaaaaaaaaaaaaaaaaaaaaaaaaaa

SEQ ID NO: 33430 - RNA, 1745 nt, Artificial Sequence
  mRNA product Design a-1 (hSL-A100) comprising derived and/or modified sequence from LASV(LASV221-NIG-2010;Clade II)__AIT17624__GPCmut8 (opt1)
aggagagucccgcagucggcguccagcggcucugcuuguucgugugugugucguugcaggccuuauucaagcuuaccaugggccagaucaucaccuucuuccaggaggugccccacgucaucgaggaggugaugaacaucgugcugaucgcccucagccugcuggccauccucaaggggaucuacaacgucgcgaccugcggccuguucgggcugguguccuuccuccugcugugcggccgcagcugcuccacgaccuacaaggggguguacgagcuccagacccuggagcuggacauggccagccucaacaugugcaugccgcuguccugcacgaagaacaacagccaccacuacaucauggucggcaacgagaccggccuggagcucacccugaccaacacguccaucaucaaccacaaguucugcaaccugagcgacgcccacaagaagaaccucuacgaccacgcccugauguccaucaucagcaccuuccaccuguccauccccaacuucaaccaguacgaggccaugagcugcgacuucaacgggggcaagaucuccgugcaguacaaccucagccacaccuacgcgaucgacgccgccaaccacugcgggaccaucgccaacggcgugcugcagacguucaugcggauggcguggggcggguccuacaucgcccuggacagcggcaagggguccugggacugcaucaugaccagcuaccaguaccucaucauccagaacaccaccugggaggaccacugccaguucucccgccccagccccaucggcuaccuggggcugcucagccagcggacgcgcgacaucuacaucucccggcgccugcugggcaccuucaccuggacccucagcgacuccgagggcaacgagacgcccgggggcuacugccugacccgguggaugcugaucgaggccgagcucaagugcuucgggaacaccgccgucgccaagugcaacgagaagcacgacgaggaguucugcgacaugcugcgccuguucgacuucugcaagcaggcgauccggcgccucaagacccccgcccagaugagcauccagcugaucaacaaggccgugaacgcccugaucaacgaccagcucaucaugaagaaccaccuccgggacaucaugggcauccccuacugcaacuacuccaaguacugcuaccugaaccacacggugaccgggaagaccagccugccccgcugcugccuggucuccaacggcagcuaccugaacgagacccacuucuccgacgacaucgagcagcaggccgacaacaugaucacggagaugcuccagaaggaguacauggaccggcagggcaagaccccgcuggggcugguggaccucuucguguucagcaccuccuucuaccugaucagcaucuuccugcaccuggucaagaucccgacccaccgccacgugaucggcaagcccugccccaagccccaccggcucaaccacauggggaucugcuccugcggccuguacaagcacccgggggugcccgucaaguggaagcgcugaggacuagucccuguucccagagcccacuuuuuuuucuuuuuuugaaauaaaauagccugucuuucagaucucaaaggcucuuuucagagccaccaaaaaaaaaaaaaaaaaaaaaaaaaaaaaaaaaaaaaaaaaaaaaaaaaaaaaaaaaaaaaaaaaaaaaaaaaaaaaaaaaaaaaaaaaaaaaaaaaaaaa

SEQ ID NO: 33431 - RNA, 1745 nt, Artificial Sequence
  mRNA product Design a-1 (hSL-A100) comprising derived and/or modified sequence from LASV(LASV237-NIG-2010;Clade II)__AIT17638__GPCmut8 (opt1)
aggagagucccgcagucggcguccagcggcucugcuuguucgugugugugucguugcaggccuuauucaagcuuaccaugggccagaucaucaccuucuuccaggaggugccccacgucaucgaggaggugaugaacaucgugcugaucgcccucagccugcuggccauccucaaggggaucuacaacgucgcgaccugcggccuguucgggcugguguccuuccuccugcugugcggccgcagcugcuccacgaccuacaaggggguguacgagcuccagacccuggagcuggacauggccagccucaacaugugcaugccgcuguccugcacgaagaacaacagccaccacuacaucauggucggcaacgagaccggccuggagcucacccugaccaacacguccaucaucaaccacaaguucugcaaccugagcgacgcccacaagaaggaccucuacgaccacgcccugauguccaucaucagcaccuuccaccuguccauccccaacuucaaccaguacgaggccaugagcugcgacuucaacgggggcaagaucuccgugcaguacaaccucagccacaccuacgcgguggacgccgccaaccacugcgggaccaucgccaacggcguccugcagacguucaugcggauggcguggggcggguccuacaucgcccuggacagcggcaagggguccugggacugcaucaugaccagcuaccaguaccucaucauccagaacaccaccugggaggaccacugccaguucucccgccccagccccaucggcuaccuggggcugcucagccagcggacgcgcgacaucuacaucucccggcgccugcugggcaccuucaccuggacccucagcgacuccgagggcaacgagacgcccgggggcuacugccugacccgguggaugcugaucgaggccgagcucaagugcuucgggaacaccgccguggccaagugcaacgagaagcacgacgaggaguucugcgacaugcugcgccuguucgacuucugcaagcaggcgauccggcgccucaagacccccgcccagaugagcauccagcugaucaacaaggccgugaacgcccugaucaacgaccagcucaucaugaagaaccaccuccgggacaucaugggcauccccuacugcaacuacuccaaguacugcuaccugaaccacacggucaccgggaagaccagccugccccgcugcugccugguguccaacggcagcuaccugaacgagacccacuucuccgacgacaucgagcagcaggccgacaacaugaucacggagcuccugcagaaggaguacauggaccggcagggcaagaccccgcuggggcucguggaccuguucgucuucagcaccuccuucuaccugaucagcaucuuccugcaccucaucaagaucccgacccaccgccacaucacgggcaagcccugccccaagccccaccggcugaaccacauggggaucugcuccugcggccuguacaagcacccgggggugcccgugaaguggaagcgcugaggacuagucccuguucccagagcccacuuuuuuuucuuuuuuugaaauaaaauagccugucuuucagaucucaaaggcucuuuucagagccaccaaaaaaaaaaaaaaaaaaaaaaaaaaaaaaaaaaaaaaaaaaaaaaaaaaaaaaaaaaaaaaaaaaaaaaaaaaaaaaaaaaaaaaaaaaaaaaaaaaaaa

SEQ ID NO: 33432 - RNA, 1745 nt, Artificial Sequence
  mRNA product Design a-1 (hSL-A100) comprising derived and/or modified sequence from LASV(LASV253-NIG-2011;Clade II)__AIT17670__GPCmut8 (opt1)
aggagagucccgcagucggcguccagcggcucugcuuguucgugugugugucguugcaggccuuauucaagcuuaccaugggccagaucaucaccuucuuccaggaggugccccacgucaucgaggaggugaugaacaucgugcugaucgcccucagccugcuggccauccucaaggggaucuacaacgucgcgaccugcggccuguucgggcugguguccuuccuccugcugugcggccgcagcugcuccacgaccuacaaggggguguacgagcuccagacccuggagcuggacauggccagccucaacaugugcaugccgcuguccugcacgaagaacaacagccaccacuacaucauggucggcaacgagaccggccuggagcucacccugaccaacacguccaucaucaaccacaaguucugcaaccugagcgacgcccacaagaagaaccucuacgaccacgcccugauguccaucaucagcaccuuccaccuguccauccccaacuucaaccaguacgaggccaugagcugcgacuucaacgggggcaagaucuccgugcaguacaaccucagccacaccuacgcgguggacgccgccaaccacugcgggaccaucgccaacggcguccugcagacguucaugcggauggcguggggcggguccuacaucgcccuggacagcggcaagggguccugggacugcaucaugaccagcuaccaguaccucaucauccagaacaccaccugggaggaccacugccaguucucccgccccagccccaucggcuaccuggggcugcucagccagcggacgcgcgacaucuacaucucccggcgccugcugggcaccuucaccuggacccucagcgacuccgagggcaacgagacgcccgggggcuacugccugacccgguggaugcugaucgaggccgagcucaagugcuucgggaacaccgccguggccaagugcaacgagaagcacgacgaggaguucugcgacaugcugcgccuguucgacuucugcaagcaggcgauccggcgccucaaggcccccgcccagaugagcauccagcugaucaacaaggccgugaacgcccugaucaacgaccagcucaucaugaagaaccaccuccgggacaucaugggcaucccguacugcaacuacuccaaguacugcuaccugaaccacaccgucacggggcgcaccagccugccccggugcugccugguguccaacggcagcuaccugaacgagacccacuucuccgacgacaucgagcagcaggcggacaacaugaucaccgagcuccugcagaaggaguacaucgaccgccagggcaagacgccccuggggcucguggaccuguucgucuucagcaccuccuucuaccugaucagcaucuuccugcaccucgugaagaucccgacccaccggcacaucaucggcaagcccugccccaagccccaccgccugaaccacauggggaucugcuccugcggccuguacaagcacccgggggugcccgucaaguggaagcggugaggacuagucccuguucccagagcccacuuuuuuuucuuuuuuugaaauaaaauagccugucuuucagaucucaaaggcucuuuucagagccaccaaaaaaaaaaaaaaaaaaaaaaaaaaaaaaaaaaaaaaaaaaaaaaaaaaaaaaaaaaaaaaaaaaaaaaaaaaaaaaaaaaaaaaaaaaaaaaaaaaaaa

SEQ ID NO: 33433 - RNA, 1745 nt, Artificial Sequence
  mRNA product Design a-1 (hSL-A100) comprising derived and/or modified sequence from LASV(LASV254-NIG-2011;Clade II)__AIT17674__GPCmut8 (opt1)
aggagagucccgcagucggcguccagcggcucugcuuguucgugugugugucguugcaggccuuauucaagcuuaccaugggccagaucaucaccuucuuccaggaggugccccacgucaucgaggaggugaugaacaucgugcugaucgcccucagccugcuggccauccucaaggggaucuacaacgucgcgaccugcggccuguucgggcugguguccuuccuccugcugugcggccgcagcugcuccacgaccuacaaggggguguacgagcuccagacccuggagcuggacaugaccaaccucaacaugugcaugccgcugagcugcaccaagaacaacucccaccacuacaucauggucggcaacgagaccggccuggagcucacccugacgaacaccagcaucaucaaccacaaguucugcaaccuguccgacgcccacaagaagaaccucuacaaccacgcccugaugagcaucaucuccaccuuccaccugagcauccccaacuucaaccaguacgaggccauguccugcgacuucaacgggggcaagaucagcgugcaguacaaccucucccacagcuacgccguggacgcggccaaccacugcgggaccaucgccaacggcguccugcagacguucaugcggauggccuggggcggguccuacaucgcgcuggacagcggcaaggggaacugggacugcaucaugaccuccuaccaguaccucaucauccagaacaccaccugggaggaccacugccaguucagccgccccucccccaucggcuaccuggggcugcucagccagcggacgcgcgacaucuacaucagccggcgccugcugggcaccuucaccuggacccucuccgacagcgagggcaacgagacgcccgggggcuacugccugacccgguggaugcugaucgaggccgagcucaagugcuucgggaacaccgccguggccaagugcaacgagaagcacgacgaggaguucugcgacaugcugcgccuguucgacuucugcaagcaggccauccggcgccucaagacccccgcgcaggccaacauccagcugaucaacaaggccgugaacgcccugaucaacgaccagcucaucaugaagaaccaccuccgggacaucaugggcauccccuacugcaacuacuccaaguacugcuaccugaaccacacggucaccgggaagaccagccugccccgcugcugccugguguccaacggcagcuaccugaacgagacccacuucuccgacgacaucgagcagcaggccgacaacaugaucacggagcuccugcagaaggaguacauggaccggcagggcaagaccccgcuggggcucguggaccuguucgucuucagcaccuccuucuaccugaucagcaucuuccugcaccucgugaagaucccgacccaccgccacgugaucggcaagcccugccccaagccccaccggcugaaccacauggggaucugcuccugcggccuguacaagcacccggggguccccgugaaguggaagcgcugaggacuagucccuguucccagagcccacuuuuuuuucuuuuuuugaaauaaaauagccugucuuucagaucucaaaggcucuuuucagagccaccaaaaaaaaaaaaaaaaaaaaaaaaaaaaaaaaaaaaaaaaaaaaaaaaaaaaaaaaaaaaaaaaaaaaaaaaaaaaaaaaaaaaaaaaaaaaaaaaaaaaa

SEQ ID NO: 33434 - RNA, 1745 nt, Artificial Sequence
  mRNA product Design a-1 (hSL-A100) comprising derived and/or modified sequence from LASV(Nig08-A19;Clade III)__ADU56618__GPCmut8 (opt1)
aggagagucccgcagucggcguccagcggcucugcuuguucgugugugugucguugcaggccuuauucaagcuuaccaugggccagaucgugaccuucuuccaggaggucccccacgugaucgaggaggugaugaacaucguccugaucgcccucagcauccuggccauccugaaggggcucuacaacaucgcgaccugcggccugaucgggcuggugacguuccuccugcuguccggccgcagcugcuccaugaccuacaaggggguguacgagcuccagacccuggagcugaacaugaacacccucaacaugugcaugccgcugagcugcaccaagaacaacucccaccacuacaucauggucggcaacgagaccggccuggagcucacccugacgaacaccagccugcuccaccacaaguucugcaaccuguccgacgcccacaagaagaaccuguacgaccacacccucaugagcaucaucuccaccuuccaccugagcauccccaacuucaaccaguacgaggccauguccugcgacuucaacgggggcaagaucacggugcaguacaaccugagccacuccuacgccaucgacgccgcgaaccacugcgggaccguggccaacggcguccuccagaccuucaugcggauggccuggggcgggagcuacaucgcccuggacuccggccgcgggaagugggacugcaucaugaccagcuaccaguaccugaucauccagaacacgaccugggaggaccacugccaguucucccggcccagccccaucggcuaccucgggcugcugucccagcgcacccgggacaucuacaucagccgccggcuccugggcaccuucacguggacccugagcgacuccgagggcaacgagacccccgggggcuacugccucacccgcuggaugcugaucgaggcggagcugaagugcuucgggaacacggccguggccaagugcaacgagaagcacgacgaggaguucugcgacaugcuccggcuguucgacuucugcaagcaggccauccgccggcugaaggcccccgcgcagaugagcauccagcucaucaacaaggccgugaacgcccugaucaacgaccagcugaucaugaagaaccaccuccgcgacaucaugggcauccccuacugcaacuacuccaaguacugcuaccugaaccacaccagcaccgggcggaccucccugccccgcugcugccucgucagcaacggcuccuaccugaacgagacgcacuucagcgacgacaucgagcagcaggccgacaacaugaucaccgagaugcugcagaaggaguaccucgaccggcagggcaagaccccgcuggggcugguggaccuguucguguucuccaccagcuucuaccucaucuccaucuuccugcaccuggucaagaucccgacgcaccgccacaucgugggcaagcccugccccaagccccaccggcucaaccacauggggaucugcagcugcggccuguacaagcagccgggggugcccguccgcuggaagcggugaggacuagucccuguucccagagcccacuuuuuuuucuuuuuuugaaauaaaauagccugucuuucagaucucaaaggcucuuuucagagccaccaaaaaaaaaaaaaaaaaaaaaaaaaaaaaaaaaaaaaaaaaaaaaaaaaaaaaaaaaaaaaaaaaaaaaaaaaaaaaaaaaaaaaaaaaaaaaaaaaaaaa

SEQ ID NO: 33435 - RNA, 1748 nt, Artificial Sequence
  mRNA product Design a-1 (hSL-A100) comprising derived and/or modified sequence from LASV(G1180-SLE-2010;Clade IV)__AIT17168__GPCmut8 (opt1)
aggagagucccgcagucggcguccagcggcucugcuuguucgugugugugucguugcaggccuuauucaagcuuaccaugggccagaucgugaccuucuuccaggaggucccccacgugaucgaggaggugaugaacaucguccugaucgcccucagcauccuggccgugcugaaggggcucuacaacuucgcgaccugcggccugguggggcugcucaccuuccugcugcucugcggccgcuccugcaccgccagccgguacaagggggucuacgagcugcagacccuggagcucaacauggagacccugaacaugugcaugccgcuguccugcaccaagaacaacagccaccacuacaucauggugggcaacgagaccggccucgagcugacccugacgaacaccuccaucaucaaccacaaguucugcaaccucagcgacgcccacaagaagaaccuguacgaccacgcccugauguccaucaucagcaccuuccaccucuccauccccaacuucaaccaguacgaggccaugagcugcgacuucaacgggggcaagaucuccgugcaguacaaccugagccacuccuacgcgggggacgccgccaaccacugcggcaccgucgccaacggggugcugcagacguucaugcgcauggcguggggcggcagcuacaucgcccucgacuccgggcacggcagcugggacugcaucaugaccuccuaccaguaccugaucauccagaacaccaccugggaggaccacugccaguucagccggcccucccccaucggguaccugggccuccugagccagcgcacgcgggacaucuacaucagccgccggcugcucggcaccuucaccuggacccuguccgacagcgaggggaaggacacgccgggcggguacugccugacccgcuggaugcucaucgaggccgagcugaagugcuucggcaacaccgccguggccaagugcaacgagaagcacgacgaggaguucugcgacaugcugcggcuguucgacuucugcaagcaggcgauccagcgccugaaggcccccgcccagauguccauccagcugaucaacaaggccgucaacgcccucaucaacgaccagcugaucaugaagaaccaccuccgggacaucauggggauccccuacugcaacuacagcaaguacugcuaccucaaccacaccacgaccggcaagaccucccugcccaagugcugccuggugagcaacggcuccuaccucaacgagacccacuucagcgacgacaucgagcagcaggcggacaacaugaucacggagaugcugcagaaggaguacauggagcgccaggggaagacgccccugggccucguggaccuguucgucuucuccaccagcuucuaccugaucuccaucuuccugcaccucgugaagaucccgacccaccggcacaucgugggcaagagcugccccaagccccaccgccugaaccacauggggaucugcuccugcgggcuguacaagcagcccggcgucccggugaaguggaagcggugaggacuagucccuguucccagagcccacuuuuuuuucuuuuuuugaaauaaaauagccugucuuucagaucucaaaggcucuuuucagagccaccaaaaaaaaaaaaaaaaaaaaaaaaaaaaaaaaaaaaaaaaaaaaaaaaaaaaaaaaaaaaaaaaaaaaaaaaaaaaaaaaaaaaaaaaaaaaaaaaaaaaa

SEQ ID NO: 33436 - RNA, 1748 nt, Artificial Sequence
  mRNA product Design a-1 (hSL-A100) comprising derived and/or modified sequence from LASV(G1442-SLE-2011;Clade IV)__AIT17180__GPCmut8 (opt1)
aggagagucccgcagucggcguccagcggcucugcuuguucgugugugugucguugcaggccuuauucaagcuuaccaugggccagaucgugaccuucuuccaggaggucccccacgugaucgaggaggugaugaacaucguccugaucgcccucagcauccuggccgugcugaaggggcucuacaacguggcgaccugcggccugaucgggcuggucacguuccuccugcugugcggccgcuccugcaccaccacccucuacaaggggguguacgagcugcagacgcuggagcucaacauggagacccugaacaugugcaugccgcugagcugcaccaagaacaacucccaccacuacauccgggugggcaacgagacgggccucgagcugacccugaccaacaccagcaucaucaaccacaaguucugcaaccucuccgacgcccacaagaagaaccuguacgaccacgcccugaugagcaucaucuccacguuccaccucagcauccccaacuucaaccaguacgaggccauguccugcgacuucaacgggggcaagaucagcguccaguacaaccugucccacagcuacgccggggacgcggccaaccacugcggcaccguggccaacggggugcugcagaccuucaugcgcauggccuggggcggcuccuacaucgcgcucgacagcgggcggggcaacugggacugcaucaugaccuccuaccaguaccugaucauccagaacacgaccugggacgaccacugccaguucagccgccccucccccaucggguaccugggccuccugagccagcggacccgcgacgucuacaucucccggcgccugcucggcaccuucacguggacccugagcgacagcgaggggaaggacaccccgggcggguacugccugacccgguggaugcucaucgaggccgagcugaagugcuucggcaacacggccguggccaagugcaacgagaagcacgacgaggaguucugcgacaugcugcgccucuucgacuucugcaagcaggccauccagcggcugaaggcgcccgcccagauguccauccagcugaucaacaaggccgugaacgcccucaucaacgaccagcugaucaugaagaaccaccuccgcgacaucauggggauccccuacugcaacuacagcaaguacugcuaccugaacaacaccgccaccggcaagaccucccugcccaagugcugccugaucagcaacggcuccuaccucaacgagacgcacuucagcgacgacaucgagcaggaggcggacaacaugaucaccgagaugcugcagaaggaguacauggagcggcaggggaagacgccccugggccucgucgaccuguucguguucuccaccagcuucuaccugaucuccaucuuccugcaccucgugaagaucccgacccaccgccacaucgucggcaagagcugccccaagccccaccggcugaaccacauggggaucugcuccugcgggcuguacaagcagcccggcgugccggugcgcuggaagcggugaggacuagucccuguucccagagcccacuuuuuuuucuuuuuuugaaauaaaauagccugucuuucagaucucaaaggcucuuuucagagccaccaaaaaaaaaaaaaaaaaaaaaaaaaaaaaaaaaaaaaaaaaaaaaaaaaaaaaaaaaaaaaaaaaaaaaaaaaaaaaaaaaaaaaaaaaaaaaaaaaaaaa

SEQ ID NO: 33437 - RNA, 1748 nt, Artificial Sequence
  mRNA product Design a-1 (hSL-A100) comprising derived and/or modified sequence from LASV(G3010-SLE-2013;Clade IV)__AIT17344__GPCmut8 (opt1)
aggagagucccgcagucggcguccagcggcucugcuuguucgugugugugucguugcaggccuuauucaagcuuaccaugggccagaucgugaccuucuuccaggaggucccccacgugaucgaggaggugaugaacaucguccugaucgcccucagcauccuggccgugcugaaggggcucuacaacuucgcgaccugcggccugguggggcuggucacguuccuccugcugugcggccgcuccugcaccaccagccucuacaaggggguguacgagcugcagacccuggagcucaacauggagacgcugaacaugugcaugccgcuguccugcaccaagaacaacagccaccacuacaucauggugggcaacgagaccggccucgagcugacgcugaccaacaccuccaucaucaaccacaaguucugcaaccucagcgacgcccacaagaagaaccuguacaaccacgcccugauguccaucaucagcaccuuccaccucuccauccccaacuucaaccaguacgaggccaugagcugcgacuucaacgggggcaagaucuccguccaguacaaccugagccacuccuacgccggggacgcggccagccacugcggcacgguggccaacggggugcugcagaccuucaugcggauggccuggggcggcuccuacaucgcgcucgacagcggguacggcaagugggacugcaucaugaccuccuaccaguaccugaucauccagaacaccacgugggaggaccacugccaguucagccgccccucccccaucggguaccugggccuccugagccagcggacccgcgacaucuacaucagccggcgccugcucggcaccuucaccuggacgcuguccgacagcgaggggaaggacaccccgggcggguacugccugacccgguggaugcucaucgaggccgagcugaagugcuucggcaacaccgccgucgccaagugcaacgagaagcacgacgaggaguucugcgacaugcugcgccucuucgacuucugcaagcaggccauccagcggcugaagacgcccgcgcagauguccauccagcugaucaacaaggccgugaacgcccucaucaacgaccagcugaucaugaagaaccaccuccgcgacaucauggggauccccuacugcaacuacagcaaguacugcuaccugaaccacaccaccaccggcaagacgucccugcccaagugcugccuggugagcaacggcuccuaccucaacgagacccacuucagcgacgacaucgagcagcaggccgacaacaugaucaccgagaugcugcagaaggaguacauggagcggcaggggaagacgccccugggccucgucgaccuguucguguucuccaccagcuucuaccugaucuccaucuuccugcaccucgugaagaucccgacccaccgccacaucgucggcaagagcugccccaagccccaccggcugaaccacauggggaucugcuccugcgggcuguacaagcagcccggcgugccggugcgcuggaagcggugaggacuagucccuguucccagagcccacuuuuuuuucuuuuuuugaaauaaaauagccugucuuucagaucucaaaggcucuuuucagagccaccaaaaaaaaaaaaaaaaaaaaaaaaaaaaaaaaaaaaaaaaaaaaaaaaaaaaaaaaaaaaaaaaaaaaaaaaaaaaaaaaaaaaaaaaaaaaaaaaaaaaa

SEQ ID NO: 33438 - RNA, 1748 nt, Artificial Sequence
  mRNA product Design a-1 (hSL-A100) comprising derived and/or modified sequence from LASV(G502-SLE-2009;Clade IV)__AIT17126__GPCmut8 (opt1)
aggagagucccgcagucggcguccagcggcucugcuuguucgugugugugucguugcaggccuuauucaagcuuaccaugggccagaucgugaccuucuuccaggaggucccccacgugaucgaggaggugaugaacaucguccugaucgcccucagcauccuggccgugcugaaggggcucuacaacuucgcgaccugcggccugguggggcugcucacguuccugcugcucugcggccgcuccugcaccaccgggcuguacaagggcgucuacgagcugcagacccucgagcugaacauggagacgcugaacaugugcaugccgcucagcugcaccaagaacaacucccaccacuacaucauggugggcaacgagaccgggcuggagcugacgcucaccaacaccagcaucaucaaccacaaguucugcaaccuguccgacgcccacaagaagaaccuguacgaccacgcccucaugagcaucaucuccaccuuccaccugagcauccccaacuucaaccaguacgaggccauguccugcgacuucaacggcgggaagaucagcgugcaguacaaccugucccacagcuacgccggcgacgcggccgaccacugcgggacggucgccaacggcgugcuccagaccuucaugcggauggccuggggcggguccuacaucgcgcuggacagcggccgcgggcggugggacugcaucaugaccuccuaccaguaccugaucauccagaacaccacgugggaggaccacugccaguucagccgccccucccccaucggcuaccucggccugcugagccagcggacccgcgacaucuacaucucccggcgccuccuggggaccuucaccuggacgcugagcgacagcgagggcaaggacacccccgggggcuacugccucacccgguggaugcugaucgaggccgagcugaagugcuucgggaacaccgccguggccaagugcaacgagaagcacgacgaggaguucugcgacaugcuccgccuguucgacuucugcaagcaggccauccagcggcugaaggcgcccgcccagauguccauccagcucaucaacaaggccgucaacgcccugaucaacgaccagcuggugaugaagaaccaccuccgcgacaucaugggcauccccuacugcaacuacagccgguacugcuaccugaaccacacgaccaccggccgcaccucccugcccaagugcugccucgugagcaacggguccuaccugaacgagacgcacuucagcgacgacaucgagcagcaggccgacaacaugaucaccgagaugcugcagaaggaguacauggagcggcagggcaagaccccgcucgggcuggucgaccuguucguguucuccaccagcuucuaccugaucuccaucuuccuccaccuggugaagaucccgacgcaccgccacaucgucggcaagagcugccccaagccccaccggcugaaccacauggggaucugcuccugcggccucuacaagcagcccggcgugccggugaaguggaagcgcugaggacuagucccuguucccagagcccacuuuuuuuucuuuuuuugaaauaaaauagccugucuuucagaucucaaaggcucuuuucagagccaccaaaaaaaaaaaaaaaaaaaaaaaaaaaaaaaaaaaaaaaaaaaaaaaaaaaaaaaaaaaaaaaaaaaaaaaaaaaaaaaaaaaaaaaaaaaaaaaaaaaaa

SEQ ID NO: 33439 - RNA, 1748 nt, Artificial Sequence
  mRNA product Design a-1 (hSL-A100) comprising derived and/or modified sequence from LASV(G733-SLE-2010;Clade IV)__AIT17154__GPCmut8 (opt1)
aggagagucccgcagucggcguccagcggcucugcuuguucgugugugugucguugcaggccuuauucaagcuuaccaugggccagaucgugaccuucuuccaggaggucccccacgugaucgaggaggugaugaacaucguccugaucgcccucagcauccuggccgugcugaaggggcucuacaacuucgcgaccugcggcaucguggggcuggucuccuuccugcuccugugcggccgcagcugcacgaccucccuguacaaggggguguacgagcuccagacccuggagcugaacauggagacccucaacaugugcaugccgcugagcugcaccaagaacaacucccaccacuacaucauggugggcaacgagaccggccuggagcucacccugacgaacaccagcaucaucaaccacaaguucugcaaccuguccgacgcccacaagaagaaccucuacgaccacgcccugaugagcaucaucuccaccuuccaccugagcauccccaacuucaaccaguacgaggccauguccugcgacuucaacgggggcaagaucagcguccaguacaaccucucccacagcuacgccggggacgcggccaaccacugcggcaccaucgccaacggggugcugcagacguucaugcggauggccuggggcggcuccuacaucgcgcuggacagcgggcgcgaccggugggacugcaucaugaccuccuaccaguaccucaucauccagaacaccaccugggaggaccacugccaguucagccgccccucccccaucggcuaccuggggcugcucagccagcggacgcgcgacaucuacaucagccggcgccugcugggcaccuucaccuggacccucuccgacagcgagggcaaggacacgcccgggggcuacugccugacccgguggaugcugaucgaggccgagcucaagugcuucgggaacaccgccguggccaagugcaacgagaagcacgacgaggaguucugcgacaugcugcgccuguucgacuucugcaagcaggccauccagcggcucaaggcgcccgcccagauguccauccagcugaucaacaaggccgucaacgcccugaucaacgaccagcucaucaugaagaaccaccuccgcgacaucaugggcauccccuacugcaacuacagcaaguacugcuaccugaaccacaccacgaccgggaagaccucccugcccaagugcugccuggugagcaacggcuccuaccugaacgagacccacuucagcgacgacaucgagcagcaggccgacaacaugaucacggagaugcuccagaaggaguacauggagcggcagggcaagaccccgcuggggcugguggaccucuucgucuucuccaccagcuucuaccugaucuccaucuuccugcaccuggugaagaucccgacccaccgccacguggucggcaagagcugccccaagccccaccggcucaaccacauggggaucugcuccugcggccuguacgggcagcccggcgugccggugaaguggaagcgcugaggacuagucccuguucccagagcccacuuuuuuuucuuuuuuugaaauaaaauagccugucuuucagaucucaaaggcucuuuucagagccaccaaaaaaaaaaaaaaaaaaaaaaaaaaaaaaaaaaaaaaaaaaaaaaaaaaaaaaaaaaaaaaaaaaaaaaaaaaaaaaaaaaaaaaaaaaaaaaaaaaaaa

SEQ ID NO: 33440 - RNA, 1748 nt, Artificial Sequence
  mRNA product Design a-1 (hSL-A100) comprising derived and/or modified sequence from MOPV/LASV reassortant(IGS-1;Clade IV)__AFY05576__GPCmut8 (opt1)
aggagagucccgcagucggcguccagcggcucugcuuguucgugugugugucguugcaggccuuauucaagcuuaccaugggccagaucgugaccuucuuccaggaggucccccacgugaucgaggaggugaugaacaucguccugaucgcccucagcgugcuggccgugcugaaggggcucuacaacuucgcgaccugcggccuggucgggcuggugacguuccuccugcugugcggccgcuccugcaccaccagccucuacaaggggguguacgagcugcagacccuggagcucaacauggagacgcugaacaugugcaugccgcuguccugcaccaagaacaacagccaccacuacaucauggucggcaacgagaccggccucgagcugacgcugaccaacaccuccaucaucaaccacaaguucugcaaccucagcgacgcccacaagaagaaccuguacgaccacgcccugauguccaucaucagcaccuuccaccucuccauccccaacuucaaccaguacgaggccaugagcugcgacuucaacgggggcaagaucuccgugcaguacaaccugagccacuccuacgccggggacgcggccaaccacugcggcacgguggccaacgggguccugcagaccuucaugcggauggccuggggcggcagcuacaucgcgcucgacuccgggcgcggcaacugggacugcaucaugaccagcuaccaguaccugaucauccagaacaccacgugggaggaccacugccaguucucccggcccagccccaucggguaccugggccuccugucccagcgcacccgggacaucuacaucagccgccggcugcucggcaccuucaccuggacgcugagcgacuccgagggggaggacaccccgggcggguacugccugacccgcuggaugcucaucgaggccgagcugaagugcuucggcaacaccgccguggccaagugcaacgagaagcacgacgaggaguucugcgacaugcugcggcuguucgacuucugcaagcaggccauccagcgccugaaggcgcccgcccagaugagcauccagcugaucaacaaggccgugaacgcccucaucaacgaccagcugaucaugaagaaccaccuccgggacaucauggggauccccuacugcaacuacuccaaguacugcuaccucaaccacacgaccaccggccgcaccagccugcccaagugcugccuggucuccaacggcagcuaccucaacgagacgcacuucuccgacgacaucgagcagcaggccgacaacaugaucaccgagaugcugcagaaggaguacauggagcggcaggggaagacgccccugggccucguggaccuguucguguucagcaccuccuucuaccugaucagcaucuuccugcaccucgucaagaucccgacccaccgccacaucguggggaaguccugccccaagccccaccggcugaaccacaugggcaucugcagcugcgggcuguacaagcagcccggcgugccggucaaguggaagcgcugaggacuagucccuguucccagagcccacuuuuuuuucuuuuuuugaaauaaaauagccugucuuucagaucucaaaggcucuuuucagagccaccaaaaaaaaaaaaaaaaaaaaaaaaaaaaaaaaaaaaaaaaaaaaaaaaaaaaaaaaaaaaaaaaaaaaaaaaaaaaaaaaaaaaaaaaaaaaaaaaaaaaa

SEQ ID NO: 33441 - RNA, 1748 nt, Artificial Sequence
  mRNA product Design a-1 (hSL-A100) comprising derived and/or modified sequence from LASV(LM765-SLE-2012;Clade IV)__AIT17814__GPCmut8 (opt1)
aggagagucccgcagucggcguccagcggcucugcuuguucgugugugugucguugcaggccuuauucaagcuuaccaugggccagaucgugaccuucuuccaggaggucccccacgugaucgaggaggugaugaacaucguccugaucgcccucagcauccuggccgugcugaaggggcucuacaacuucgcgaccugcggccugguggggcuggucacguuccuccugcugugcggccgcuccugcaccaccagccucuacaaggggguguacgagcugcagacccuggagcucaacauggagacgcugaacaugugcaugccgcuguccugcaccaagaacaacagccaccacuacaucauggugggcaacgagaccggccucgagcugacgcugaccaacaccuccaucaucgaccacaaguucugcaaccucagcgacgcccaccggaagaaccuguacgaccacgcccugauguccaucaucagcaccuuccaccucuccauccccaacuucaaccaguacgaggccaugagcugcgacuucaacgggggcaagaucuccguccaguacaaccugagccacuccuacgccaaggacgcggccgaccacugcgggacgguggccaacggcgugcugcagaccuucaugcgcauggccuggggcgggagcuacaucgcgcucgacuccggccgggggcgcugggacugcaucaugaccagcuaccaguaccugaucauccagaacaccacgugggaggaccacugccaguucucccggcccagccccaucggcuaccuggggcuccugucccagcgcacccgggacaucuacaucagccgccggcugcucggcaccuucaccuggacgcugagcgacuccgagggcaaggacacccccgggggcuacugccugacccgcuggaugcucaucgaggccgagcugaagugcuucgggaacaccgccgucgccaagugcaacgagaagcacgacgaggaguucugcgacaugcugcggcuguucgacuucugcaagcaggccauccagcgccugaaggcgcccgcccagaugagcauccagcugaucaacaaggccgugaacgcccucaucaacgaccagcugaucaugaagaaccaccuccgggacaucaugggcauccccuacugcaacuacuccaaguacugcuaccucaaccacacgaccaccgggaagaccagccugcccaagugcugccugguguccaacggcagcuaccucaacgagacgcacuucuccgacgacaucgagcagcaggccgacaacaugaucaccgagaugcugcagaaggaguacauggagcgccagggcaagaccccgcuggggcucgucgaccuguucguguucagcaccuccuucuaccugaucagcaucuuccugcaccucgugaagaucccgacgcaccggcacaucgucggcaagcccugccccaagccccaccgccugaaccacauggggaucugcuccugcggccuguacaagcagccgggggugcccgugaaguggaagcggugaggacuagucccuguucccagagcccacuuuuuuuucuuuuuuugaaauaaaauagccugucuuucagaucucaaaggcucuuuucagagccaccaaaaaaaaaaaaaaaaaaaaaaaaaaaaaaaaaaaaaaaaaaaaaaaaaaaaaaaaaaaaaaaaaaaaaaaaaaaaaaaaaaaaaaaaaaaaaaaaaaaaa

SEQ ID NO: 33442 - RNA, 1748 nt, Artificial Sequence
  mRNA product Design a-1 (hSL-A100) comprising derived and/or modified sequence from LASV(LM776-SLE-2012;Clade IV)__AIT17824__GPCmut8 (opt1)
aggagagucccgcagucggcguccagcggcucugcuuguucgugugugugucguugcaggccuuauucaagcuuaccaugggccagaucgugaccuucuuccaggaggucccccacgugaucgaggaggugaugaacaucguccugaucgcccucagcauccuggccgugcugaaggggcucuacaacuucgcgaccugcggccugguggggcuggucacguuccuccugcugugcggccgcuccugcaccaccagcguguacaaggggguguacgagcuccagacccuggagcugaacauggagacgcucaacaugugcaugccgcuguccugcaccaagaacaacagccaccacuacaucauggucggcaacgagaccggccuggagcucacgcugaccaacaccuccaucaucaaccacaaguucugcaaccugagcgacgcccacaagaagaaccucuacgaccacgcccugauguccaucaucagcaccuuccaccuguccauccccaacuucaaccaguacgaggccaugagcugcgacuucaacgggggcaagaucuccgugcaguacaaccucagccacuccuacgccggggacgcggccaaccacugcggcacgguggccaacgggguccugcagaccuucaugcggauggccuggggcggcagcuacaucgcgcuggacuccgggcacggcaagugggacugcaucaugaccagcuaccaguaccucaucauccagaacaccacgugggaggaccacugccaguucucccgccccagccccaucggguaccugggccugcucucccagcggacccgcgacaucuacaucagccggcgccugcugggcaccuucaccuggacgcucagcgacuccgaggggaaggacaccccgggcggguacugccugacccgguggaugcugaucgaggccgagcucaagugcuucggcaacaccgccguggccaagugcaacgagaagcacgacgaggaguucugcgacaugcugcgccuguucgacuucugcaagcaggccauccagcggcucaaggcgcccgcccagaugagcauccagcugaucaacaaggccgugaacgcccugaucaacgaccagcucaucaugaagaaccaccuccgcgacaucauggggauccccuacugcaacuacuccaaguacugcuaccugaaccacacgaccaccggcaagaccagccugcccaagugcugccuggucuccaacggcagcuaccugaacgagacgcacuucuccgacgacaucgagcagcaggccgacaacaugaucaccgagaugcuccagaaggaguacauggagcggcaggggaagacgccccugggccugguggaccucuucguguucagcaccuccuucuaccugaucagcaucuuccugcaccuggucaagaucccgacccaccgccacaucguggggaaguccugccccaagccccaccggcucaaccacaugggcaucugcagcugcgggcuguacaagcagcccggcgugccgguccgcuggaagcggugaggacuagucccuguucccagagcccacuuuuuuuucuuuuuuugaaauaaaauagccugucuuucagaucucaaaggcucuuuucagagccaccaaaaaaaaaaaaaaaaaaaaaaaaaaaaaaaaaaaaaaaaaaaaaaaaaaaaaaaaaaaaaaaaaaaaaaaaaaaaaaaaaaaaaaaaaaaaaaaaaaaaa

SEQ ID NO: 33443 - RNA, 1748 nt, Artificial Sequence
  mRNA product Design a-1 (hSL-A100) comprising derived and/or modified sequence from LASV(Mad39;Clade IV)__ANH09722__GPCmut8 (opt1)
aggagagucccgcagucggcguccagcggcucugcuuguucgugugugugucguugcaggccuuauucaagcuuaccaugggccagaucgugaccuucuuccaggaggucccccacgugaucgaggaggugaugaacaucguccugaucgcccucagcauccuggccgugcugaaggggcucuacaacguggcgaccugcggccugaucgggcuggucacguuccuccugcugugcggccgcuccugcaccaccacccucuacaaggggguguacgagcugcaggcccuggagcucaacauggagacgcugaacaugugcaugccgcugagcugcaccaagaacaacucccaccacuacauccgggugggcaacgagaccggccucgagcugacgcugaccaacaccagccucaucaaccacaaguucugcaaccuguccgacgcccacaagaagaaccuguacgaccacgcccucaugagcaucaucuccaccuuccaccugagcauccccaacuucaaccaguacgaggccauguccugcgacuucaacgacgggaagaucagcguccaguacaaccugucccacacguacgcgggcgacaccgccaaccacugcgggaccguggccaacggcgugcuccagaccuucaugcgcauggccuggggcgggagcuacaucgcgcuggacuccggccgcgggggcugggacugcaucaugacgagcuaccaguaccugaucauccagaacaccaccugggaggaccacugccaguucucccggcccagccccaucggguaccucggccugcugucccagcggacccgcgacaucuacaucagccggcgccuccugggcacguucaccuggacccuguccgacagcgaggggaaggacaccccgggcggguacugccucacgcgguggaugcugaucgaggccgagcugaagugcuucggcaacaccgccgucgccaagugcaacgagaagcacgacgaggaguucugcgacaugcuccgccuguucgacuucugcaagcaggccauccagcggcugaaggcgcccgcccagaugagcauccagcucaucaacaaggccgugaacgcccugaucaacgaccagcugaucaugaagaaccaccuccgcgacaucauggggauccccuacugcaacuacuccaaguacugcuaccugaaccacaccgugaccggcaagacgagccugcccaagugcugccucgucuccaacggcagcuaccugaacgagacccacuucuccgacgacaucgagcagcaggccgacaacaugaucaccgagaugcugcagaaggaguacauggagcggcaggggaagacgccccucggccugguggaccuguucguguucagcaccuccuucuaccugaucagcaucuuccuccaccuggucaagaucccgacccaccgccacgugguggggaagcccugccccaagccccaccggcugaaccacaugggcaucugcuccugcggguucuacaagcagccgggcguccccgugcgcuggaagcggugaggacuagucccuguucccagagcccacuuuuuuuucuuuuuuugaaauaaaauagccugucuuucagaucucaaaggcucuuuucagagccaccaaaaaaaaaaaaaaaaaaaaaaaaaaaaaaaaaaaaaaaaaaaaaaaaaaaaaaaaaaaaaaaaaaaaaaaaaaaaaaaaaaaaaaaaaaaaaaaaaaaaa

SEQ ID NO: 33444 - RNA, 1748 nt, Artificial Sequence
  mRNA product Design a-1 (hSL-A100) comprising derived and/or modified sequence from LASV(Z0947-SLE-2011;Clade IV)__AIT17840__GPCmut8 (opt1)
aggagagucccgcagucggcguccagcggcucugcuuguucgugugugugucguugcaggccuuauucaagcuuaccaugggccagaucgugaccuucuuccaggaggucccccacgugaucgaggaggugaugaacaucguccugaucgcccucagcauccuggccgugcugaaggggcucuacaacuucgcgaccugcggccugguggggcuggucacguuccuccugcugugcggccgcuccugcaccaucagccucuacaaggggguguacgagcugcagacccuggagcucaacauggagacccugaacaugugcaugccgcuguccugcaccaagaacaacagccaccacuacaucauggugggcaacgagaccggccucgagcugacccugacgaacaccuccaucaucaaccacaaguucugcaaccucagcgacgcccacaagaagaaccuguacgaccacgcccugauguccaucaucagcaccuuccaccucuccauccccaacuucaaccaguacgaggccaugagcugcgacuucaacgggggcaagaucuccguccaguacaaccugagccacuccuacgccggggacgcggccaaccacugcggcaccguggccaacggggugcugcagacguucaugcggauggccuggggcggcagcuacaucgcgcucgacuccgggcgcgaccggugggacugcaucaugaccagcuaccaguaccugaucauccagaacaccaccugggaggaccacugccaguucucccgccccagccccaucggcuaccuggggcuccugucccagcggacgcgcgacaucuacaucagccggcgccugcucggcaccuucaccuggacccugagcgacuccgagggcaaggacacgcccgggggcuacugccugacccgguggaugcucaucgaggccgagcugaagugcuucgggaacaccgccgucgccaagugcaacgagaagcacgacgaggaguucugcgacaugcugcgccucuucgacuucugcaagcaggccauccagcggcugaaggcgcccgcccagaugagcauccagcugaucaacaaggccgugaacgcccucaucaacgaccagcugaucaugaagaaccaccuccgcgacaucaugggcauccccuacugcaacuacuccaaguacugcuaccugaaccacaccacgaccgggaagaccagccugcccaagugcugccugguguccaacggcagcuaccucaacgagacccacuucuccgacgacaucgagcagcaggccgacaacaugaucacggagaugcugcagaaggaguacauggagcggcagggcaagaccccgcuggggcucgucgaccuguucguguucagcaccuccuucuaccugaucagcaucuuccugcaccucgugaagaucccgacccaccgccacaucgucggcaagcccugccccaagccccaccggcugaaccacauggggaucugcuccugcggccuguacaagcagccgggggugcccgugaaguggaagcgcugaggacuagucccuguucccagagcccacuuuuuuuucuuuuuuugaaauaaaauagccugucuuucagaucucaaaggcucuuuucagagccaccaaaaaaaaaaaaaaaaaaaaaaaaaaaaaaaaaaaaaaaaaaaaaaaaaaaaaaaaaaaaaaaaaaaaaaaaaaaaaaaaaaaaaaaaaaaaaaaaaaaaa

SEQ ID NO: 33445 - RNA, 1748 nt, Artificial Sequence
  mRNA product Design a-1 (hSL-A100) comprising derived and/or modified sequence from LASV(Josiah;Clade IV)__NP_694870__GPCmut8 (opt1)
aggagagucccgcagucggcguccagcggcucugcuuguucgugugugugucguugcaggccuuauucaagcuuaccaugggccagaucgugaccuucuuccaggaggucccccacgugaucgaggaggugaugaacaucguccugaucgcccucagcgugcuggccgugcugaaggggcucuacaacuucgcgaccugcggccuggucgggcuggugacguuccuccugcugugcggccgcuccugcaccaccagccucuacaaggggguguacgagcugcagacccuggagcucaacauggagacgcugaacaugugcaugccgcuguccugcaccaagaacaacagccaccacuacaucauggucggcaacgagaccggccucgagcugacccugacgaacaccuccaucaucaaccacaaguucugcaaccucagcgacgcccacaagaagaaccuguacgaccacgcccugauguccaucaucagcaccuuccaccucuccauccccaacuucaaccaguacgaggccaugagcugcgacuucaacgggggcaagaucuccgugcaguacaaccugagccacuccuacgccggggacgcggccaaccacugcggcaccguggccaacgggguccugcagacguucaugcggauggccuggggcggcagcuacaucgcgcucgacuccgggcgcggcaacugggacugcaucaugaccagcuaccaguaccugaucauccagaacaccaccugggaggaccacugccaguucucccggcccagccccaucggguaccugggccuccugucccagcgcacgcgggacaucuacaucagccgccggcugcucggcaccuucaccuggacccugagcgacuccgaggggaaggacacgccgggcggguacugccugacccgcuggaugcucaucgaggccgagcugaagugcuucggcaacaccgccguggccaagugcaacgagaagcacgacgaggaguucugcgacaugcugcggcuguucgacuucugcaagcaggccauccagcgccugaaggcgcccgcccagaugagcauccagcugaucaacaaggccgugaacgcccucaucaacgaccagcugaucaugaagaaccaccuccgggacaucauggggauccccuacugcaacuacuccaaguacugcuaccucaaccacaccacgaccggccgcaccagccugcccaagugcugccuggucuccaacggcagcuaccucaacgagacccacuucuccgacgacaucgagcagcaggccgacaacaugaucacggagaugcugcagaaggaguacauggagcggcaggggaagaccccgcugggccugguggaccucuucguguucagcaccuccuucuaccugaucagcaucuuccugcaccucgucaagauccccacccaccgccacaucguggggaaguccugccccaagccccaccggcugaaccacaugggcaucugcagcugcgggcuguacaagcagccgggcgugcccgucaaguggaagcgcugaggacuagucccuguucccagagcccacuuuuuuuucuuuuuuugaaauaaaauagccugucuuucagaucucaaaggcucuuuucagagccaccaaaaaaaaaaaaaaaaaaaaaaaaaaaaaaaaaaaaaaaaaaaaaaaaaaaaaaaaaaaaaaaaaaaaaaaaaaaaaaaaaaaaaaaaaaaaaaaaaaaaa

SEQ ID NO: 33446 - RNA, 1745 nt, Artificial Sequence
  mRNA product Design a-1 (hSL-A100) comprising derived and/or modified sequence from LASV(LP;Clade I)__AAF86701__GPCmut8 (opt1)
aggagagucccgcagucggcguccagcggcucugcuuguucgugugugugucguugcaggccuuauucaagcuuaccaugggccagaucaucaccuucuuccaggaggugccccacgucaucgaggaggugaugaacaucgugcugaucgcccucagccugcuggccauccucaaggggcuguacaacaucgcgaccugcggcaucaucgggcuggucgccuuccucuuccugugcggcaaguccugcagccugacgcucaagggcggguacgagcugcagacccuggagcucaacauggagacccugaacaugugcaugccgcuguccugcaccaagaacagcucccaccacuacauccgcgugggcaacgagacggggcucgagcugacccugaccaacaccagcaucaucaaccacaaguucugcaaccucuccgacgcccacaagaagaaccuguacgaccacgcccugaugagcaucaucuccacguuccaccucagcauccccaacuucaaccaguacgaggccauguccugcgacuucaacggcgggaagaucagcgugcaguacaaccugucccacagcuacgcgggcgacgccgccgagcacugcgggaccgucgccaacggcgugcugcagaccuucaugcggauggcguggggcgggcgcuacaucgcccucgacuccggcaaggggaacugggacugcaucaugaccagcuaccaguaccugaucauccagaacacgaccugggaggaccacugccaguucucccggcccagccccaucggcuaccugggccuccugucccagcgcacccgggacaucuacaucagccgccggcugcucgggaccuucacguggacccugagcgacuccgagggcaacgagacccccgggggcuacugccugacccgcuggaugcucaucgaggccgagcugaagugcuucgggaacacggccguggccaagugcaacgagaagcacgacgaggaguucugcgacaugcugcggcuguucgacuucugcaagcaggcgauccgccggcugaaggccccggcccagaugagcauccagcugaucaacaaggccgucaacgcccucaucaacgaccagcugaucaugaagaaccaccuccgcgacaucaugggcauccccuacugcaacuacuccaaguacugcuaccucaaccacaccagcuccggccggaccagccugcccaagugcugccugaucuccaacgggagcuaccucaacgagacccaguucuccgacgacaucgagcagcaggcggacaacaugaucacggagaugcugcagaaggaguacaucgagcgccagggcaagaccccgcuggggcugguggacaucuucaucuucagcaccuccuucuaccucaucagcaucuuccugcaccugaucaagauccccacccaccggcacaucgugggcaagcccugccccaagccgcaccgccucaaccacaugggggucugcuccugcggccuguacaagcaccccggcgugcccacgaaguggaagcggugaggacuagucccuguucccagagcccacuuuuuuuucuuuuuuugaaauaaaauagccugucuuucagaucucaaaggcucuuuucagagccaccaaaaaaaaaaaaaaaaaaaaaaaaaaaaaaaaaaaaaaaaaaaaaaaaaaaaaaaaaaaaaaaaaaaaaaaaaaaaaaaaaaaaaaaaaaaaaaaaaaaaa

SEQ ID NO: 33447 - RNA, 1745 nt, Artificial Sequence
  mRNA product Design a-1 (hSL-A100) comprising derived and/or modified sequence from LASV(803213;Clade II)__AAF86703__GPCmut8 (opt1)
aggagagucccgcagucggcguccagcggcucugcuuguucgugugugugucguugcaggccuuauucaagcuuaccaugggccagaucaucaccuucuuccaggaggugccccacgucaucgaggaggugaugaacaucgugcugaucgcccucagccugcuggccauccucaaggggaucuacaacgucgcgaccugcggccuguucgggcugaucuccuuccuccugcugugcggccgcagcugcuccgugacguacaaggggguguacgagcuccagacccuggagcugaacauggccaaccucaacaugugcaugccgcugagcugcaccaagaacaacucccaccacuacaucauggucggcaacgagaccggccuggagcucacgcugaccaacaccagcaucaucaaccacaaguucugcaaccuguccgacgcccacaagaagaaccucuacgaccacgcccugaugagcaucaucuccaccuuccaccugagcauccccaacuucaaccaguacgaggccauguccugcgacuucaacgggggcaagaucagcgugcaguacaaccucucccacagcuucgcgguggacgccgccaaccacugcgggacgaucgccaacggcguccugcagaccuucaugcggauggcguggggcggguccuacaucgcccuggacagcggcaaggggaacugggacugcaucaugaccuccuaccaguaccucaucauccagaacaccacgugggaggaccacugccaguucagccgccccucccccaucggcuaccuggggcugcucagccagcggacccgcgacaucuacaucagccggcgccugcugggcaccuucaccuggacgcucuccgacagcgagggcaacgaggcccccgggggcuacugccugacccgguggaugcugaucgaggccgagcucaagugcuucgggaacaccgccguggcgaagugcaacgagaagcacgacgaggaguucugcgacaugcugcgccuguucgacuucugcaagcaggccaucaagcggcucaagaccccggcccagauguccauccagcugaucaacaaggccgugaacgcccugaucaacgaccagcucaucaugaagaaccaccuccgcgacaucaugggcauccccuacugcaacuacagccgguacugcuaccugaaccacacggucaccgggaagaccucccugccccgcugcugccuggugagcaacggcuccuaccugaacgagacccacuucagcgacgacaucgagcagcaggcggacaacaugaucacggagaugcuccagaaggaguacauggaccggcagggcaagaccccgcuggggcugguggaccuguucgucuucuccaccagcuucuaccucaucuccaucuuccugcaccuggugaagauccccacccaccgccacaucgugggcaagcccugccccaagccgcaccggcucaaccacauggggaucugcagcugcggccuguacaagcaccccgggguccccgugaaguggaagcgcugaggacuagucccuguucccagagcccacuuuuuuuucuuuuuuugaaauaaaauagccugucuuucagaucucaaaggcucuuuucagagccaccaaaaaaaaaaaaaaaaaaaaaaaaaaaaaaaaaaaaaaaaaaaaaaaaaaaaaaaaaaaaaaaaaaaaaaaaaaaaaaaaaaaaaaaaaaaaaaaaaaaaa

SEQ ID NO: 33448 - RNA, 1745 nt, Artificial Sequence
  mRNA product Design a-1 (hSL-A100) comprising derived and/or modified sequence from LASV(GA391;Clade III)__CAA36645__GPCmut8 (opt1)
aggagagucccgcagucggcguccagcggcucugcuuguucgugugugugucguugcaggccuuauucaagcuuaccaugggccagaucgugaccuucuuccaggaggucccccacgugaucgaggaggugaugaacaucguccugaucgcccucagcauccuggccauccugaaggggcucuacaacguggcgaccugcggccugaucgggcuggugacguuccuccugcuguccggccgcagcugcucccucaucuacaaggggaccuacgagcugcagacccuggagcucaacauggagacccugaacaugugcaugccgcugagcugcacgaagaacaacucccaccacuacauccgggucggcaacgagaccggccucgagcugacccugaccaacacgagcauccucaaccacaaguucugcaaccuguccgacgcccacaagcgcaaccuguacgaccacagccucauguccaucaucagcaccuuccaccuguccauccccaacuucaaccaguacgaggccaugagcugcgacuucaacgggggcaagaucaccgugcaguacaaccugucccacagcuucgccguggacgccgcggggcacugcggcacccucgccaacgggguccugcagacguucaugcggauggccuggggcggcuccuacaucgcccuggacagcgggcgcggcaacugggacugcaucaugaccuccuaccaguaccucaucauccagaacaccaccugggacgaccacugccaguucagccggcccucccccaucggguaccugggccugcucagccagcgcacgcgggacaucuacaucagccgccggcugcugggcaccuucaccuggacccucuccgacagcgaggggaacgagacgccgggcggguacugccugacccgcuggaugcugaucgaggcggagcucaagugcuucggcaacaccgccguggccaagugcaacgagaagcacgacgaggaguucugcgacaugcugcggcuguucgacuucugcaagcaggccauccgccggcucaagacccccgcccagauguccauccagcugaucaacaaggcggugaacgcccugaucaacgaccagcucaucaugaagaaccaccuccgcgacaucauggggauccccuacugcaacuacagccgguacugcuaccugaaccacacguccaccggcaagaccagccugccccgcugcugccugaucuccaacggcagcuaccugaacgagaccaaguucuccgacgacaucgagcagcaggccgacaacaugaucacggagaugcugcagaaggaguacaucgaccggcaggggaagaccccgcucggccuggucgaccuguucguguucagcaccuccuucuaccucaucagcaucuuccugcaccuggugaagauccccacccaccgccacaucgucgggaagcccugccccaagccgcaccggcucaaccacaugggcaucugcuccugcgggcuguacaagcagcccggcgugcccgugcgcuggaagcggugaggacuagucccuguucccagagcccacuuuuuuuucuuuuuuugaaauaaaauagccugucuuucagaucucaaaggcucuuuucagagccaccaaaaaaaaaaaaaaaaaaaaaaaaaaaaaaaaaaaaaaaaaaaaaaaaaaaaaaaaaaaaaaaaaaaaaaaaaaaaaaaaaaaaaaaaaaaaaaaaaaaaa

SEQ ID NO: 33449 - RNA, 1748 nt, Artificial Sequence
  mRNA product Design a-1 (hSL-A100) comprising derived and/or modified sequence from LASV(AV;Clade V)__CCA30314__GPCmut8 (opt1)
aggagagucccgcagucggcguccagcggcucugcuuguucgugugugugucguugcaggccuuauucaagcuuaccaugggccagaucgugaccuucuuccaggaggucccccacgugaucgaggaggugaugaacaucguccugaucgcccucagcauccuggccgugcugaaggggcucuacaacaucgcgaccugcggccugaucgggcugaucacguuccuccugcugugcggccgcuccugcagcuccaaccucuacaaggggguguacgagcugcagagccuggaccucaacauggagacccugaacaugugcaugccgcuguccugcaccaagaacaacagccaccacuacauccgggucggcaacgacaccggccucgagcugacgcugaccaacaccuccauccucaaccacaaguucugcaaccugagcgacgcccacaagaaggaccuguacgaccacgcccucauguccaucaucagcaccuuccaccuguccauccccaacuucaaccaguacgaggccaugagcugcgacuucaacgggggcaagaucuccgugcaguacaaccugagccacuccuacgccaucgacgcggccaaccacugcgggacgguggccaacggcauccuccagaccuucaugcgcauggccuggggcgggagcuacaucgcgcuggacuccggccgggggaacugggacugcaucaugaccagcuaccaguaccugaucauccagaacaccacgugggagaaccacugccaguucucccgccccagccccaucggcuaccucgggcugcugagccagcggacccgcgacaucuacaucucccggcgccuccugggcaccuucaccuggacgcugagcgacuccgagggcaacgccacccccgggggcuacugccucacccgguggaugcugaucgaggccgagcugaagugcuucgggaacaccgccgucgccaagugcaacgagaagcacgacgaggaguucugcgacaugcuccgccuguucgacuucugcaagcaggcgaucagccggcugaaguccccggcccagaugagcauccagcucaucaacaaggccgugaacgcccugaucaacgaccagcugaucaugaagaaccaccuccgcgacaucaugggcauccccuacugcaacuacuccaaguacugcuaccugaaccacacgaucaccgggaagaccagccugcccaagugcugccucguguccaacggcagcuaccugaacgagacccacuucuccgacgacaucgagcagcaggccgacaacaugaucacggagaugcugcagaaggaguacauggagcggcagggcaagaccccgcuggggcucgucgaccuguucguguucagcaccuccuucuaccugaucagcaucuuccuccgccuggugaagauccccacccaccggcacaucgucggcaagcccugccccaagccgcaccgccugaaccacauggggaucugcuccugcggccucuacaagcagcccggggugcccgugcgguggaagcgcugaggacuagucccuguucccagagcccacuuuuuuuucuuuuuuugaaauaaaauagccugucuuucagaucucaaaggcucuuuucagagccaccaaaaaaaaaaaaaaaaaaaaaaaaaaaaaaaaaaaaaaaaaaaaaaaaaaaaaaaaaaaaaaaaaaaaaaaaaaaaaaaaaaaaaaaaaaaaaaaaaaaaa

SEQ ID NO: 33450 - RNA, 1745 nt, Artificial Sequence
  mRNA product Design a-1 (hSL-A100) comprising derived and/or modified sequence from LASV(Togo/2016/7082;Clade VI)__AMR44577__GPCmut8 (opt1)
aggagagucccgcagucggcguccagcggcucugcuuguucgugugugugucguugcaggccuuauucaagcuuaccaugggccagaucaucaccuucuuccaggaggugccccacgucaucgaggaggugaugaacaucgugcugaucgcccucagccugcuggccauccucaagggggucuacaacguggcgaccugcggcaucaucgggcuggugacguuccuguuccucugcggccgcuccugcagccugaucuacaagggguccuacgagcugcagacccucgagcugaacauggagacccugaacaugugcaugccgcucagcugcaccaagaacuccagccaccacuacauccgggucggcaacgagacgggccuggagcugacccucaccaacaccuccaucaucaaccacaaguucugcaaccugagcgacgcccacaagcgcaaccuguacgaccacgcccucauguccauccugagcacguuccaccuguccauccccaacuucaaccaguacgaggccaugagcugcgacuucaacgggggcaagaucuccgugcaguacaaccucagccacgccuacgcgguggacgccgccgagcacugcgggaccgucgccaacggcgugcugcagaccuucaugcggauggcguggggcggguccuacaucgcccuggacagcggccgcgggaacugggacugcaucaugaccuccuaccaguaccucaucauccagaacacgaccugggaggaccacugccaguucagccggcccucccccaucggcuaccuggggcugcucagccagcgcacccgggacaucuacaucagccgccggcugcugggcaccuucacguggacccucuccgacagcgagggcaacgagacccccgggggcuacugccugacccgcuggaugcugaucgaggccgagcucaagugcuucgggaacacggccguggccaagugcaacgagaagcacgacgaggaguucugcgacaugcugcggcuguucgacuucugcaagcaggcgauccagcgccucaaguccccggcccagaugagcauccagcugaucaacaaggccgucaacgcccugaucaacgaccagcucaucaugaagaaccaccuccgggacaugaugggcauccccuacugcaacuacuccaaguacugcuaccugaaccacaccagcuccgggcgcaccagccugcccaagugcugccugguguccaacggcagcuaccugaacgagacccacuucuccgacgacaucgagcagcaggccgacaacaugaucacggagaugcuccagaaggaguacaucgaccggcagggcaagaccccgcuggggcugguggaccuguucgucuucagcaccuccuucuaccucaucagcaucuuccugcaccugaucaagauccccacccaccgccacaucgugggcaagcccugccccaagccgcaccggcucaaccacauggggaucugcuccugcggccuguacaagcagcccggggugcccacgcgcuggaagcggugaggacuagucccuguucccagagcccacuuuuuuuucuuuuuuugaaauaaaauagccugucuuucagaucucaaaggcucuuuucagagccaccaaaaaaaaaaaaaaaaaaaaaaaaaaaaaaaaaaaaaaaaaaaaaaaaaaaaaaaaaaaaaaaaaaaaaaaaaaaaaaaaaaaaaaaaaaaaaaaaaaaaa

SEQ ID NO: 33451 - RNA, 1745 nt, Artificial Sequence
  mRNA product Design a-1 (hSL-A100) comprising derived and/or modified sequence from LASV(KAK-428;Clade n.d. (VII))__ANH09740__GPCmut8 (opt1)
aggagagucccgcagucggcguccagcggcucugcuuguucgugugugugucguugcaggccuuauucaagcuuaccaugggccagaucgugaccuucuuccaggaggucccccacgugaucgaggaggugaugaacaucguccugaucgcccucagccugcuggccauccucaaggggcuguacaacuucgcgaccugcggcgugaucgggcugaucacguuccuccugcugugcggccgcuccugcagcgccaccuacaaggggcaguacgagcuccagacccuggagcugaacauggagucccucaacaugugcaugccgcugagcugcaccaagaacaacucccaccacuacauccgggccggcaacaacacgggccuggagcucacccugaccaacaccagcaucaucucccacaaguucugcaaccugagcgacgcccacaagaagaaccucuacgaccacacgcugauguccaucaucaccaccuuccaccugagcauccccaacuucaaccaguacgaggccauguccugcgacuucaacgggggcaagaucagcauccaguacaaccucucccacagcuacgcgggggacgccgcccagcacugcggcaccguggccaacgggguccugcagacguucaugcgcauggcguggggcggcuccuaccuggcccucgacagcgggcggcgcggcugggacugcaucaucuccagcuaccaguaccugaucauccagaacaccaccugggacgaccacugccaguucucccggcccagccccaucggguaccugggcuucgugagccagaagacccgcgacaucuacaucucccggcgccuccugggcacguucaccuggacccugagcgacuccgaggggcacgacaugccgggcggguacugccucacccgguggaugcugaucgaggccgaccugaagugcuucggcaacacggccguggccaagugcaacgagaagcacgacgaggaguucugcgacauguggcgccucuucgacuucugcaagcaggcgauccagcggcugaaggcccccgcccagaugaacauccagcugaucaacaaggccgucaacgcccucaucaacgaccagcugaugaugaagaaccaccuccgcgacaucauggggauccccuacugcaacuacagcaaguucugcuaccugaacaacaccaccaccggccggacgucccugccccgcugcugccugaucagcaacggcuccuaccucaacgagacccacuucagcgacgacaucgagcagcaggcggacaacaugaucaccgagaugcugcagaaggaguacauggaccggcaggggaagaccccgcugggccucguggaccuguucguguucuccacgagcuucuaccugaucaccaucuuccugcaccucgucaagauccccacccaccgccacaucguggggaagcccugccccaagccgcaccggcugaaccacaugggcaucugcuccugcgggcuguacaagcagcccggcgugcccguccgcuggaagcggugaggacuagucccuguucccagagcccacuuuuuuuucuuuuuuugaaauaaaauagccugucuuucagaucucaaaggcucuuuucagagccaccaaaaaaaaaaaaaaaaaaaaaaaaaaaaaaaaaaaaaaaaaaaaaaaaaaaaaaaaaaaaaaaaaaaaaaaaaaaaaaaaaaaaaaaaaaaaaaaaaaaaa

SEQ ID NO: 33452 - RNA, 1745 nt, Artificial Sequence; identical to SEQ ID NO: 33446
  mRNA product Design a-1 (hSL-A100) comprising derived and/or modified sequence from LASV(Pinneo-NIG-1969;Clade I)__AIT17836__GPCmut8 (opt1)

SEQ ID NO: 33453 - RNA, 1745 nt, Artificial Sequence
  mRNA product Design a-1 (hSL-A100) comprising derived and/or modified sequence from LASV(ISTH0009-NIG-2011;Clade II)__AIT17404__GPCmut8 (opt1)
aggagagucccgcagucggcguccagcggcucugcuuguucgugugugugucguugcaggccuuauucaagcuuaccaugggccagaucaucaccuucuuccaggaggugccccacgucaucgaggaggugaugaacaucgugcugaucgcccucagccugcuggccauccucaaggggaucuacaacgucgcgaccugcggccuguucgggcugguguccuuccuccugcugugcggccgcagcugcuccacgaccuacaaggggguguacgagcuccagacccuggagcuggacauggccagccucaacaugugcaugccgcuguccugcaccaagaacaacagccaccacuacaucauggucggcaacgagacgggccuggagcucacccugaccaacaccuccaucaucaaccacaaguucugcaaccugagcgacgcccacaagaagaaccucuacgaccacgcccugauguccaucaucagcacguuccaccuguccauccccaacuucaaccaguacgaggccaugagcugcgacuucaacgggggcaagaucuccgugcaguacaaccucagccacgcguacgccguggacgccgccaaccacugcgggaccaucgcgaacggcguccugcagaccuucaugcggauggccuggggcggguccuacaucgcccuggacagcggcaagggguccugggacugcaucaugaccagcuaccaguaccucaucauccagaacacgaccugggaggaccacugccaguucucccgccccagccccaucggcuaccuggggcugcucagccagcggacccgcgacaucuacaucucccggcgccugcugggcaccuucacguggacccucagcgacuccgagggcaacgagacccccgggggcuacugccugacccgguggaugcugaucgaggccgagcucaagugcuucgggaacacggccguggcgaagugcaacgagaagcacgacgaggaguucugcgacaugcugcgccuguucgacuucugcaagcaggccauccggcgccucaagaccccggcccagaugagcauccagcugaucaacaaggccgugaacgcccugaucaacgaccagcucaucaugaagaaccaccuccgggacaucaugggcauccccuacugcaacuacuccaaguacugcuaccugaaccacaccgucaccgggaagacgagccugccccgcugcugccugguguccaacggcagcuaccugaacgagacccacuucuccgacgacaucgagcagcaggcggacaacaugaucaccgagcuccugcagaaggaguacauggaccggcagggcaagaccccgcuggggcugguggaccucuucgucuucagcacguccuucuaccugaucagcaucuuccugcaccucaucaagauccccacccaccgccacaucaccggcaagcccugccccaagccgcaccggcugaaccacauggggaucugcuccugcggccuguacaagcaccccggggugcccgugaaguggaagcgcugaggacuagucccuguucccagagcccacuuuuuuuucuuuuuuugaaauaaaauagccugucuuucagaucucaaaggcucuuuucagagccaccaaaaaaaaaaaaaaaaaaaaaaaaaaaaaaaaaaaaaaaaaaaaaaaaaaaaaaaaaaaaaaaaaaaaaaaaaaaaaaaaaaaaaaaaaaaaaaaaaaaaa

SEQ ID NO: 33454 - RNA, 1745 nt, Artificial Sequence
  mRNA product Design a-1 (hSL-A100) comprising derived and/or modified sequence from LASV(ISTH2010-NIG-2012;Clade II)__AIT17482__GPCmut8 (opt1)
aggagagucccgcagucggcguccagcggcucugcuuguucgugugugugucguugcaggccuuauucaagcuuaccaugggccagaucaucaccuucuuccaggaggugccccacgucaucgaggaggugaugaacaucgugcugaucgcccucagccugcuggccauccucaaggggaucuacaacgucgcgaccugcggccuguucgggcugguguccuuccuccugcugugcggccgcagcugcuccacgaccuacaaggggguguacgagcuccagacccuggagcuggacauggccagccucaacaugugcaugccgcuguccugcaccaagaacaacagccaccacuacaucauggucggcaacgagacgggccuggagcucacccugaccaacaccuccaucaucaaccacaaguucugcaaccugagcgacgcccacaagaagaaccucuacgaccacgcccugauguccaucaucagcacguuccaccuguccauccccaacuucaaccaguacgaggccaugagcugcgacuucaacgggggcaagaucuccgugcaguacaaccucagccacgcguacgccguggacgccgccaaccacugcgggaccaucgcgaacggcguccugcagaccuucaugcggauggccuggggcggguccuacaucgcccuggacagcggcaagggguccugggacugcaucaugaccagcuaccaguaccucaucauccagaacaucacgugggaggaccacugccaguucucccgccccagccccaucggcuaccuggggcugcucagccagcggacccgcgacaucuacaucucccggcgccugcugggcaccuucaccuggacgcucagcgacuccgagggcaacgagacccccgggggcuacugccugacccgguggaugcugaucgaggccgagcucaagugcuucgggaacaccgccguggcgaagugcaacgagaagcacgacgaggaguucugcgacaugcugcgccuguucgacuucugcaagcaggccauccggcgccucaagacgccggcccagaugagcauccagcugaucaacaaggccgugaacgcccugaucaacgaccagcucaucaugaagaaccaccuccgggacaucaugggcauccccuacugcaacuacuccaaguacugcuaccugaaccacaccgucaccgggaagaccagccugccccgcugcugccugguguccaacggcagcuaccugaacgagacgcacuucuccgacgacaucgagcagcaggcggacaacaugaucaccgagcuccugcagaaggaguacaucgaccggcagggcaagaccccgcuggggcugguggaccucuucgucuucagcaccuccuucuaccugaucagcaucuuccugcaccucgugaagauccccacgcaccgccacguggucggcaagcccugccccaagccgcaccggcugaaccacauggggaucugcuccugcggccuguacaagcaccccggggugcccgugaaguggaagcgcugaggacuagucccuguucccagagcccacuuuuuuuucuuuuuuugaaauaaaauagccugucuuucagaucucaaaggcucuuuucagagccaccaaaaaaaaaaaaaaaaaaaaaaaaaaaaaaaaaaaaaaaaaaaaaaaaaaaaaaaaaaaaaaaaaaaaaaaaaaaaaaaaaaaaaaaaaaaaaaaaaaaaa

SEQ ID NO: 33455 - RNA, 1745 nt, Artificial Sequence
  mRNA product Design a-1 (hSL-A100) comprising derived and/or modified sequence from LASV(Lassa virus/H.sapiens-wt/NGA/2015/ISTH_0543;Clade II)__AVO03639__GPCmut8 (opt1)
aggagagucccgcagucggcguccagcggcucugcuuguucgugugugugucguugcaggccuuauucaagcuuaccaugggccagaucaucaccuucuuccaggaggugccccacgucaucgaggaggugaugaacaucgugcugaucgcccucagccugcuggccauccucaaggggaucuacaacgucgcgaccugcggccuguucgggcugguguccuuccuccugcugugcggccgcagcugcuccacgaccuacaaggggguguacgagcuccagacccuggagcuggacauggccaaccucaacaugugcaugccgcugagcugcaccaagaacaacucccaccacuacaucauggucggcaacgagacgggccuggagcucacccugaccaacaccagcaucaucaaccacaaguucugcaaccuguccgacgcccacaagaagaaccucuacgaccacgcccugaugagcaucaucuccacguuccaccugagcauccccaacuucaaccaguacgaggccauguccugcgacuucaacgggggcaagaucagcgugcaguacaaccucucccacaccuacgcgguggacgccgccaaccacugcgggaccaucgccaacggcguccugcagaccuucaugcggauggcguggggcgggagcuacaucgcccuggacuccggcaaggggagcugggacugcaucaugacguccuaccaguaccucgugauccagaacaccaccugggaggaccacugccaguucagccgccccucccccaucggcuaccuggggcugcucagccagcggacccgcgacaucuacaucagccggcgccugcugggcacguucaccuggacccucuccgacagcgagggcaacgagacccccgggggcuacugccugacgcgguggaugcugaucgaggccgagcucaagugcuucgggaacaccgccguggccaagugcaacgagaagcacgacgaggaguucugcgacaugcugcgccuguucgacuucugcaagcaggcgauccggcgccucaagaccccggcccagauguccauccagcugaucaacaaggccgucaacgcccugaucaacgaccagcucaucaugaagaaccaccuccgggacaucaugggcauccccuacugcaacuacagcaaguacugcuaccugaaccacaccgugacggggaagaccucccugccccgcugcugccuggugagcaacggcuccuaccugaacgagacccacuucagcgacgacaucgagcagcaggccgacaacaugaucaccgagcuccugcagaaggaguacaucgaccggcagggcaagacgccgcuggggcuggucgaccucuucguguucuccaccagcuucuaccugaucuccaucuuccugcaccucgugaagauccccacccaccgccacaucaccggcaagcccugccccaagccgcaccggcugaaccacauggggaucugcagcugcggccuguacaagcaccccgggguccccgugaaguggaagcgcugaggacuagucccuguucccagagcccacuuuuuuuucuuuuuuugaaauaaaauagccugucuuucagaucucaaaggcucuuuucagagccaccaaaaaaaaaaaaaaaaaaaaaaaaaaaaaaaaaaaaaaaaaaaaaaaaaaaaaaaaaaaaaaaaaaaaaaaaaaaaaaaaaaaaaaaaaaaaaaaaaaaaa

SEQ ID NO: 33456 - RNA, 1745 nt, Artificial Sequence
  mRNA product Design a-1 (hSL-A100) comprising derived and/or modified sequence from LASV(Lassa virus/H.sapiens-wt/NGA/2016/ISTH_0009;Clade II)__AVO03571__GPCmut8 (opt1)
aggagagucccgcagucggcguccagcggcucugcuuguucgugugugugucguugcaggccuuauucaagcuuaccaugggccagaucaucaccuucuuccaggaggugccccacgucaucgaggaggugaugaacaucgugcugaucgcccucagccugcuggccauccucaaggggaucuacaacgucgcgaccugcggccugcuggggcucguguccuuccugcugcucugcggccgcagcugcuccacgaccuacaaggggguguacgagcugcagacccuggagcucgacauggccagccugaacaugugcaugccgcuguccugcaccaagaacaacagccaccacuacaucauggucggcaacgagacgggccucgagcugacccugaccaacaccuccaucaucaaccacaaguucugcaaccucagcgacgcccacaagaagaaccuguacgaccacgcccugauguccaucaucagcacguuccaccucuccauccccaacuucaaccaguacgaggccaugagcugcgacuucaacgggggccggaucuccgugcaguacaaccugagccacuccuacgcgguggacgccgccaaccacugcgggaccaucgccaacggcguccugcagaccuucaugcgcauggcguggggcgggagcuacaucgcccucgacuccggcaaggggagcugggacugcaucaugaccuccuaccaguaccugaucauccagaacacgaccugggaggaccacugccaguucagccggcccagccccaucggcuaccuggggcuccugucccagcgcacccgggacaucuacaucagccgccggcugcucggcaccuucacguggacccuguccgacagcgagggcaacgagacccccgggggcuacugccugacccgcuggaugcucaucgaggccgagcugaagugcuucgggaacacggccguggccaagugcaacgagaagcacgacgaggaguucugcgacaugcugcggcuguucgacuucugcaagcaggcgauccgccggcugaagaccccggcccagauguccauccagcugaucaacaaggccgugaacgcccucaucaacgaccagcugaucaugaagaaccaccuccgcgacaucaugggcauccccuacugcaacuacagcaaguacugcuaccucaaccacaccgucaccgggaagacgucccugccccggugcugccuggugagcaacggcuccuaccucaacgagacccacuucagcgacgacaucgagcagcaggccgacaacaugaucaccgagcugcugcagaaggaguacaucgaccgccagggcaagaccccgcuggggcucguggaccuguucgucuucuccacgagcuucuaccugaucuccaucuuccuccaccuggugaagauccccacccaccggcacaucaccggcaagcccugccccaagccgcaccgccugaaccacauggggaucugcagcugcggccucuacaaccaccccggggugcccgucaaguggaagcggugaggacuagucccuguucccagagcccacuuuuuuuucuuuuuuugaaauaaaauagccugucuuucagaucucaaaggcucuuuucagagccaccaaaaaaaaaaaaaaaaaaaaaaaaaaaaaaaaaaaaaaaaaaaaaaaaaaaaaaaaaaaaaaaaaaaaaaaaaaaaaaaaaaaaaaaaaaaaaaaaaaaaa

SEQ ID NO: 33457 - RNA, 1745 nt, Artificial Sequence
  mRNA product Design a-1 (hSL-A100) comprising derived and/or modified sequence from LASV(Lassa virus/H.sapiens-wt/NGA/2016/ISTH_0017;Clade II)__AVO03567__GPCmut8 (opt1)
aggagagucccgcagucggcguccagcggcucugcuuguucgugugugugucguugcaggccuuauucaagcuuaccaugggccagaucaucaccuucuuccaggaggugccccacgucaucgaggaggugaugaacaucgugcugaucgcccucagccugcuggccauccucaaggggaucuacaacgucgcgaccugcggccuguucgggcugguguccuuccuccugcugugcggccgcagcugcuccacgaccuacaaggggguguacgagcuccagacccuggagcuggacauggccagccucaacaugugcaugccgcuguccugcaccaagaacaacagccaccacuacaucauggucggcaacgagacgggccuggagcucacccugaccaacaccuccaucaucaaccacaaguucugcaaccugagcgacgcccacaagaagaaccucuacgaccacgcccugauguccaucaucagcacguuccaccuguccauccccaacuucaaccaguacgaggccaugagcugcgacuucaacgggggcaagaucuccgugcaguacaaccucagccacaccuacgcgaucgacgccgccaaccacugcgggaccaucgccaacggcgugcugcagaccuucaugcggauggcguggggcggguccuacaucgcccuggacagcggcaagggguccugggacugcaucaugacgagcuaccaguaccucaucauccagaacaccaccugggaggaccacugccaguucucccgccccagccccaucggcuaccuggggcugcucagccagcggacccgcgacaucuacaucucccggcgccugcugggcacguucaccuggacccucagcgacuccgagggcaacgagacccccgggggcuacugccugacgcgguggaugcugaucgaggccgagcucaagugcuucgggaacaccgccgucgccaagugcaacgagaagcacgacgaggaguucugcgacaugcugcgccuguucgacuucugcaagcaggcgauccggcgccucaagaccccggcccagaugagcauccagcugaucaacaaggccgugaacgcccugaucaacgaccagcucaucaugaagaaccaccuccgggacaucaugggcauccccuacugcaacuacuccaaguacugcuaccugaaccacaccgugacggggaagaccagccugccccgcugcugccuggucuccaacggcagcuaccugaacgagacccacuucuccgacgacaucgagcagcaggccgacaacaugaucaccgagcuccugcagaaggaguacauggaccggcagggcaagacgccgcuggggcugguggaccucuucguguucagcaccuccuucuaccugaucagcaucuuccugcaccucguccgcauccccacccaccggcacgugaucggcaagcccugccccaagccgcaccgccugaaccacauggggaucugcuccugcggccuguacaagcaccccggggugcccgucaaguggaagcggugaggacuagucccuguucccagagcccacuuuuuuuucuuuuuuugaaauaaaauagccugucuuucagaucucaaaggcucuuuucagagccaccaaaaaaaaaaaaaaaaaaaaaaaaaaaaaaaaaaaaaaaaaaaaaaaaaaaaaaaaaaaaaaaaaaaaaaaaaaaaaaaaaaaaaaaaaaaaaaaaaaaaa

SEQ ID NO: 33458 - RNA, 1745 nt, Artificial Sequence
  mRNA product Design a-1 (hSL-A100) comprising derived and/or modified sequence from LASV(Lassa virus/H.sapiens-wt/NGA/2018/ISTH_0959;Clade II)__AVV65099__GPCmut8 (opt1)
aggagagucccgcagucggcguccagcggcucugcuuguucgugugugugucguugcaggccuuauucaagcuuaccaugggccagaucaucaccuucuuccaggaggugccccacgucaucgaggaggugaugaacaucgugcugaucgcccucagccugcuggccauccucaaggggaucuacaacgucgugaccugcggccuguucgggcugguguccuuccuccugcugugcggccgcagcugcuccacgaccuacaagggggucuacgagcuccagacccuggagcuggacauggcgagccucaacaugugcaugccgcuguccugcaccaagaacaacagccaccacuacaucauggugggcaacgagacgggccuggagcucacccugaccaacaccuccaucaucaaccacaaguucugcaaccugagcgacgcccacaagaagaaccucuacgaccacgcccugauguccaucaucagcacguuccaccuguccauccccaacuucaaccaguacgaggccaugagcugcgacuucaacgggggcaagaucuccgugcaguacaaccucagccacgccuacgcgaucgacgccgccaaccacugcgggaccaucgccaacggcguccugcagaccuucaugcggauggcguggggcggguccuacaucgcccuggacagcggcaagggguccugggacugcaucaugaccagcuaccaguaccucaucauccagaacacgaccugggaggaccacugccaguucucccgccccagccccaucggcuaccuggggcugcucagccagcggacccgcgacaucuacaucucccggcgccugcugggcaccuucacguggacccucagcgacuccgagggcaacgagacccccgggggcuacugccugacccgguggaugcugaucgaggccgagcucaagugcuucgggaacacggccguggccaagugcaacgagaagcacgacgaggaguucugcgacaugcugcgccuguucgacuucugcaagcaggcgauccggcgccucaagaccccggcccagaugagcauccagcugaucaacaaggccgugaacgcccugaucaacgaccagcucaucaugaagaaccaccuccgggacaucaugggcauccccuacugcaacuacuccaaguacugcuaccugaaccacaccgucaccgggaagacgagccugccccgcugcugccugguguccaacggcagcuaccugaacgagacccacuucuccgacgacaucgagcagcaggccgacaacaugaucaccgagcuccugcagaaggaguacaucgaccggcagggcaagaccccgcuggggcugguggaccucuucgucuucagcacguccuucuaccugaucagcaucuuccugcaccucgugaagauccccacccaccgccacgugaucggcaagcccugccccaagccgcaccggcugaaccacauggggaucugcuccugcggccuguacaagcaccccgggguccccgugaaguggaagcgcugaggacuagucccuguucccagagcccacuuuuuuuucuuuuuuugaaauaaaauagccugucuuucagaucucaaaggcucuuuucagagccaccaaaaaaaaaaaaaaaaaaaaaaaaaaaaaaaaaaaaaaaaaaaaaaaaaaaaaaaaaaaaaaaaaaaaaaaaaaaaaaaaaaaaaaaaaaaaaaaaaaaaa

SEQ ID NO: 33459 - RNA, 1745 nt, Artificial Sequence
  mRNA product Design a-1 (hSL-A100) comprising derived and/or modified sequence from LASV(LASV003-NIG-2008;Clade II)__AIT17580__GPCmut8 (opt1)
aggagagucccgcagucggcguccagcggcucugcuuguucgugugugugucguugcaggccuuauucaagcuuaccaugggccagaucaucaccuucuuccaggaggugccccacgucaucgaggaggugaugaacaucgugcugaucgcccucagccugcuggccauccucaaggggaucuacaacgucgcgaccugcggccuguucgggcugguguccuuccuccugcugugcggccgcagcugcuccacgaccuacaaggggguguacgagcuccagacccuggagcuggacauggccagccucaacaugugcaugccgcuguccugcaccaagaacaacagccaccacuacaucauggucggcaacgagacgggccuggagcucacccugaccaacaccuccaucaucaaccacaaguucugcaaccugagcgacgcccacaagaagaaccucuacgaccacgcccugauguccaucaucagcacguuccaccuguccauccccaacuucaaccaguacgaggccaugagcugcgacuucaacgggggcaagaucuccgugcaguacaaccucagccacaccuacgcgguggacgccgccaaccacugcgggaccaucgccaacggcguccugcagaccuucaugcggauggcguggggcggguccuacaucgcccuggacagcggcaagggguccugggacugcaucaugacgagcuaccaguaccucaucauccagaacaccaccugggaggaccacugccaguucucccgccccagccccaucggcuaccuggggcugcucagccagcggacccgcgacaucuacaucucccggcgccugcugggcacguucaccuggacccucagcgacuccgagagcaacgagaccccgggcggguacugccugacgcgguggaugcugaucgaggccgagcucaagugcuucggcaacaccgccguggccaagugcaacgagaagcacgacgaggaguucugcgacaugcugcgccuguucgacuucugcaagcaggcgauccggcgccucaaggcccccgcccagauguccauccagcugaucaacaaggccgugaacgcccugaucaacgaccagcucaucaugaagaaccaccuccgggacaucauggggauccccuacugcaacuacagcaaguacugcuaccugaaccacaccgucaccggccgcacgucccugccccggugcugccuggugagcaacggguccuaccugaacgagacccacuucagcgacgacaucgagcagcaggcggacaacaugaucaccgagcuccugcagaaggaguacauggaccgccagggcaagaccccgcugggccugguggaccucuucgucuucuccacgagcuucuaccugaucuccaucuuccugcaccucgugaagauccccacccaccggcacgugaucgggaagcccugccccaagccgcaccgccugaaccacaugggcaucugcagcugcgggcuguacaagcaccccggcguccccgugaaguggaagcggugaggacuagucccuguucccagagcccacuuuuuuuucuuuuuuugaaauaaaauagccugucuuucagaucucaaaggcucuuuucagagccaccaaaaaaaaaaaaaaaaaaaaaaaaaaaaaaaaaaaaaaaaaaaaaaaaaaaaaaaaaaaaaaaaaaaaaaaaaaaaaaaaaaaaaaaaaaaaaaaaaaaaa

SEQ ID NO: 33460 - RNA, 1745 nt, Artificial Sequence
  mRNA product Design a-1 (hSL-A100) comprising derived and/or modified sequence from LASV(LASV035-NIG-2009;Clade II)__AIT17588__GPCmut8 (opt1)
aggagagucccgcagucggcguccagcggcucugcuuguucgugugugugucguugcaggccuuauucaagcuuaccaugggccagaucaucaccuucuuccaggaggugccccacgucaucgaggaggugaugaacaucgugcugaucgcccucagccugcuggccauccucaaggggaucuacaacgucgcgaccugcggccuguucgggcugguguccuuccuccugcugugcggccgcagcugcuccacgaccuacaaggggguguacgagcuccagacccuggagcuggacauggccagccucaacaugugcaugccgcuguccugcaccaagaacaacagccaccacuacaucauggucggcaacgagacgggccuggagcucacccugaccaacaccuccaucaucaaccacaaguucugcaaccugagcgacgcccacaagaagaaccucuacgaccacgcccugauguccaucaucagcacguuccaccuguccauccccaacuucaaccaguacgaggccaugagcugcgacuucaacgggggcaagaucuccgugcaguacaaccucagccacgcguacgccguggacgccgccaaccacugcgggaccaucgcgaacggcguccugcagaccuucaugcggauggccuggggcggguccuacaucgcccuggacagcggcaagggguccugggacugcaucaugaccagcuaccaguaccucaucauccagaacacgaccugggaggaccacugccaguucucccgccccagccccaucggcuaccuggggcugcucagccagcggacccgcgacaucuacaucucccggcgccugcugggcaccuucacguggacccucagcgacuccgagggcaacgagacccccgggggcuacugccugacccgguggaugcugaucgaggccgagcucaagugcuucgggaacacggccguggcgaagugcaacgagaagcacgacgaggaguucugcgacaugcugcgccuguucgacuucugcaagcaggccauccggcgccucaaggccccggcccagaugagcauccagcugaucaacaaggccgugaacgcgcugaucaacgaccagcucaucaugaagaaccaccuccgggacaucaugggcauccccuacugcaacuacuccaaguacugcuaccugaaccacaccgucaccgggaagaccagccugccccgcugcugccugguguccaacggcagcuaccugaacgagacgcacuucuccgacgacaucgagcagcaggccgacaacaugaucaccgagcuccugcagaaggaguacaucgaccggcagggcaagaccccgcuggggcugguggaccucuucgucuucagcaccuccuucuaccugaucagcaucuuccugcaccucgugaagauccccacgcaccgccacgugaucggcaagcccugccccaagccgcaccggcugaaccacauggggaucugcuccugcggccuguacaagcaccccgggguccccgugaaguggaagcgcugaggacuagucccuguucccagagcccacuuuuuuuucuuuuuuugaaauaaaauagccugucuuucagaucucaaaggcucuuuucagagccaccaaaaaaaaaaaaaaaaaaaaaaaaaaaaaaaaaaaaaaaaaaaaaaaaaaaaaaaaaaaaaaaaaaaaaaaaaaaaaaaaaaaaaaaaaaaaaaaaaaaaa

SEQ ID NO: 33461 - RNA, 1745 nt, Artificial Sequence
  mRNA product Design a-1 (hSL-A100) comprising derived and/or modified sequence from LASV(LASV1000-NIG-2009;Clade II)__AIT17782__GPCmut8 (opt1)
aggagagucccgcagucggcguccagcggcucugcuuguucgugugugugucguugcaggccuuauucaagcuuaccaugggccagaucaucaccuucuuccaggaggugccccacgucaucgaggaggugaugaacaucgugcugaucgcccucagccugcuggccauccucaaggggaucuacaacgucgcgaccugcggccuguucgggcugguguccuuccuccugcugugcggccgcagcugcuccacgaccuacaaggggguguacgagcuccagacccuggagcuggacauggccagccucaacaugugcaugccgcuguccugcaccaagaacaacagccaccacuacaucauggucggcaacgagacgggccuggagcucacccugaccaacaccuccaucaucaaccacaaguucugcaaccugagcgacgcccacaagaagaaccucuacgaccacgcccugauguccaucaucagcacguuccaccuguccauccccaacuucaaccaguacgaggccaugagcugcgacuucaacgggggcaagaucuccgugcaguacaaccucagccacaccuacgcgguggacgccgccaaccacugcgggaccaucgccaacggcguccugcagaccuucaugcggauggcguggggcggguccuacaucgcccuggacagcggcaagggguccugggacugcaucaugacgagcuaccaguaccucaucauccagaacaccaccugggaggaccacugccaguucucccgccccagccccaucggcuaccuggggcugcucagccagcggacccgcgacaucuacaucucccggcgccugcugggcacguucaccuggacccucagcgacuccgagggcaacgagacccccgggggcuacugccugacgcgguggaugcugaucgaggccgagcucaagugcuucgggaacaccgccguggccaagugcaacgagaagcacgacgaggaguucugcgacaugcugcgccuguucgacuucugcaagcaggcgaucaagcggcucaagaccccggcccagaugagcauccagcugaucaacaaggccgugaacgcccugaucaacgaccagcucaucaugaagaaccaccuccgcgacaucaugggcauccccuacugcaacuacuccaaguacugcuaccugaaccacaccgucacggggaagaccagccugccccggugcugccugguguccaacggcagcuaccugaacgagacccacuucuccgacgacaucgagcagcaggccgacaacaugaucaccgagcuccugcagaaggaguacaucgaccgccagggcaagacgccgcuggggcugguggaccucuucgucuucagcaccuccuucuaccugaucagcaucuuccugcaccucgugaagauccccacccaccggcacguggucggcaagcccugccccaagccgcaccgccugaaccacauggggaucugcuccugcggccuguacaagcaccccggggugcccgugaaguggaagcggugaggacuagucccuguucccagagcccacuuuuuuuucuuuuuuugaaauaaaauagccugucuuucagaucucaaaggcucuuuucagagccaccaaaaaaaaaaaaaaaaaaaaaaaaaaaaaaaaaaaaaaaaaaaaaaaaaaaaaaaaaaaaaaaaaaaaaaaaaaaaaaaaaaaaaaaaaaaaaaaaaaaaa

SEQ ID NO: 33462 - RNA, 1745 nt, Artificial Sequence
  mRNA product Design a-1 (hSL-A100) comprising derived and/or modified sequence from LASV(LASV221-NIG-2010;Clade II)__AIT17624__GPCmut8 (opt1)
aggagagucccgcagucggcguccagcggcucugcuuguucgugugugugucguugcaggccuuauucaagcuuaccaugggccagaucaucaccuucuuccaggaggugccccacgucaucgaggaggugaugaacaucgugcugaucgcccucagccugcuggccauccucaaggggaucuacaacgucgcgaccugcggccuguucgggcugguguccuuccuccugcugugcggccgcagcugcuccacgaccuacaaggggguguacgagcuccagacccuggagcuggacauggccagccucaacaugugcaugccgcuguccugcaccaagaacaacagccaccacuacaucauggucggcaacgagacgggccuggagcucacccugaccaacaccuccaucaucaaccacaaguucugcaaccugagcgacgcccacaagaagaaccucuacgaccacgcccugauguccaucaucagcacguuccaccuguccauccccaacuucaaccaguacgaggccaugagcugcgacuucaacgggggcaagaucuccgugcaguacaaccucagccacaccuacgcgaucgacgccgccaaccacugcgggaccaucgccaacggcgugcugcagaccuucaugcggauggcguggggcggguccuacaucgcccuggacagcggcaagggguccugggacugcaucaugacgagcuaccaguaccucaucauccagaacaccaccugggaggaccacugccaguucucccgccccagccccaucggcuaccuggggcugcucagccagcggacccgcgacaucuacaucucccggcgccugcugggcacguucaccuggacccucagcgacuccgagggcaacgagacccccgggggcuacugccugacgcgguggaugcugaucgaggccgagcucaagugcuucgggaacaccgccgucgccaagugcaacgagaagcacgacgaggaguucugcgacaugcugcgccuguucgacuucugcaagcaggcgauccggcgccucaagaccccggcccagaugagcauccagcugaucaacaaggccgugaacgcccugaucaacgaccagcucaucaugaagaaccaccuccgggacaucaugggcauccccuacugcaacuacuccaaguacugcuaccugaaccacaccgugacggggaagaccagccugccccgcugcugccuggucuccaacggcagcuaccugaacgagacccacuucuccgacgacaucgagcagcaggccgacaacaugaucaccgagaugcuccagaaggaguacauggaccggcagggcaagacgccgcuggggcugguggaccuguucguguucagcaccuccuucuaccucaucagcaucuuccugcaccuggucaagauccccacccaccgccacgugaucggcaagcccugccccaagccgcaccggcucaaccacauggggaucugcuccugcggccuguacaagcaccccggggugcccgucaaguggaagcgcugaggacuagucccuguucccagagcccacuuuuuuuucuuuuuuugaaauaaaauagccugucuuucagaucucaaaggcucuuuucagagccaccaaaaaaaaaaaaaaaaaaaaaaaaaaaaaaaaaaaaaaaaaaaaaaaaaaaaaaaaaaaaaaaaaaaaaaaaaaaaaaaaaaaaaaaaaaaaaaaaaaaaa

SEQ ID NO: 33463 - RNA, 1745 nt, Artificial Sequence
  mRNA product Design a-1 (hSL-A100) comprising derived and/or modified sequence from LASV(LASV237-NIG-2010;Clade II)__AIT17638__GPCmut8 (opt1)
aggagagucccgcagucggcguccagcggcucugcuuguucgugugugugucguugcaggccuuauucaagcuuaccaugggccagaucaucaccuucuuccaggaggugccccacgucaucgaggaggugaugaacaucgugcugaucgcccucagccugcuggccauccucaaggggaucuacaacgucgcgaccugcggccuguucgggcugguguccuuccuccugcugugcggccgcagcugcuccacgaccuacaaggggguguacgagcuccagacccuggagcuggacauggccagccucaacaugugcaugccgcuguccugcaccaagaacaacagccaccacuacaucauggucggcaacgagacgggccuggagcucacccugaccaacaccuccaucaucaaccacaaguucugcaaccugagcgacgcccacaagaaggaccucuacgaccacgcccugauguccaucaucagcacguuccaccuguccauccccaacuucaaccaguacgaggccaugagcugcgacuucaacgggggcaagaucuccgugcaguacaaccucagccacaccuacgcgguggacgccgccaaccacugcgggaccaucgccaacggcguccugcagaccuucaugcggauggcguggggcggguccuacaucgcccuggacagcggcaagggguccugggacugcaucaugacgagcuaccaguaccucaucauccagaacaccaccugggaggaccacugccaguucucccgccccagccccaucggcuaccuggggcugcucagccagcggacccgcgacaucuacaucucccggcgccugcugggcacguucaccuggacccucagcgacuccgagggcaacgagacccccgggggcuacugccugacgcgguggaugcugaucgaggccgagcucaagugcuucgggaacaccgccguggccaagugcaacgagaagcacgacgaggaguucugcgacaugcugcgccuguucgacuucugcaagcaggcgauccggcgccucaagaccccggcccagaugagcauccagcugaucaacaaggccgugaacgcccugaucaacgaccagcucaucaugaagaaccaccuccgggacaucaugggcauccccuacugcaacuacuccaaguacugcuaccugaaccacaccgucacggggaagaccagccugccccgcugcugccugguguccaacggcagcuaccugaacgagacccacuucuccgacgacaucgagcagcaggccgacaacaugaucaccgagcuccugcagaaggaguacauggaccggcagggcaagacgccgcuggggcugguggaccucuucgucuucagcaccuccuucuaccugaucagcaucuuccugcaccucaucaagauccccacccaccgccacaucaccggcaagcccugccccaagccgcaccggcugaaccacauggggaucugcuccugcggccuguacaagcaccccggggugcccgugaaguggaagcgcugaggacuagucccuguucccagagcccacuuuuuuuucuuuuuuugaaauaaaauagccugucuuucagaucucaaaggcucuuuucagagccaccaaaaaaaaaaaaaaaaaaaaaaaaaaaaaaaaaaaaaaaaaaaaaaaaaaaaaaaaaaaaaaaaaaaaaaaaaaaaaaaaaaaaaaaaaaaaaaaaaaaaa

SEQ ID NO: 33464 - RNA, 1745 nt, Artificial Sequence
  mRNA product Design a-1 (hSL-A100) comprising derived and/or modified sequence from LASV(LASV253-NIG-2011;Clade II)__AIT17670__GPCmut8 (opt1)
aggagagucccgcagucggcguccagcggcucugcuuguucgugugugugucguugcaggccuuauucaagcuuaccaugggccagaucaucaccuucuuccaggaggugccccacgucaucgaggaggugaugaacaucgugcugaucgcccucagccugcuggccauccucaaggggaucuacaacgucgcgaccugcggccuguucgggcugguguccuuccuccugcugugcggccgcagcugcuccacgaccuacaaggggguguacgagcuccagacccuggagcuggacauggccagccucaacaugugcaugccgcuguccugcaccaagaacaacagccaccacuacaucauggucggcaacgagacgggccuggagcucacccugaccaacaccuccaucaucaaccacaaguucugcaaccugagcgacgcccacaagaagaaccucuacgaccacgcccugauguccaucaucagcacguuccaccuguccauccccaacuucaaccaguacgaggccaugagcugcgacuucaacgggggcaagaucuccgugcaguacaaccucagccacaccuacgcgguggacgccgccaaccacugcgggaccaucgccaacggcguccugcagaccuucaugcggauggcguggggcggguccuacaucgcccuggacagcggcaagggguccugggacugcaucaugacgagcuaccaguaccucaucauccagaacaccaccugggaggaccacugccaguucucccgccccagccccaucggcuaccuggggcugcucagccagcggacccgcgacaucuacaucucccggcgccugcugggcacguucaccuggacccucagcgacuccgagggcaacgagacccccgggggcuacugccugacgcgguggaugcugaucgaggccgagcucaagugcuucgggaacaccgccguggccaagugcaacgagaagcacgacgaggaguucugcgacaugcugcgccuguucgacuucugcaagcaggcgauccggcgccucaaggccccggcccagaugagcauccagcugaucaacaaggccgugaacgcccugaucaacgaccagcucaucaugaagaaccaccuccgggacaucaugggcauccccuacugcaacuacuccaaguacugcuaccugaaccacaccgucaccgggcgcacgagccugccccggugcugccugguguccaacggcagcuaccugaacgagacccacuucuccgacgacaucgagcagcaggcggacaacaugaucaccgagcuccugcagaaggaguacaucgaccgccagggcaagaccccgcuggggcugguggaccucuucgucuucagcacguccuucuaccugaucagcaucuuccugcaccucgugaagauccccacccaccggcacaucaucggcaagcccugccccaagccgcaccgccugaaccacauggggaucugcuccugcggccuguacaagcaccccggggugcccgucaaguggaagcggugaggacuagucccuguucccagagcccacuuuuuuuucuuuuuuugaaauaaaauagccugucuuucagaucucaaaggcucuuuucagagccaccaaaaaaaaaaaaaaaaaaaaaaaaaaaaaaaaaaaaaaaaaaaaaaaaaaaaaaaaaaaaaaaaaaaaaaaaaaaaaaaaaaaaaaaaaaaaaaaaaaaaa

SEQ ID NO: 33465 - RNA, 1745 nt, Artificial Sequence
  mRNA product Design a-1 (hSL-A100) comprising derived and/or modified sequence from LASV(LASV254-NIG-2011;Clade II)__AIT17674__GPCmut8 (opt1)
aggagagucccgcagucggcguccagcggcucugcuuguucgugugugugucguugcaggccuuauucaagcuuaccaugggccagaucaucaccuucuuccaggaggugccccacgucaucgaggaggugaugaacaucgugcugaucgcccucagccugcuggccauccucaaggggaucuacaacgucgcgaccugcggccuguucgggcugguguccuuccuccugcugugcggccgcagcugcuccacgaccuacaaggggguguacgagcuccagacccuggagcuggacaugaccaaccucaacaugugcaugccgcugagcugcacgaagaacaacucccaccacuacaucauggucggcaacgagaccggccuggagcucacccugaccaacacgagcaucaucaaccacaaguucugcaaccuguccgacgcccacaagaagaaccucuacaaccacgcccugaugagcaucaucuccaccuuccaccugagcauccccaacuucaaccaguacgaggccauguccugcgacuucaacgggggcaagaucagcgugcaguacaaccucucccacagcuacgccguggacgcggccaaccacugcgggaccaucgccaacggcguccugcagaccuucaugcggauggccuggggcggguccuacaucgcgcuggacagcggcaaggggaacugggacugcaucaugacguccuaccaguaccucaucauccagaacaccaccugggaggaccacugccaguucagccgccccucccccaucggcuaccuggggcugcucagccagcggacccgcgacaucuacaucagccggcgccugcugggcacguucaccuggacccucuccgacagcgagggcaacgagacccccgggggcuacugccugacgcgguggaugcugaucgaggccgagcucaagugcuucgggaacaccgccguggccaagugcaacgagaagcacgacgaggaguucugcgacaugcugcgccuguucgacuucugcaagcaggccauccggcgccucaagaccccggcgcaggccaacauccagcugaucaacaaggccgugaacgcccugaucaacgaccagcucaucaugaagaaccaccuccgggacaucaugggcauccccuacugcaacuacuccaaguacugcuaccugaaccacaccgucacggggaagaccagccugccccgcugcugccugguguccaacggcagcuaccugaacgagacccacuucuccgacgacaucgagcagcaggccgacaacaugaucaccgagcuccugcagaaggaguacauggaccggcagggcaagacgccgcuggggcugguggaccucuucgucuucagcaccuccuucuaccugaucagcaucuuccugcaccucgugaagauccccacccaccgccacgugaucggcaagcccugccccaagccgcaccggcugaaccacauggggaucugcuccugcggccuguacaagcaccccgggguccccgugaaguggaagcgcugaggacuagucccuguucccagagcccacuuuuuuuucuuuuuuugaaauaaaauagccugucuuucagaucucaaaggcucuuuucagagccaccaaaaaaaaaaaaaaaaaaaaaaaaaaaaaaaaaaaaaaaaaaaaaaaaaaaaaaaaaaaaaaaaaaaaaaaaaaaaaaaaaaaaaaaaaaaaaaaaaaaaa

SEQ ID NO: 33466 - RNA, 1745 nt, Artificial Sequence
  mRNA product Design a-1 (hSL-A100) comprising derived and/or modified sequence from LASV(Nig08-A19;Clade III)__ADU56618__GPCmut8 (opt1)
aggagagucccgcagucggcguccagcggcucugcuuguucgugugugugucguugcaggccuuauucaagcuuaccaugggccagaucgugaccuucuuccaggaggucccccacgugaucgaggaggugaugaacaucguccugaucgcccucagcauccuggccauccugaaggggcucuacaacaucgcgaccugcggccugaucgggcuggugacguuccuccugcuguccggccgcagcugcuccaugaccuacaaggggguguacgagcuccagacccuggagcugaacaugaacacccucaacaugugcaugccgcugagcugcacgaagaacaacucccaccacuacaucauggucggcaacgagaccggccuggagcucacccugaccaacacgagccugcuccaccacaaguucugcaaccuguccgacgcccacaagaagaaccuguacgaccacacccucaugagcaucaucuccaccuuccaccugagcauccccaacuucaaccaguacgaggccauguccugcgacuucaacgggggcaagaucaccgugcaguacaaccugagccacuccuacgccaucgacgccgcgaaccacugcgggacgguggccaacggcguccuccagaccuucaugcggauggccuggggcgggagcuacaucgcccuggacuccggccgcgggaagugggacugcaucaugaccagcuaccaguaccugaucauccagaacaccacgugggaggaccacugccaguucucccggcccagccccaucggcuaccucgggcugcugucccagcgcacccgggacaucuacaucagccgccggcuccugggcaccuucaccuggacgcugagcgacuccgagggcaacgagacccccgggggcuacugccucacccgcuggaugcugaucgaggcggagcugaagugcuucgggaacaccgccguggccaagugcaacgagaagcacgacgaggaguucugcgacaugcuccggcuguucgacuucugcaagcaggccauccgccggcugaaggccccggcgcagaugagcauccagcucaucaacaaggccgugaacgcccugaucaacgaccagcugaucaugaagaaccaccuccgcgacaucaugggcauccccuacugcaacuacuccaaguacugcuaccugaaccacacgagcaccgggcggaccucccugccccgcugcugccucgucagcaacggcuccuaccugaacgagacccacuucagcgacgacaucgagcagcaggccgacaacaugaucacggagaugcugcagaaggaguaccuggaccggcagggcaagaccccgcucgggcugguggaccuguucguguucuccaccagcuucuaccucaucuccaucuuccugcaccuggucaagauccccacccaccgccacaucgugggcaagcccugccccaagccgcaccggcucaaccacauggggaucugcagcugcggccuguacaagcagcccggggugcccguccgcuggaagcggugaggacuagucccuguucccagagcccacuuuuuuuucuuuuuuugaaauaaaauagccugucuuucagaucucaaaggcucuuuucagagccaccaaaaaaaaaaaaaaaaaaaaaaaaaaaaaaaaaaaaaaaaaaaaaaaaaaaaaaaaaaaaaaaaaaaaaaaaaaaaaaaaaaaaaaaaaaaaaaaaaaaaa

SEQ ID NO: 33467 - RNA, 1748 nt, Artificial Sequence
  mRNA product Design a-1 (hSL-A100) comprising derived and/or modified sequence from LASV(G1180-SLE-2010;Clade IV)__AIT17168__GPCmut8 (opt1)
aggagagucccgcagucggcguccagcggcucugcuuguucgugugugugucguugcaggccuuauucaagcuuaccaugggccagaucgugaccuucuuccaggaggucccccacgugaucgaggaggugaugaacaucguccugaucgcccucagcauccuggccgugcugaaggggcucuacaacuucgcgaccugcggccugguggggcugcucacguuccugcugcucugcggccgcuccugcaccgccagccgguacaagggggucuacgagcugcagacccuggagcucaacauggagacccugaacaugugcaugccgcuguccugcacgaagaacaacagccaccacuacaucauggugggcaacgagaccggccucgagcugacccugaccaacacguccaucaucaaccacaaguucugcaaccucagcgacgcccacaagaagaaccuguacgaccacgcccugauguccaucaucagcaccuuccaccucuccauccccaacuucaaccaguacgaggccaugagcugcgacuucaacgggggcaagaucuccgugcaguacaaccugagccacuccuacgcgggggacgccgccaaccacugcggcaccgucgccaacggggugcugcagaccuucaugcgcauggcguggggcggcagcuacaucgcccucgacuccgggcacggcagcugggacugcaucaugacguccuaccaguaccugaucauccagaacaccaccugggaggaccacugccaguucagccggcccucccccaucggguaccugggccuccugagccagcgcacccgggacaucuacaucagccgccggcugcucggcacguucaccuggacccuguccgacagcgaggggaaggacaccccgggcggguacugccugacgcgcuggaugcucaucgaggccgagcugaagugcuucggcaacaccgccguggccaagugcaacgagaagcacgacgaggaguucugcgacaugcugcggcuguucgacuucugcaagcaggcgauccagcgccugaaggcccccgcccagauguccauccagcugaucaacaaggccgucaacgcccucaucaacgaccagcugaucaugaagaaccaccuccgggacaucauggggauccccuacugcaacuacagcaaguacugcuaccucaaccacaccaccacgggcaagaccucccugcccaagugcugccuggugagcaacggcuccuaccucaacgagacccacuucagcgacgacaucgagcagcaggcggacaacaugaucaccgagaugcugcagaaggaguacauggagcgccaggggaagacgccgcugggccugguggaccucuucgucuucuccaccagcuucuaccugaucuccaucuuccugcaccucgugaagauccccacccaccggcacaucgugggcaagagcugccccaagccccaccgccugaaccacauggggaucugcuccugcgggcuguacaagcagccgggcguccccgugaaguggaagcggugaggacuagucccuguucccagagcccacuuuuuuuucuuuuuuugaaauaaaauagccugucuuucagaucucaaaggcucuuuucagagccaccaaaaaaaaaaaaaaaaaaaaaaaaaaaaaaaaaaaaaaaaaaaaaaaaaaaaaaaaaaaaaaaaaaaaaaaaaaaaaaaaaaaaaaaaaaaaaaaaaaaaa

SEQ ID NO: 33468 - RNA, 1748 nt, Artificial Sequence
  mRNA product Design a-1 (hSL-A100) comprising derived and/or modified sequence from LASV(G1442-SLE-2011;Clade IV)__AIT17180__GPCmut8 (opt1)
aggagagucccgcagucggcguccagcggcucugcuuguucgugugugugucguugcaggccuuauucaagcuuaccaugggccagaucgugaccuucuuccaggaggucccccacgugaucgaggaggugaugaacaucguccugaucgcccucagcauccuggccgugcugaaggggcucuacaacguggcgaccugcggccugaucgggcuggucacguuccuccugcugugcggccgcuccugcaccaccacccucuacaaggggguguacgagcugcagacgcuggagcucaacauggagacccugaacaugugcaugccgcugagcugcaccaagaacaacucccaccacuacauccgggugggcaacgagaccggccucgagcugacgcugaccaacaccagcaucaucaaccacaaguucugcaaccucuccgacgcccacaagaagaaccuguacgaccacgcccugaugagcaucaucuccaccuuccaccucagcauccccaacuucaaccaguacgaggccauguccugcgacuucaacgggggcaagaucagcguccaguacaaccugucccacagcuacgccggggacgcggccaaccacugcggcacgguggccaacggggugcugcagaccuucaugcgcauggccuggggcggcuccuacaucgcgcucgacagcgggcggggcaacugggacugcaucaugaccuccuaccaguaccugaucauccagaacaccacgugggacgaccacugccaguucagccgccccucccccaucggguaccugggccuccugagccagcggacccgcgacgucuacaucucccggcgccugcucggcaccuucaccuggacgcugagcgacagcgaggggaaggacaccccgggcggguacugccugacccgguggaugcucaucgaggccgagcugaagugcuucggcaacaccgccguggccaagugcaacgagaagcacgacgaggaguucugcgacaugcugcgccucuucgacuucugcaagcaggccauccagcggcugaaggcgcccgcccagauguccauccagcugaucaacaaggccgugaacgcccucaucaacgaccagcugaucaugaagaaccaccuccgcgacaucauggggauccccuacugcaacuacagcaaguacugcuaccugaacaacacggccaccggcaagaccucccugcccaagugcugccugaucagcaacggcuccuaccucaacgagacccacuucagcgacgacaucgagcaggaggcggacaacaugaucacggagaugcugcagaaggaguacauggagcggcaggggaagaccccgcugggccuggucgaccucuucguguucuccaccagcuucuaccugaucuccaucuuccugcaccucgugaagauccccacccaccgccacaucgucggcaagagcugccccaagccccaccggcugaaccacauggggaucugcuccugcgggcuguacaagcagccgggcgugcccgugcgcuggaagcggugaggacuagucccuguucccagagcccacuuuuuuuucuuuuuuugaaauaaaauagccugucuuucagaucucaaaggcucuuuucagagccaccaaaaaaaaaaaaaaaaaaaaaaaaaaaaaaaaaaaaaaaaaaaaaaaaaaaaaaaaaaaaaaaaaaaaaaaaaaaaaaaaaaaaaaaaaaaaaaaaaaaaa

SEQ ID NO: 33469 - RNA, 1748 nt, Artificial Sequence
  mRNA product Design a-1 (hSL-A100) comprising derived and/or modified sequence from LASV(G3010-SLE-2013;Clade IV)__AIT17344__GPCmut8 (opt1)
aggagagucccgcagucggcguccagcggcucugcuuguucgugugugugucguugcaggccuuauucaagcuuaccaugggccagaucgugaccuucuuccaggaggucccccacgugaucgaggaggugaugaacaucguccugaucgcccucagcauccuggccgugcugaaggggcucuacaacuucgcgaccugcggccugguggggcuggucacguuccuccugcugugcggccgcuccugcaccaccagccucuacaaggggguguacgagcugcagacccuggagcucaacauggagacgcugaacaugugcaugccgcuguccugcaccaagaacaacagccaccacuacaucauggugggcaacgagaccggccucgagcugacccugacgaacaccuccaucaucaaccacaaguucugcaaccucagcgacgcccacaagaagaaccuguacaaccacgcccugauguccaucaucagcaccuuccaccucuccauccccaacuucaaccaguacgaggccaugagcugcgacuucaacgggggcaagaucuccguccaguacaaccugagccacuccuacgccggggacgcggccagccacugcggcaccguggccaacggggugcugcagacguucaugcggauggccuggggcggcuccuacaucgcgcucgacagcggguacggcaagugggacugcaucaugaccuccuaccaguaccugaucauccagaacaccaccugggaggaccacugccaguucagccgccccucccccaucggguaccugggccuccugagccagcggacgcgcgacaucuacaucagccggcgccugcucggcaccuucaccuggacccuguccgacagcgaggggaaggacacgccgggcggguacugccugacccgguggaugcucaucgaggccgagcugaagugcuucggcaacaccgccgucgccaagugcaacgagaagcacgacgaggaguucugcgacaugcugcgccucuucgacuucugcaagcaggccauccagcggcugaagacccccgcgcagauguccauccagcugaucaacaaggccgugaacgcccucaucaacgaccagcugaucaugaagaaccaccuccgcgacaucauggggauccccuacugcaacuacagcaaguacugcuaccugaaccacacgaccaccggcaagaccucccugcccaagugcugccuggugagcaacggcuccuaccucaacgagacgcacuucagcgacgacaucgagcagcaggccgacaacaugaucaccgagaugcugcagaaggaguacauggagcggcaggggaagaccccgcugggccuggucgaccucuucguguucuccaccagcuucuaccugaucuccaucuuccugcaccucgugaagauccccacgcaccgccacaucgucggcaagagcugccccaagccccaccggcugaaccacauggggaucugcuccugcgggcuguacaagcagccgggcgugcccgugcgcuggaagcggugaggacuagucccuguucccagagcccacuuuuuuuucuuuuuuugaaauaaaauagccugucuuucagaucucaaaggcucuuuucagagccaccaaaaaaaaaaaaaaaaaaaaaaaaaaaaaaaaaaaaaaaaaaaaaaaaaaaaaaaaaaaaaaaaaaaaaaaaaaaaaaaaaaaaaaaaaaaaaaaaaaaaa

SEQ ID NO: 33470 - RNA, 1748 nt, Artificial Sequence
  mRNA product Design a-1 (hSL-A100) comprising derived and/or modified sequence from LASV(G502-SLE-2009;Clade IV)__AIT17126__GPCmut8 (opt1)
aggagagucccgcagucggcguccagcggcucugcuuguucgugugugugucguugcaggccuuauucaagcuuaccaugggccagaucgugaccuucuuccaggaggucccccacgugaucgaggaggugaugaacaucguccugaucgcccucagcauccuggccgugcugaaggggcucuacaacuucgcgaccugcggccugguggggcugcucacguuccugcugcucugcggccgcuccugcaccaccgggcuguacaagggcgucuacgagcugcagacccucgagcugaacauggagacgcugaacaugugcaugccgcucagcugcaccaagaacaacucccaccacuacaucauggugggcaacgagaccgggcuggagcugacccucacgaacaccagcaucaucaaccacaaguucugcaaccuguccgacgcccacaagaagaaccuguacgaccacgcccucaugagcaucaucuccaccuuccaccugagcauccccaacuucaaccaguacgaggccauguccugcgacuucaacggcgggaagaucagcgugcaguacaaccugucccacagcuacgccggcgacgcggccgaccacugcgggaccgucgccaacggcgugcuccagacguucaugcggauggccuggggcggguccuacaucgcgcuggacagcggccgcgggcggugggacugcaucaugaccuccuaccaguaccugaucauccagaacaccaccugggaggaccacugccaguucagccgccccucccccaucggcuaccucggccugcugagccagcggacgcgcgacaucuacaucucccggcgccuccuggggaccuucaccuggacccugagcgacagcgagggcaaggacacgcccgggggcuacugccucacccgguggaugcugaucgaggccgagcugaagugcuucgggaacaccgccguggccaagugcaacgagaagcacgacgaggaguucugcgacaugcuccgccuguucgacuucugcaagcaggccauccagcggcugaaggcgccggcccagauguccauccagcucaucaacaaggccgucaacgcccugaucaacgaccagcuggugaugaagaaccaccuccgcgacaucaugggcauccccuacugcaacuacagccgguacugcuaccugaaccacaccacgaccggccgcaccucccugcccaagugcugccucgugagcaacggguccuaccugaacgagacccacuucagcgacgacaucgagcagcaggccgacaacaugaucacggagaugcugcagaaggaguacauggagcggcagggcaagaccccgcuggggcucgucgaccuguucguguucuccaccagcuucuaccugaucuccaucuuccuccaccuggugaagauccccacccaccgccacaucgucggcaagagcugccccaagccccaccggcugaaccacauggggaucugcuccugcggccucuacaagcagccgggcgugcccgugaaguggaagcgcugaggacuagucccuguucccagagcccacuuuuuuuucuuuuuuugaaauaaaauagccugucuuucagaucucaaaggcucuuuucagagccaccaaaaaaaaaaaaaaaaaaaaaaaaaaaaaaaaaaaaaaaaaaaaaaaaaaaaaaaaaaaaaaaaaaaaaaaaaaaaaaaaaaaaaaaaaaaaaaaaaaaaa

SEQ ID NO: 33471 - RNA, 1748 nt, Artificial Sequence
  mRNA product Design a-1 (hSL-A100) comprising derived and/or modified sequence from LASV(G733-SLE-2010;Clade IV)__AIT17154__GPCmut8 (opt1)
aggagagucccgcagucggcguccagcggcucugcuuguucgugugugugucguugcaggccuuauucaagcuuaccaugggccagaucgugaccuucuuccaggaggucccccacgugaucgaggaggugaugaacaucguccugaucgcccucagcauccuggccgugcugaaggggcucuacaacuucgcgaccugcggcaucguggggcuggucuccuuccugcuccugugcggccgcagcugcacgaccucccuguacaaggggguguacgagcuccagacccuggagcugaacauggagacccucaacaugugcaugccgcugagcugcacgaagaacaacucccaccacuacaucauggugggcaacgagaccggccuggagcucacccugaccaacacgagcaucaucaaccacaaguucugcaaccuguccgacgcccacaagaagaaccucuacgaccacgcccugaugagcaucaucuccaccuuccaccugagcauccccaacuucaaccaguacgaggccauguccugcgacuucaacgggggcaagaucagcguccaguacaaccucucccacagcuacgccggggacgcggccaaccacugcggcaccaucgccaacggggugcugcagaccuucaugcggauggccuggggcggcuccuacaucgcgcuggacagcgggcgcgaccggugggacugcaucaugacguccuaccaguaccucaucauccagaacaccaccugggaggaccacugccaguucagccgccccucccccaucggcuaccuggggcugcucagccagcggacccgcgacaucuacaucagccggcgccugcugggcacguucaccuggacccucuccgacagcgagggcaaggacacccccgggggcuacugccugacgcgguggaugcugaucgaggccgagcucaagugcuucgggaacaccgccguggccaagugcaacgagaagcacgacgaggaguucugcgacaugcugcgccuguucgacuucugcaagcaggccauccagcggcucaaggcgccggcccagauguccauccagcugaucaacaaggccgucaacgcccugaucaacgaccagcucaucaugaagaaccaccuccgcgacaucaugggcauccccuacugcaacuacagcaaguacugcuaccugaaccacaccaccacggggaagaccucccugcccaagugcugccuggugagcaacggcuccuaccugaacgagacccacuucagcgacgacaucgagcagcaggccgacaacaugaucaccgagaugcuccagaaggaguacauggagcggcagggcaagacgccgcuggggcugguggaccuguucgucuucuccaccagcuucuaccucaucuccaucuuccugcaccuggugaagauccccacccaccgccacguggucggcaagagcugccccaagccccaccggcucaaccacauggggaucugcuccugcggccuguacgggcagccgggcgugcccgugaaguggaagcgcugaggacuagucccuguucccagagcccacuuuuuuuucuuuuuuugaaauaaaauagccugucuuucagaucucaaaggcucuuuucagagccaccaaaaaaaaaaaaaaaaaaaaaaaaaaaaaaaaaaaaaaaaaaaaaaaaaaaaaaaaaaaaaaaaaaaaaaaaaaaaaaaaaaaaaaaaaaaaaaaaaaaaa

SEQ ID NO: 33472 - RNA, 1748 nt, Artificial Sequence
  mRNA product Design a-1 (hSL-A100) comprising derived and/or modified sequence from MOPV/LASV reassortant(IGS-1;Clade IV)__AFY05576__GPCmut8 (opt1)
aggagagucccgcagucggcguccagcggcucugcuuguucgugugugugucguugcaggccuuauucaagcuuaccaugggccagaucgugaccuucuuccaggaggucccccacgugaucgaggaggugaugaacaucguccugaucgcccucagcgugcuggccgugcugaaggggcucuacaacuucgcgaccugcggccuggucgggcuggugacguuccuccugcugugcggccgcuccugcaccaccagccucuacaaggggguguacgagcugcagacccuggagcucaacauggagacgcugaacaugugcaugccgcuguccugcaccaagaacaacagccaccacuacaucauggucggcaacgagaccggccucgagcugacccugacgaacaccuccaucaucaaccacaaguucugcaaccucagcgacgcccacaagaagaaccuguacgaccacgcccugauguccaucaucagcaccuuccaccucuccauccccaacuucaaccaguacgaggccaugagcugcgacuucaacgggggcaagaucuccgugcaguacaaccugagccacuccuacgccggggacgcggccaaccacugcggcaccguggccaacgggguccugcagacguucaugcggauggccuggggcggcagcuacaucgcgcucgacuccgggcgcggcaacugggacugcaucaugaccagcuaccaguaccugaucauccagaacaccaccugggaggaccacugccaguucucccggcccagccccaucggguaccugggccuccugucccagcgcacgcgggacaucuacaucagccgccggcugcucggcaccuucaccuggacccugagcgacuccgagggggaggacacgccgggcggguacugccugacccgcuggaugcucaucgaggccgagcugaagugcuucggcaacaccgccguggccaagugcaacgagaagcacgacgaggaguucugcgacaugcugcggcuguucgacuucugcaagcaggccauccagcgccugaaggcgcccgcccagaugagcauccagcugaucaacaaggccgugaacgcccucaucaacgaccagcugaucaugaagaaccaccuccgggacaucauggggauccccuacugcaacuacuccaaguacugcuaccucaaccacaccacgaccggccgcaccagccugcccaagugcugccuggucuccaacggcagcuaccucaacgagacccacuucuccgacgacaucgagcagcaggccgacaacaugaucacggagaugcugcagaaggaguacauggagcggcaggggaagaccccgcugggccugguggaccucuucguguucagcaccuccuucuaccugaucagcaucuuccugcaccucgucaagauccccacccaccgccacaucguggggaaguccugccccaagccccaccggcugaaccacaugggcaucugcagcugcgggcuguacaagcagccgggcgugcccgucaaguggaagcgcugaggacuagucccuguucccagagcccacuuuuuuuucuuuuuuugaaauaaaauagccugucuuucagaucucaaaggcucuuuucagagccaccaaaaaaaaaaaaaaaaaaaaaaaaaaaaaaaaaaaaaaaaaaaaaaaaaaaaaaaaaaaaaaaaaaaaaaaaaaaaaaaaaaaaaaaaaaaaaaaaaaaaa

SEQ ID NO: 33473 - RNA, 1748 nt, Artificial Sequence
  mRNA product Design a-1 (hSL-A100) comprising derived and/or modified sequence from LASV(LM765-SLE-2012;Clade IV)__AIT17814__GPCmut8 (opt1)
aggagagucccgcagucggcguccagcggcucugcuuguucgugugugugucguugcaggccuuauucaagcuuaccaugggccagaucgugaccuucuuccaggaggucccccacgugaucgaggaggugaugaacaucguccugaucgcccucagcauccuggccgugcugaaggggcucuacaacuucgcgaccugcggccugguggggcuggucacguuccuccugcugugcggccgcuccugcaccaccagccucuacaaggggguguacgagcugcagacccuggagcucaacauggagacgcugaacaugugcaugccgcuguccugcaccaagaacaacagccaccacuacaucauggugggcaacgagaccggccucgagcugacccugacgaacaccuccaucaucgaccacaaguucugcaaccucagcgacgcccaccggaagaaccuguacgaccacgcccugauguccaucaucagcaccuuccaccucuccauccccaacuucaaccaguacgaggccaugagcugcgacuucaacgggggcaagaucuccguccaguacaaccugagccacuccuacgccaaggacgcggccgaccacugcgggaccguggccaacggcgugcugcagacguucaugcgcauggccuggggcgggagcuacaucgcgcucgacuccggccgggggcgcugggacugcaucaugaccagcuaccaguaccugaucauccagaacaccaccugggaggaccacugccaguucucccggcccagccccaucggcuaccuggggcuccugucccagcgcacgcgggacaucuacaucagccgccggcugcucggcaccuucaccuggacccugagcgacuccgagggcaaggacacgcccgggggcuacugccugacccgcuggaugcucaucgaggccgagcugaagugcuucgggaacaccgccgucgccaagugcaacgagaagcacgacgaggaguucugcgacaugcugcggcuguucgacuucugcaagcaggccauccagcgccugaaggcgccggcccagaugagcauccagcugaucaacaaggccgugaacgcccucaucaacgaccagcugaucaugaagaaccaccuccgggacaucaugggcauccccuacugcaacuacuccaaguacugcuaccucaaccacaccacgaccgggaagaccagccugcccaagugcugccugguguccaacggcagcuaccucaacgagacccacuucuccgacgacaucgagcagcaggccgacaacaugaucacggagaugcugcagaaggaguacauggagcgccagggcaagaccccgcuggggcuggucgaccucuucguguucagcaccuccuucuaccugaucagcaucuuccugcaccucgugaagauccccacccaccggcacaucgucggcaagcccugccccaagccgcaccgccugaaccacauggggaucugcuccugcggccuguacaagcagcccggggugcccgugaaguggaagcggugaggacuagucccuguucccagagcccacuuuuuuuucuuuuuuugaaauaaaauagccugucuuucagaucucaaaggcucuuuucagagccaccaaaaaaaaaaaaaaaaaaaaaaaaaaaaaaaaaaaaaaaaaaaaaaaaaaaaaaaaaaaaaaaaaaaaaaaaaaaaaaaaaaaaaaaaaaaaaaaaaaaaa

SEQ ID NO: 33474 - RNA, 1748 nt, Artificial Sequence
  mRNA product Design a-1 (hSL-A100) comprising derived and/or modified sequence from LASV(LM776-SLE-2012;Clade IV)__AIT17824__GPCmut8 (opt1)
aggagagucccgcagucggcguccagcggcucugcuuguucgugugugugucguugcaggccuuauucaagcuuaccaugggccagaucgugaccuucuuccaggaggucccccacgugaucgaggaggugaugaacaucguccugaucgcccucagcauccuggccgugcugaaggggcucuacaacuucgcgaccugcggccugguggggcuggucacguuccuccugcugugcggccgcuccugcaccaccagcguguacaaggggguguacgagcuccagacccuggagcugaacauggagacgcucaacaugugcaugccgcuguccugcaccaagaacaacagccaccacuacaucauggucggcaacgagaccggccuggagcucacccugacgaacaccuccaucaucaaccacaaguucugcaaccugagcgacgcccacaagaagaaccucuacgaccacgcccugauguccaucaucagcaccuuccaccuguccauccccaacuucaaccaguacgaggccaugagcugcgacuucaacgggggcaagaucuccgugcaguacaaccucagccacuccuacgccggggacgcggccaaccacugcggcaccguggccaacgggguccugcagacguucaugcggauggccuggggcggcagcuacaucgcgcuggacuccgggcacggcaagugggacugcaucaugaccagcuaccaguaccucaucauccagaacaccaccugggaggaccacugccaguucucccgccccagccccaucggguaccugggccugcucucccagcggacgcgcgacaucuacaucagccggcgccugcugggcaccuucaccuggacccucagcgacuccgaggggaaggacacgccgggcggguacugccugacccgguggaugcugaucgaggccgagcucaagugcuucggcaacaccgccguggccaagugcaacgagaagcacgacgaggaguucugcgacaugcugcgccuguucgacuucugcaagcaggccauccagcggcucaaggcgcccgcccagaugagcauccagcugaucaacaaggccgugaacgcccugaucaacgaccagcucaucaugaagaaccaccuccgcgacaucauggggauccccuacugcaacuacuccaaguacugcuaccugaaccacaccacgaccggcaagaccagccugcccaagugcugccuggucuccaacggcagcuaccugaacgagacccacuucuccgacgacaucgagcagcaggccgacaacaugaucacggagaugcuccagaaggaguacauggagcggcaggggaagaccccgcugggccugguggaccuguucguguucagcaccuccuucuaccucaucagcaucuuccugcaccuggucaagauccccacccaccgccacaucguggggaaguccugccccaagccccaccggcucaaccacaugggcaucugcagcugcgggcuguacaagcagccgggcgugcccguccgcuggaagcggugaggacuagucccuguucccagagcccacuuuuuuuucuuuuuuugaaauaaaauagccugucuuucagaucucaaaggcucuuuucagagccaccaaaaaaaaaaaaaaaaaaaaaaaaaaaaaaaaaaaaaaaaaaaaaaaaaaaaaaaaaaaaaaaaaaaaaaaaaaaaaaaaaaaaaaaaaaaaaaaaaaaaa

SEQ ID NO: 33475 - RNA, 1748 nt, Artificial Sequence
  mRNA product Design a-1 (hSL-A100) comprising derived and/or modified sequence from LASV(Mad39;Clade IV)__ANH09722__GPCmut8 (opt1)
aggagagucccgcagucggcguccagcggcucugcuuguucgugugugugucguugcaggccuuauucaagcuuaccaugggccagaucgugaccuucuuccaggaggucccccacgugaucgaggaggugaugaacaucguccugaucgcccucagcauccuggccgugcugaaggggcucuacaacguggcgaccugcggccugaucgggcuggucacguuccuccugcugugcggccgcuccugcaccaccacccucuacaaggggguguacgagcugcaggcccuggagcucaacauggagacgcugaacaugugcaugccgcugagcugcaccaagaacaacucccaccacuacauccgggugggcaacgagaccggccucgagcugacccugacgaacaccagccucaucaaccacaaguucugcaaccuguccgacgcccacaagaagaaccuguacgaccacgcccucaugagcaucaucuccaccuuccaccugagcauccccaacuucaaccaguacgaggccauguccugcgacuucaacgacgggaagaucagcguccaguacaaccugucccacaccuacgcgggcgacacggccaaccacugcgggaccguggccaacggcgugcuccagaccuucaugcgcauggccuggggcgggagcuacaucgcgcuggacuccggccgcgggggcugggacugcaucaugaccagcuaccaguaccugaucauccagaacacgaccugggaggaccacugccaguucucccggcccagccccaucggguaccucggccugcugucccagcggacccgcgacaucuacaucagccggcgccuccugggcaccuucacguggacccuguccgacagcgaggggaaggacaccccgggcggguacugccucacccgguggaugcugaucgaggccgagcugaagugcuucggcaacacggccgucgccaagugcaacgagaagcacgacgaggaguucugcgacaugcuccgccuguucgacuucugcaagcaggccauccagcggcugaaggcgcccgcccagaugagcauccagcucaucaacaaggccgugaacgcccugaucaacgaccagcugaucaugaagaaccaccuccgcgacaucauggggauccccuacugcaacuacuccaaguacugcuaccugaaccacaccgugaccggcaagaccagccugcccaagugcugccucgucuccaacggcagcuaccugaacgagacgcacuucuccgacgacaucgagcagcaggccgacaacaugaucaccgagaugcugcagaaggaguacauggagcggcaggggaagaccccgcugggccucguggaccuguucguguucagcaccuccuucuaccugaucagcaucuuccuccaccuggucaagauccccacgcaccgccacgugguggggaagcccugccccaagccgcaccggcugaaccacaugggcaucugcuccugcggguucuacaagcagcccggcguccccgugcgcuggaagcggugaggacuagucccuguucccagagcccacuuuuuuuucuuuuuuugaaauaaaauagccugucuuucagaucucaaaggcucuuuucagagccaccaaaaaaaaaaaaaaaaaaaaaaaaaaaaaaaaaaaaaaaaaaaaaaaaaaaaaaaaaaaaaaaaaaaaaaaaaaaaaaaaaaaaaaaaaaaaaaaaaaaaa

SEQ ID NO: 33476 - RNA, 1748 nt, Artificial Sequence
  mRNA product Design a-1 (hSL-A100) comprising derived and/or modified sequence from LASV(Z0947-SLE-2011;Clade IV)__AIT17840__GPCmut8 (opt1)
aggagagucccgcagucggcguccagcggcucugcuuguucgugugugugucguugcaggccuuauucaagcuuaccaugggccagaucgugaccuucuuccaggaggucccccacgugaucgaggaggugaugaacaucguccugaucgcccucagcauccuggccgugcugaaggggcucuacaacuucgcgaccugcggccugguggggcuggucacguuccuccugcugugcggccgcuccugcaccaucagccucuacaaggggguguacgagcugcagacccuggagcucaacauggagacccugaacaugugcaugccgcuguccugcacgaagaacaacagccaccacuacaucauggugggcaacgagaccggccucgagcugacccugaccaacacguccaucaucaaccacaaguucugcaaccucagcgacgcccacaagaagaaccuguacgaccacgcccugauguccaucaucagcaccuuccaccucuccauccccaacuucaaccaguacgaggccaugagcugcgacuucaacgggggcaagaucuccguccaguacaaccugagccacuccuacgccggggacgcggccaaccacugcggcaccguggccaacggggugcugcagaccuucaugcggauggccuggggcggcagcuacaucgcgcucgacuccgggcgcgaccggugggacugcaucaugacgagcuaccaguaccugaucauccagaacaccaccugggaggaccacugccaguucucccgccccagccccaucggcuaccuggggcuccugucccagcggacccgcgacaucuacaucagccggcgccugcucggcacguucaccuggacccugagcgacuccgagggcaaggacacccccgggggcuacugccugacgcgguggaugcucaucgaggccgagcugaagugcuucgggaacaccgccgucgccaagugcaacgagaagcacgacgaggaguucugcgacaugcugcgccucuucgacuucugcaagcaggccauccagcggcugaaggcgccggcccagaugagcauccagcugaucaacaaggccgugaacgcccucaucaacgaccagcugaucaugaagaaccaccuccgcgacaucaugggcauccccuacugcaacuacuccaaguacugcuaccugaaccacaccaccacggggaagaccagccugcccaagugcugccugguguccaacggcagcuaccucaacgagacccacuucuccgacgacaucgagcagcaggccgacaacaugaucaccgagaugcugcagaaggaguacauggagcggcagggcaagacgccgcuggggcuggucgaccucuucguguucagcaccuccuucuaccugaucagcaucuuccugcaccucgugaagauccccacccaccgccacaucgucggcaagcccugccccaagccgcaccggcugaaccacauggggaucugcuccugcggccuguacaagcagcccggggugcccgugaaguggaagcgcugaggacuagucccuguucccagagcccacuuuuuuuucuuuuuuugaaauaaaauagccugucuuucagaucucaaaggcucuuuucagagccaccaaaaaaaaaaaaaaaaaaaaaaaaaaaaaaaaaaaaaaaaaaaaaaaaaaaaaaaaaaaaaaaaaaaaaaaaaaaaaaaaaaaaaaaaaaaaaaaaaaaaa

SEQ ID NO: 33477 - RNA, 1748 nt, Artificial Sequence
  mRNA product Design a-1 (hSL-A100) comprising derived and/or modified sequence from LASV(Josiah;Clade IV)__NP_694870__GPCmut8 (opt4)
aggagagucccgcagucggcguccagcggcucugcuuguucgugugugugucguugcaggccuuauucaagcuuaccaugggccagaucgugaccuucuuccaggaggugccccacgugaucgaggaggugaugaacaucgugcugaucgcccugagcgugcuggccgugcugaagggccuguacaacuucgccaccugcggccuggugggccuggugaccuuccugcugcugugcggcagaagcugcaccaccagccuguacaagggcguguacgagcugcagacccuggagcugaacauggagacccugaacaugugcaugccccugagcugcaccaagaacaacagccaccacuacaucauggugggcaacgagaccggccuggagcugacccugaccaacaccagcaucaucaaccacaaguucugcaaccugagcgacgcccacaagaagaaccuguacgaccacgcccugaugagcaucaucagcaccuuccaccugagcauccccaacuucaaccaguacgaggccaugagcugcgacuucaacggcggcaagaucagcgugcaguacaaccugagccacagcuacgccggcgacgccgccaaccacugcggcaccguggccaacggcgugcugcagaccuucaugagaauggccuggggcggcagcuacaucgcccuggacagcggcagaggcaacugggacugcaucaugaccagcuaccaguaccugaucauccagaacaccaccugggaggaccacugccaguucagcagacccagccccaucggcuaccugggccugcugagccagagaaccagagacaucuacaucagcagaagacugcugggcaccuucaccuggacccugagcgacagcgagggcaaggacacccccggcggcuacugccugaccagauggaugcugaucgaggccgagcugaagugcuucggcaacaccgccguggccaagugcaacgagaagcacgacgaggaguucugcgacaugcugagacuguucgacuucugcaagcaggccauccagagacugaaggcccccgcccagaugagcauccagcugaucaacaaggccgugaacgcccugaucaacgaccagcugaucaugaagaaccaccugagagacaucaugggcauccccuacugcaacuacagcaaguacugcuaccugaaccacaccaccaccggcagaaccagccugcccaagugcugccuggugagcaacggcagcuaccugaacgagacccacuucagcgacgacaucgagcagcaggccgacaacaugaucaccgagaugcugcagaaggaguacauggagagacagggcaagaccccccugggccugguggaccuguucguguucagcaccagcuucuaccugaucagcaucuuccugcaccuggugaagauccccacccacagacacaucgugggcaagagcugccccaagccccacagacugaaccacaugggcaucugcagcugcggccuguacaagcagcccggcgugcccgugaaguggaagagaugaggacuagucccuguucccagagcccacuuuuuuuucuuuuuuugaaauaaaauagccugucuuucagaucucaaaggcucuuuucagagccaccaaaaaaaaaaaaaaaaaaaaaaaaaaaaaaaaaaaaaaaaaaaaaaaaaaaaaaaaaaaaaaaaaaaaaaaaaaaaaaaaaaaaaaaaaaaaaaaaaaaaa

SEQ ID NO: 33478 - RNA, 1745 nt, Artificial Sequence
  mRNA product Design a-1 (hSL-A100) comprising derived and/or modified sequence from LASV(LP;Clade I)__AAF86701__GPCmut8 (opt4)
aggagagucccgcagucggcguccagcggcucugcuuguucgugugugugucguugcaggccuuauucaagcuuaccaugggccagaucaucaccuucuuccaggaggugccccacgugaucgaggaggugaugaacaucgugcugaucgcccugagccugcuggccauccugaagggccuguacaacaucgccaccugcggcaucaucggccugguggccuuccuguuccugugcggcaagagcugcagccugacccugaagggcggcuacgagcugcagacccuggagcugaacauggagacccugaacaugugcaugccccugagcugcaccaagaacagcagccaccacuacaucagagugggcaacgagaccggccuggagcugacccugaccaacaccagcaucaucaaccacaaguucugcaaccugagcgacgcccacaagaagaaccuguacgaccacgcccugaugagcaucaucagcaccuuccaccugagcauccccaacuucaaccaguacgaggccaugagcugcgacuucaacggcggcaagaucagcgugcaguacaaccugagccacagcuacgccggcgacgccgccgagcacugcggcaccguggccaacggcgugcugcagaccuucaugagaauggccuggggcggcagauacaucgcccuggacagcggcaagggcaacugggacugcaucaugaccagcuaccaguaccugaucauccagaacaccaccugggaggaccacugccaguucagcagacccagccccaucggcuaccugggccugcugagccagagaaccagagacaucuacaucagcagaagacugcugggcaccuucaccuggacccugagcgacagcgagggcaacgagacccccggcggcuacugccugaccagauggaugcugaucgaggccgagcugaagugcuucggcaacaccgccguggccaagugcaacgagaagcacgacgaggaguucugcgacaugcugagacuguucgacuucugcaagcaggccaucagaagacugaaggcccccgcccagaugagcauccagcugaucaacaaggccgugaacgcccugaucaacgaccagcugaucaugaagaaccaccugagagacaucaugggcauccccuacugcaacuacagcaaguacugcuaccugaaccacaccagcagcggcagaaccagccugcccaagugcugccugaucagcaacggcagcuaccugaacgagacccaguucagcgacgacaucgagcagcaggccgacaacaugaucaccgagaugcugcagaaggaguacaucgagagacagggcaagaccccccugggccugguggacaucuucaucuucagcaccagcuucuaccugaucagcaucuuccugcaccugaucaagauccccacccacagacacaucgugggcaagcccugccccaagccccacagacugaaccacaugggcgugugcagcugcggccuguacaagcaccccggcgugcccaccaaguggaagagaugaggacuagucccuguucccagagcccacuuuuuuuucuuuuuuugaaauaaaauagccugucuuucagaucucaaaggcucuuuucagagccaccaaaaaaaaaaaaaaaaaaaaaaaaaaaaaaaaaaaaaaaaaaaaaaaaaaaaaaaaaaaaaaaaaaaaaaaaaaaaaaaaaaaaaaaaaaaaaaaaaaaaa

SEQ ID NO: 33479 - RNA, 1745 nt, Artificial Sequence
  mRNA product Design a-1 (hSL-A100) comprising derived and/or modified sequence from LASV(803213;Clade II)__AAF86703__GPCmut8 (opt4)
aggagagucccgcagucggcguccagcggcucugcuuguucgugugugugucguugcaggccuuauucaagcuuaccaugggccagaucaucaccuucuuccaggaggugccccacgugaucgaggaggugaugaacaucgugcugaucgcccugagccugcuggccauccugaagggcaucuacaacguggccaccugcggccuguucggccugaucagcuuccugcugcugugcggcagaagcugcagcgugaccuacaagggcguguacgagcugcagacccuggagcugaacauggccaaccugaacaugugcaugccccugagcugcaccaagaacaacagccaccacuacaucauggugggcaacgagaccggccuggagcugacccugaccaacaccagcaucaucaaccacaaguucugcaaccugagcgacgcccacaagaagaaccuguacgaccacgcccugaugagcaucaucagcaccuuccaccugagcauccccaacuucaaccaguacgaggccaugagcugcgacuucaacggcggcaagaucagcgugcaguacaaccugagccacagcuucgccguggacgccgccaaccacugcggcaccaucgccaacggcgugcugcagaccuucaugagaauggccuggggcggcagcuacaucgcccuggacagcggcaagggcaacugggacugcaucaugaccagcuaccaguaccugaucauccagaacaccaccugggaggaccacugccaguucagcagacccagccccaucggcuaccugggccugcugagccagagaaccagagacaucuacaucagcagaagacugcugggcaccuucaccuggacccugagcgacagcgagggcaacgaggcccccggcggcuacugccugaccagauggaugcugaucgaggccgagcugaagugcuucggcaacaccgccguggccaagugcaacgagaagcacgacgaggaguucugcgacaugcugagacuguucgacuucugcaagcaggccaucaagagacugaagacccccgcccagaugagcauccagcugaucaacaaggccgugaacgcccugaucaacgaccagcugaucaugaagaaccaccugagagacaucaugggcauccccuacugcaacuacagcagauacugcuaccugaaccacaccgugaccggcaagaccagccugcccagaugcugccuggugagcaacggcagcuaccugaacgagacccacuucagcgacgacaucgagcagcaggccgacaacaugaucaccgagaugcugcagaaggaguacauggacagacagggcaagaccccccugggccugguggaccuguucguguucagcaccagcuucuaccugaucagcaucuuccugcaccuggugaagauccccacccacagacacaucgugggcaagcccugccccaagccccacagacugaaccacaugggcaucugcagcugcggccuguacaagcaccccggcgugcccgugaaguggaagagaugaggacuagucccuguucccagagcccacuuuuuuuucuuuuuuugaaauaaaauagccugucuuucagaucucaaaggcucuuuucagagccaccaaaaaaaaaaaaaaaaaaaaaaaaaaaaaaaaaaaaaaaaaaaaaaaaaaaaaaaaaaaaaaaaaaaaaaaaaaaaaaaaaaaaaaaaaaaaaaaaaaaaa

SEQ ID NO: 33480 - RNA, 1745 nt, Artificial Sequence
  mRNA product Design a-1 (hSL-A100) comprising derived and/or modified sequence from LASV(GA391;Clade III)__CAA36645__GPCmut8 (opt4)
aggagagucccgcagucggcguccagcggcucugcuuguucgugugugugucguugcaggccuuauucaagcuuaccaugggccagaucgugaccuucuuccaggaggugccccacgugaucgaggaggugaugaacaucgugcugaucgcccugagcauccuggccauccugaagggccuguacaacguggccaccugcggccugaucggccuggugaccuuccugcugcugagcggcagaagcugcagccugaucuacaagggcaccuacgagcugcagacccuggagcugaacauggagacccugaacaugugcaugccccugagcugcaccaagaacaacagccaccacuacaucagagugggcaacgagaccggccuggagcugacccugaccaacaccagcauccugaaccacaaguucugcaaccugagcgacgcccacaagagaaaccuguacgaccacagccugaugagcaucaucagcaccuuccaccugagcauccccaacuucaaccaguacgaggccaugagcugcgacuucaacggcggcaagaucaccgugcaguacaaccugagccacagcuucgccguggacgccgccggccacugcggcacccuggccaacggcgugcugcagaccuucaugagaauggccuggggcggcagcuacaucgcccuggacagcggcagaggcaacugggacugcaucaugaccagcuaccaguaccugaucauccagaacaccaccugggacgaccacugccaguucagcagacccagccccaucggcuaccugggccugcugagccagagaaccagagacaucuacaucagcagaagacugcugggcaccuucaccuggacccugagcgacagcgagggcaacgagacccccggcggcuacugccugaccagauggaugcugaucgaggccgagcugaagugcuucggcaacaccgccguggccaagugcaacgagaagcacgacgaggaguucugcgacaugcugagacuguucgacuucugcaagcaggccaucagaagacugaagacccccgcccagaugagcauccagcugaucaacaaggccgugaacgcccugaucaacgaccagcugaucaugaagaaccaccugagagacaucaugggcauccccuacugcaacuacagcagauacugcuaccugaaccacaccagcaccggcaagaccagccugcccagaugcugccugaucagcaacggcagcuaccugaacgagaccaaguucagcgacgacaucgagcagcaggccgacaacaugaucaccgagaugcugcagaaggaguacaucgacagacagggcaagaccccccugggccugguggaccuguucguguucagcaccagcuucuaccugaucagcaucuuccugcaccuggugaagauccccacccacagacacaucgugggcaagcccugccccaagccccacagacugaaccacaugggcaucugcagcugcggccuguacaagcagcccggcgugcccgugagauggaagagaugaggacuagucccuguucccagagcccacuuuuuuuucuuuuuuugaaauaaaauagccugucuuucagaucucaaaggcucuuuucagagccaccaaaaaaaaaaaaaaaaaaaaaaaaaaaaaaaaaaaaaaaaaaaaaaaaaaaaaaaaaaaaaaaaaaaaaaaaaaaaaaaaaaaaaaaaaaaaaaaaaaaaa

SEQ ID NO: 33481 - RNA, 1748 nt, Artificial Sequence
  mRNA product Design a-1 (hSL-A100) comprising derived and/or modified sequence from LASV(AV;Clade V)__CCA30314__GPCmut8 (opt4)
aggagagucccgcagucggcguccagcggcucugcuuguucgugugugugucguugcaggccuuauucaagcuuaccaugggccagaucgugaccuucuuccaggaggugccccacgugaucgaggaggugaugaacaucgugcugaucgcccugagcauccuggccgugcugaagggccuguacaacaucgccaccugcggccugaucggccugaucaccuuccugcugcugugcggcagaagcugcagcagcaaccuguacaagggcguguacgagcugcagagccuggaccugaacauggagacccugaacaugugcaugccccugagcugcaccaagaacaacagccaccacuacaucagagugggcaacgacaccggccuggagcugacccugaccaacaccagcauccugaaccacaaguucugcaaccugagcgacgcccacaagaaggaccuguacgaccacgcccugaugagcaucaucagcaccuuccaccugagcauccccaacuucaaccaguacgaggccaugagcugcgacuucaacggcggcaagaucagcgugcaguacaaccugagccacagcuacgccaucgacgccgccaaccacugcggcaccguggccaacggcauccugcagaccuucaugagaauggccuggggcggcagcuacaucgcccuggacagcggcagaggcaacugggacugcaucaugaccagcuaccaguaccugaucauccagaacaccaccugggagaaccacugccaguucagcagacccagccccaucggcuaccugggccugcugagccagagaaccagagacaucuacaucagcagaagacugcugggcaccuucaccuggacccugagcgacagcgagggcaacgccacccccggcggcuacugccugaccagauggaugcugaucgaggccgagcugaagugcuucggcaacaccgccguggccaagugcaacgagaagcacgacgaggaguucugcgacaugcugagacuguucgacuucugcaagcaggccaucagcagacugaagagccccgcccagaugagcauccagcugaucaacaaggccgugaacgcccugaucaacgaccagcugaucaugaagaaccaccugagagacaucaugggcauccccuacugcaacuacagcaaguacugcuaccugaaccacaccaucaccggcaagaccagccugcccaagugcugccuggugagcaacggcagcuaccugaacgagacccacuucagcgacgacaucgagcagcaggccgacaacaugaucaccgagaugcugcagaaggaguacauggagagacagggcaagaccccccugggccugguggaccuguucguguucagcaccagcuucuaccugaucagcaucuuccugagacuggugaagauccccacccacagacacaucgugggcaagcccugccccaagccccacagacugaaccacaugggcaucugcagcugcggccuguacaagcagcccggcgugcccgugagauggaagagaugaggacuagucccuguucccagagcccacuuuuuuuucuuuuuuugaaauaaaauagccugucuuucagaucucaaaggcucuuuucagagccaccaaaaaaaaaaaaaaaaaaaaaaaaaaaaaaaaaaaaaaaaaaaaaaaaaaaaaaaaaaaaaaaaaaaaaaaaaaaaaaaaaaaaaaaaaaaaaaaaaaaaa

SEQ ID NO: 33482 - RNA, 1745 nt, Artificial Sequence
  mRNA product Design a-1 (hSL-A100) comprising derived and/or modified sequence from LASV(Togo/2016/7082;Clade VI)__AMR44577__GPCmut8 (opt4)
aggagagucccgcagucggcguccagcggcucugcuuguucgugugugugucguugcaggccuuauucaagcuuaccaugggccagaucaucaccuucuuccaggaggugccccacgugaucgaggaggugaugaacaucgugcugaucgcccugagccugcuggccauccugaagggcguguacaacguggccaccugcggcaucaucggccuggugaccuuccuguuccugugcggcagaagcugcagccugaucuacaagggcagcuacgagcugcagacccuggagcugaacauggagacccugaacaugugcaugccccugagcugcaccaagaacagcagccaccacuacaucagagugggcaacgagaccggccuggagcugacccugaccaacaccagcaucaucaaccacaaguucugcaaccugagcgacgcccacaagagaaaccuguacgaccacgcccugaugagcauccugagcaccuuccaccugagcauccccaacuucaaccaguacgaggccaugagcugcgacuucaacggcggcaagaucagcgugcaguacaaccugagccacgccuacgccguggacgccgccgagcacugcggcaccguggccaacggcgugcugcagaccuucaugagaauggccuggggcggcagcuacaucgcccuggacagcggcagaggcaacugggacugcaucaugaccagcuaccaguaccugaucauccagaacaccaccugggaggaccacugccaguucagcagacccagccccaucggcuaccugggccugcugagccagagaaccagagacaucuacaucagcagaagacugcugggcaccuucaccuggacccugagcgacagcgagggcaacgagacccccggcggcuacugccugaccagauggaugcugaucgaggccgagcugaagugcuucggcaacaccgccguggccaagugcaacgagaagcacgacgaggaguucugcgacaugcugagacuguucgacuucugcaagcaggccauccagagacugaagagccccgcccagaugagcauccagcugaucaacaaggccgugaacgcccugaucaacgaccagcugaucaugaagaaccaccugagagacaugaugggcauccccuacugcaacuacagcaaguacugcuaccugaaccacaccagcagcggcagaaccagccugcccaagugcugccuggugagcaacggcagcuaccugaacgagacccacuucagcgacgacaucgagcagcaggccgacaacaugaucaccgagaugcugcagaaggaguacaucgacagacagggcaagaccccccugggccugguggaccuguucguguucagcaccagcuucuaccugaucagcaucuuccugcaccugaucaagauccccacccacagacacaucgugggcaagcccugccccaagccccacagacugaaccacaugggcaucugcagcugcggccuguacaagcagcccggcgugcccaccagauggaagagaugaggacuagucccuguucccagagcccacuuuuuuuucuuuuuuugaaauaaaauagccugucuuucagaucucaaaggcucuuuucagagccaccaaaaaaaaaaaaaaaaaaaaaaaaaaaaaaaaaaaaaaaaaaaaaaaaaaaaaaaaaaaaaaaaaaaaaaaaaaaaaaaaaaaaaaaaaaaaaaaaaaaaa

SEQ ID NO: 33483 - RNA, 1745 nt, Artificial Sequence
  mRNA product Design a-1 (hSL-A100) comprising derived and/or modified sequence from LASV(KAK-428;Clade n.d. (VII))__ANH09740__GPCmut8 (opt4)
aggagagucccgcagucggcguccagcggcucugcuuguucgugugugugucguugcaggccuuauucaagcuuaccaugggccagaucgugaccuucuuccaggaggugccccacgugaucgaggaggugaugaacaucgugcugaucgcccugagccugcuggccauccugaagggccuguacaacuucgccaccugcggcgugaucggccugaucaccuuccugcugcugugcggcagaagcugcagcgccaccuacaagggccaguacgagcugcagacccuggagcugaacauggagagccugaacaugugcaugccccugagcugcaccaagaacaacagccaccacuacaucagagccggcaacaacaccggccuggagcugacccugaccaacaccagcaucaucagccacaaguucugcaaccugagcgacgcccacaagaagaaccuguacgaccacacccugaugagcaucaucaccaccuuccaccugagcauccccaacuucaaccaguacgaggccaugagcugcgacuucaacggcggcaagaucagcauccaguacaaccugagccacagcuacgccggcgacgccgcccagcacugcggcaccguggccaacggcgugcugcagaccuucaugagaauggccuggggcggcagcuaccuggcccuggacagcggcagaagaggcugggacugcaucaucagcagcuaccaguaccugaucauccagaacaccaccugggacgaccacugccaguucagcagacccagccccaucggcuaccugggcuucgugagccagaagaccagagacaucuacaucagcagaagacugcugggcaccuucaccuggacccugagcgacagcgagggccacgacaugcccggcggcuacugccugaccagauggaugcugaucgaggccgaccugaagugcuucggcaacaccgccguggccaagugcaacgagaagcacgacgaggaguucugcgacauguggagacuguucgacuucugcaagcaggccauccagagacugaaggcccccgcccagaugaacauccagcugaucaacaaggccgugaacgcccugaucaacgaccagcugaugaugaagaaccaccugagagacaucaugggcauccccuacugcaacuacagcaaguucugcuaccugaacaacaccaccaccggcagaaccagccugcccagaugcugccugaucagcaacggcagcuaccugaacgagacccacuucagcgacgacaucgagcagcaggccgacaacaugaucaccgagaugcugcagaaggaguacauggacagacagggcaagaccccccugggccugguggaccuguucguguucagcaccagcuucuaccugaucaccaucuuccugcaccuggugaagauccccacccacagacacaucgugggcaagcccugccccaagccccacagacugaaccacaugggcaucugcagcugcggccuguacaagcagcccggcgugcccgugagauggaagagaugaggacuagucccuguucccagagcccacuuuuuuuucuuuuuuugaaauaaaauagccugucuuucagaucucaaaggcucuuuucagagccaccaaaaaaaaaaaaaaaaaaaaaaaaaaaaaaaaaaaaaaaaaaaaaaaaaaaaaaaaaaaaaaaaaaaaaaaaaaaaaaaaaaaaaaaaaaaaaaaaaaaaa

SEQ ID NO: 33484 - RNA, 1745 nt, Artificial Sequence; identical to SEQ ID NO: 33478
  mRNA product Design a-1 (hSL-A100) comprising derived and/or modified sequence from LASV(Pinneo-NIG-1969;Clade I)__AIT17836__GPCmut8 (opt4)

SEQ ID NO: 33485 - RNA, 1745 nt, Artificial Sequence
  mRNA product Design a-1 (hSL-A100) comprising derived and/or modified sequence from LASV(ISTH0009-NIG-2011;Clade II)__AIT17404__GPCmut8 (opt4)
aggagagucccgcagucggcguccagcggcucugcuuguucgugugugugucguugcaggccuuauucaagcuuaccaugggccagaucaucaccuucuuccaggaggugccccacgugaucgaggaggugaugaacaucgugcugaucgcccugagccugcuggccauccugaagggcaucuacaacguggccaccugcggccuguucggccuggugagcuuccugcugcugugcggcagaagcugcagcaccaccuacaagggcguguacgagcugcagacccuggagcuggacauggccagccugaacaugugcaugccccugagcugcaccaagaacaacagccaccacuacaucauggugggcaacgagaccggccuggagcugacccugaccaacaccagcaucaucaaccacaaguucugcaaccugagcgacgcccacaagaagaaccuguacgaccacgcccugaugagcaucaucagcaccuuccaccugagcauccccaacuucaaccaguacgaggccaugagcugcgacuucaacggcggcaagaucagcgugcaguacaaccugagccacgccuacgccguggacgccgccaaccacugcggcaccaucgccaacggcgugcugcagaccuucaugagaauggccuggggcggcagcuacaucgcccuggacagcggcaagggcagcugggacugcaucaugaccagcuaccaguaccugaucauccagaacaccaccugggaggaccacugccaguucagcagacccagccccaucggcuaccugggccugcugagccagagaaccagagacaucuacaucagcagaagacugcugggcaccuucaccuggacccugagcgacagcgagggcaacgagacccccggcggcuacugccugaccagauggaugcugaucgaggccgagcugaagugcuucggcaacaccgccguggccaagugcaacgagaagcacgacgaggaguucugcgacaugcugagacuguucgacuucugcaagcaggccaucagaagacugaagacccccgcccagaugagcauccagcugaucaacaaggccgugaacgcccugaucaacgaccagcugaucaugaagaaccaccugagagacaucaugggcauccccuacugcaacuacagcaaguacugcuaccugaaccacaccgugaccggcaagaccagccugcccagaugcugccuggugagcaacggcagcuaccugaacgagacccacuucagcgacgacaucgagcagcaggccgacaacaugaucaccgagcugcugcagaaggaguacauggacagacagggcaagaccccccugggccugguggaccuguucguguucagcaccagcuucuaccugaucagcaucuuccugcaccugaucaagauccccacccacagacacaucaccggcaagcccugccccaagccccacagacugaaccacaugggcaucugcagcugcggccuguacaagcaccccggcgugcccgugaaguggaagagaugaggacuagucccuguucccagagcccacuuuuuuuucuuuuuuugaaauaaaauagccugucuuucagaucucaaaggcucuuuucagagccaccaaaaaaaaaaaaaaaaaaaaaaaaaaaaaaaaaaaaaaaaaaaaaaaaaaaaaaaaaaaaaaaaaaaaaaaaaaaaaaaaaaaaaaaaaaaaaaaaaaaaa

SEQ ID NO: 33486 - RNA, 1745 nt, Artificial Sequence
  mRNA product Design a-1 (hSL-A100) comprising derived and/or modified sequence from LASV(ISTH2010-NIG-2012;Clade II)__AIT17482__GPCmut8 (opt4)
aggagagucccgcagucggcguccagcggcucugcuuguucgugugugugucguugcaggccuuauucaagcuuaccaugggccagaucaucaccuucuuccaggaggugccccacgugaucgaggaggugaugaacaucgugcugaucgcccugagccugcuggccauccugaagggcaucuacaacguggccaccugcggccuguucggccuggugagcuuccugcugcugugcggcagaagcugcagcaccaccuacaagggcguguacgagcugcagacccuggagcuggacauggccagccugaacaugugcaugccccugagcugcaccaagaacaacagccaccacuacaucauggugggcaacgagaccggccuggagcugacccugaccaacaccagcaucaucaaccacaaguucugcaaccugagcgacgcccacaagaagaaccuguacgaccacgcccugaugagcaucaucagcaccuuccaccugagcauccccaacuucaaccaguacgaggccaugagcugcgacuucaacggcggcaagaucagcgugcaguacaaccugagccacgccuacgccguggacgccgccaaccacugcggcaccaucgccaacggcgugcugcagaccuucaugagaauggccuggggcggcagcuacaucgcccuggacagcggcaagggcagcugggacugcaucaugaccagcuaccaguaccugaucauccagaacaucaccugggaggaccacugccaguucagcagacccagccccaucggcuaccugggccugcugagccagagaaccagagacaucuacaucagcagaagacugcugggcaccuucaccuggacccugagcgacagcgagggcaacgagacccccggcggcuacugccugaccagauggaugcugaucgaggccgagcugaagugcuucggcaacaccgccguggccaagugcaacgagaagcacgacgaggaguucugcgacaugcugagacuguucgacuucugcaagcaggccaucagaagacugaagacccccgcccagaugagcauccagcugaucaacaaggccgugaacgcccugaucaacgaccagcugaucaugaagaaccaccugagagacaucaugggcauccccuacugcaacuacagcaaguacugcuaccugaaccacaccgugaccggcaagaccagccugcccagaugcugccuggugagcaacggcagcuaccugaacgagacccacuucagcgacgacaucgagcagcaggccgacaacaugaucaccgagcugcugcagaaggaguacaucgacagacagggcaagaccccccugggccugguggaccuguucguguucagcaccagcuucuaccugaucagcaucuuccugcaccuggugaagauccccacccacagacacguggugggcaagcccugccccaagccccacagacugaaccacaugggcaucugcagcugcggccuguacaagcaccccggcgugcccgugaaguggaagagaugaggacuagucccuguucccagagcccacuuuuuuuucuuuuuuugaaauaaaauagccugucuuucagaucucaaaggcucuuuucagagccaccaaaaaaaaaaaaaaaaaaaaaaaaaaaaaaaaaaaaaaaaaaaaaaaaaaaaaaaaaaaaaaaaaaaaaaaaaaaaaaaaaaaaaaaaaaaaaaaaaaaaa

SEQ ID NO: 33487 - RNA, 1745 nt, Artificial Sequence
  mRNA product Design a-1 (hSL-A100) comprising derived and/or modified sequence from LASV(Lassa virus/H.sapiens-wt/NGA/2015/ISTH_0543;Clade II)__AVO03639__GPCmut8 (opt4)
aggagagucccgcagucggcguccagcggcucugcuuguucgugugugugucguugcaggccuuauucaagcuuaccaugggccagaucaucaccuucuuccaggaggugccccacgugaucgaggaggugaugaacaucgugcugaucgcccugagccugcuggccauccugaagggcaucuacaacguggccaccugcggccuguucggccuggugagcuuccugcugcugugcggcagaagcugcagcaccaccuacaagggcguguacgagcugcagacccuggagcuggacauggccaaccugaacaugugcaugccccugagcugcaccaagaacaacagccaccacuacaucauggugggcaacgagaccggccuggagcugacccugaccaacaccagcaucaucaaccacaaguucugcaaccugagcgacgcccacaagaagaaccuguacgaccacgcccugaugagcaucaucagcaccuuccaccugagcauccccaacuucaaccaguacgaggccaugagcugcgacuucaacggcggcaagaucagcgugcaguacaaccugagccacaccuacgccguggacgccgccaaccacugcggcaccaucgccaacggcgugcugcagaccuucaugagaauggccuggggcggcagcuacaucgcccuggacagcggcaagggcagcugggacugcaucaugaccagcuaccaguaccuggugauccagaacaccaccugggaggaccacugccaguucagcagacccagccccaucggcuaccugggccugcugagccagagaaccagagacaucuacaucagcagaagacugcugggcaccuucaccuggacccugagcgacagcgagggcaacgagacccccggcggcuacugccugaccagauggaugcugaucgaggccgagcugaagugcuucggcaacaccgccguggccaagugcaacgagaagcacgacgaggaguucugcgacaugcugagacuguucgacuucugcaagcaggccaucagaagacugaagacccccgcccagaugagcauccagcugaucaacaaggccgugaacgcccugaucaacgaccagcugaucaugaagaaccaccugagagacaucaugggcauccccuacugcaacuacagcaaguacugcuaccugaaccacaccgugaccggcaagaccagccugcccagaugcugccuggugagcaacggcagcuaccugaacgagacccacuucagcgacgacaucgagcagcaggccgacaacaugaucaccgagcugcugcagaaggaguacaucgacagacagggcaagaccccccugggccugguggaccuguucguguucagcaccagcuucuaccugaucagcaucuuccugcaccuggugaagauccccacccacagacacaucaccggcaagcccugccccaagccccacagacugaaccacaugggcaucugcagcugcggccuguacaagcaccccggcgugcccgugaaguggaagagaugaggacuagucccuguucccagagcccacuuuuuuuucuuuuuuugaaauaaaauagccugucuuucagaucucaaaggcucuuuucagagccaccaaaaaaaaaaaaaaaaaaaaaaaaaaaaaaaaaaaaaaaaaaaaaaaaaaaaaaaaaaaaaaaaaaaaaaaaaaaaaaaaaaaaaaaaaaaaaaaaaaaaa

SEQ ID NO: 33488 - RNA, 1745 nt, Artificial Sequence
  mRNA product Design a-1 (hSL-A100) comprising derived and/or modified sequence from LASV(Lassa virus/H.sapiens-wt/NGA/2016/ISTH_0009;Clade II)__AVO03571__GPCmut8 (opt4)
aggagagucccgcagucggcguccagcggcucugcuuguucgugugugugucguugcaggccuuauucaagcuuaccaugggccagaucaucaccuucuuccaggaggugccccacgugaucgaggaggugaugaacaucgugcugaucgcccugagccugcuggccauccugaagggcaucuacaacguggccaccugcggccugcugggccuggugagcuuccugcugcugugcggcagaagcugcagcaccaccuacaagggcguguacgagcugcagacccuggagcuggacauggccagccugaacaugugcaugccccugagcugcaccaagaacaacagccaccacuacaucauggugggcaacgagaccggccuggagcugacccugaccaacaccagcaucaucaaccacaaguucugcaaccugagcgacgcccacaagaagaaccuguacgaccacgcccugaugagcaucaucagcaccuuccaccugagcauccccaacuucaaccaguacgaggccaugagcugcgacuucaacggcggcagaaucagcgugcaguacaaccugagccacagcuacgccguggacgccgccaaccacugcggcaccaucgccaacggcgugcugcagaccuucaugagaauggccuggggcggcagcuacaucgcccuggacagcggcaagggcagcugggacugcaucaugaccagcuaccaguaccugaucauccagaacaccaccugggaggaccacugccaguucagcagacccagccccaucggcuaccugggccugcugagccagagaaccagagacaucuacaucagcagaagacugcugggcaccuucaccuggacccugagcgacagcgagggcaacgagacccccggcggcuacugccugaccagauggaugcugaucgaggccgagcugaagugcuucggcaacaccgccguggccaagugcaacgagaagcacgacgaggaguucugcgacaugcugagacuguucgacuucugcaagcaggccaucagaagacugaagacccccgcccagaugagcauccagcugaucaacaaggccgugaacgcccugaucaacgaccagcugaucaugaagaaccaccugagagacaucaugggcauccccuacugcaacuacagcaaguacugcuaccugaaccacaccgugaccggcaagaccagccugcccagaugcugccuggugagcaacggcagcuaccugaacgagacccacuucagcgacgacaucgagcagcaggccgacaacaugaucaccgagcugcugcagaaggaguacaucgacagacagggcaagaccccccugggccugguggaccuguucguguucagcaccagcuucuaccugaucagcaucuuccugcaccuggugaagauccccacccacagacacaucaccggcaagcccugccccaagccccacagacugaaccacaugggcaucugcagcugcggccuguacaaccaccccggcgugcccgugaaguggaagagaugaggacuagucccuguucccagagcccacuuuuuuuucuuuuuuugaaauaaaauagccugucuuucagaucucaaaggcucuuuucagagccaccaaaaaaaaaaaaaaaaaaaaaaaaaaaaaaaaaaaaaaaaaaaaaaaaaaaaaaaaaaaaaaaaaaaaaaaaaaaaaaaaaaaaaaaaaaaaaaaaaaaaa

SEQ ID NO: 33489 - RNA, 1745 nt, Artificial Sequence
  mRNA product Design a-1 (hSL-A100) comprising derived and/or modified sequence from LASV(Lassa virus/H.sapiens-wt/NGA/2016/ISTH_0017;Clade II)__AVO03567__GPCmut8 (opt4)
aggagagucccgcagucggcguccagcggcucugcuuguucgugugugugucguugcaggccuuauucaagcuuaccaugggccagaucaucaccuucuuccaggaggugccccacgugaucgaggaggugaugaacaucgugcugaucgcccugagccugcuggccauccugaagggcaucuacaacguggccaccugcggccuguucggccuggugagcuuccugcugcugugcggcagaagcugcagcaccaccuacaagggcguguacgagcugcagacccuggagcuggacauggccagccugaacaugugcaugccccugagcugcaccaagaacaacagccaccacuacaucauggugggcaacgagaccggccuggagcugacccugaccaacaccagcaucaucaaccacaaguucugcaaccugagcgacgcccacaagaagaaccuguacgaccacgcccugaugagcaucaucagcaccuuccaccugagcauccccaacuucaaccaguacgaggccaugagcugcgacuucaacggcggcaagaucagcgugcaguacaaccugagccacaccuacgccaucgacgccgccaaccacugcggcaccaucgccaacggcgugcugcagaccuucaugagaauggccuggggcggcagcuacaucgcccuggacagcggcaagggcagcugggacugcaucaugaccagcuaccaguaccugaucauccagaacaccaccugggaggaccacugccaguucagcagacccagccccaucggcuaccugggccugcugagccagagaaccagagacaucuacaucagcagaagacugcugggcaccuucaccuggacccugagcgacagcgagggcaacgagacccccggcggcuacugccugaccagauggaugcugaucgaggccgagcugaagugcuucggcaacaccgccguggccaagugcaacgagaagcacgacgaggaguucugcgacaugcugagacuguucgacuucugcaagcaggccaucagaagacugaagacccccgcccagaugagcauccagcugaucaacaaggccgugaacgcccugaucaacgaccagcugaucaugaagaaccaccugagagacaucaugggcauccccuacugcaacuacagcaaguacugcuaccugaaccacaccgugaccggcaagaccagccugcccagaugcugccuggugagcaacggcagcuaccugaacgagacccacuucagcgacgacaucgagcagcaggccgacaacaugaucaccgagcugcugcagaaggaguacauggacagacagggcaagaccccccugggccugguggaccuguucguguucagcaccagcuucuaccugaucagcaucuuccugcaccuggugagaauccccacccacagacacgugaucggcaagcccugccccaagccccacagacugaaccacaugggcaucugcagcugcggccuguacaagcaccccggcgugcccgugaaguggaagagaugaggacuagucccuguucccagagcccacuuuuuuuucuuuuuuugaaauaaaauagccugucuuucagaucucaaaggcucuuuucagagccaccaaaaaaaaaaaaaaaaaaaaaaaaaaaaaaaaaaaaaaaaaaaaaaaaaaaaaaaaaaaaaaaaaaaaaaaaaaaaaaaaaaaaaaaaaaaaaaaaaaaaa

SEQ ID NO: 33490 - RNA, 1745 nt, Artificial Sequence
  mRNA product Design a-1 (hSL-A100) comprising derived and/or modified sequence from LASV(Lassa virus/H.sapiens-wt/NGA/2018/ISTH_0959;Clade II)__AVV65099__GPCmut8 (opt4)
aggagagucccgcagucggcguccagcggcucugcuuguucgugugugugucguugcaggccuuauucaagcuuaccaugggccagaucaucaccuucuuccaggaggugccccacgugaucgaggaggugaugaacaucgugcugaucgcccugagccugcuggccauccugaagggcaucuacaacguggugaccugcggccuguucggccuggugagcuuccugcugcugugcggcagaagcugcagcaccaccuacaagggcguguacgagcugcagacccuggagcuggacauggccagccugaacaugugcaugccccugagcugcaccaagaacaacagccaccacuacaucauggugggcaacgagaccggccuggagcugacccugaccaacaccagcaucaucaaccacaaguucugcaaccugagcgacgcccacaagaagaaccuguacgaccacgcccugaugagcaucaucagcaccuuccaccugagcauccccaacuucaaccaguacgaggccaugagcugcgacuucaacggcggcaagaucagcgugcaguacaaccugagccacgccuacgccaucgacgccgccaaccacugcggcaccaucgccaacggcgugcugcagaccuucaugagaauggccuggggcggcagcuacaucgcccuggacagcggcaagggcagcugggacugcaucaugaccagcuaccaguaccugaucauccagaacaccaccugggaggaccacugccaguucagcagacccagccccaucggcuaccugggccugcugagccagagaaccagagacaucuacaucagcagaagacugcugggcaccuucaccuggacccugagcgacagcgagggcaacgagacccccggcggcuacugccugaccagauggaugcugaucgaggccgagcugaagugcuucggcaacaccgccguggccaagugcaacgagaagcacgacgaggaguucugcgacaugcugagacuguucgacuucugcaagcaggccaucagaagacugaagacccccgcccagaugagcauccagcugaucaacaaggccgugaacgcccugaucaacgaccagcugaucaugaagaaccaccugagagacaucaugggcauccccuacugcaacuacagcaaguacugcuaccugaaccacaccgugaccggcaagaccagccugcccagaugcugccuggugagcaacggcagcuaccugaacgagacccacuucagcgacgacaucgagcagcaggccgacaacaugaucaccgagcugcugcagaaggaguacaucgacagacagggcaagaccccccugggccugguggaccuguucguguucagcaccagcuucuaccugaucagcaucuuccugcaccuggugaagauccccacccacagacacgugaucggcaagcccugccccaagccccacagacugaaccacaugggcaucugcagcugcggccuguacaagcaccccggcgugcccgugaaguggaagagaugaggacuagucccuguucccagagcccacuuuuuuuucuuuuuuugaaauaaaauagccugucuuucagaucucaaaggcucuuuucagagccaccaaaaaaaaaaaaaaaaaaaaaaaaaaaaaaaaaaaaaaaaaaaaaaaaaaaaaaaaaaaaaaaaaaaaaaaaaaaaaaaaaaaaaaaaaaaaaaaaaaaaa

SEQ ID NO: 33491 - RNA, 1745 nt, Artificial Sequence
  mRNA product Design a-1 (hSL-A100) comprising derived and/or modified sequence from LASV(LASV003-NIG-2008;Clade II)__AIT17580__GPCmut8 (opt4)
aggagagucccgcagucggcguccagcggcucugcuuguucgugugugugucguugcaggccuuauucaagcuuaccaugggccagaucaucaccuucuuccaggaggugccccacgugaucgaggaggugaugaacaucgugcugaucgcccugagccugcuggccauccugaagggcaucuacaacguggccaccugcggccuguucggccuggugagcuuccugcugcugugcggcagaagcugcagcaccaccuacaagggcguguacgagcugcagacccuggagcuggacauggccagccugaacaugugcaugccccugagcugcaccaagaacaacagccaccacuacaucauggugggcaacgagaccggccuggagcugacccugaccaacaccagcaucaucaaccacaaguucugcaaccugagcgacgcccacaagaagaaccuguacgaccacgcccugaugagcaucaucagcaccuuccaccugagcauccccaacuucaaccaguacgaggccaugagcugcgacuucaacggcggcaagaucagcgugcaguacaaccugagccacaccuacgccguggacgccgccaaccacugcggcaccaucgccaacggcgugcugcagaccuucaugagaauggccuggggcggcagcuacaucgcccuggacagcggcaagggcagcugggacugcaucaugaccagcuaccaguaccugaucauccagaacaccaccugggaggaccacugccaguucagcagacccagccccaucggcuaccugggccugcugagccagagaaccagagacaucuacaucagcagaagacugcugggcaccuucaccuggacccugagcgacagcgagagcaacgagacccccggcggcuacugccugaccagauggaugcugaucgaggccgagcugaagugcuucggcaacaccgccguggccaagugcaacgagaagcacgacgaggaguucugcgacaugcugagacuguucgacuucugcaagcaggccaucagaagacugaaggcccccgcccagaugagcauccagcugaucaacaaggccgugaacgcccugaucaacgaccagcugaucaugaagaaccaccugagagacaucaugggcauccccuacugcaacuacagcaaguacugcuaccugaaccacaccgugaccggcagaaccagccugcccagaugcugccuggugagcaacggcagcuaccugaacgagacccacuucagcgacgacaucgagcagcaggccgacaacaugaucaccgagcugcugcagaaggaguacauggacagacagggcaagaccccccugggccugguggaccuguucguguucagcaccagcuucuaccugaucagcaucuuccugcaccuggugaagauccccacccacagacacgugaucggcaagcccugccccaagccccacagacugaaccacaugggcaucugcagcugcggccuguacaagcaccccggcgugcccgugaaguggaagagaugaggacuagucccuguucccagagcccacuuuuuuuucuuuuuuugaaauaaaauagccugucuuucagaucucaaaggcucuuuucagagccaccaaaaaaaaaaaaaaaaaaaaaaaaaaaaaaaaaaaaaaaaaaaaaaaaaaaaaaaaaaaaaaaaaaaaaaaaaaaaaaaaaaaaaaaaaaaaaaaaaaaaa

SEQ ID NO: 33492 - RNA, 1745 nt, Artificial Sequence
  mRNA product Design a-1 (hSL-A100) comprising derived and/or modified sequence from LASV(LASV035-NIG-2009;Clade II)__AIT17588__GPCmut8 (opt4)
aggagagucccgcagucggcguccagcggcucugcuuguucgugugugugucguugcaggccuuauucaagcuuaccaugggccagaucaucaccuucuuccaggaggugccccacgugaucgaggaggugaugaacaucgugcugaucgcccugagccugcuggccauccugaagggcaucuacaacguggccaccugcggccuguucggccuggugagcuuccugcugcugugcggcagaagcugcagcaccaccuacaagggcguguacgagcugcagacccuggagcuggacauggccagccugaacaugugcaugccccugagcugcaccaagaacaacagccaccacuacaucauggugggcaacgagaccggccuggagcugacccugaccaacaccagcaucaucaaccacaaguucugcaaccugagcgacgcccacaagaagaaccuguacgaccacgcccugaugagcaucaucagcaccuuccaccugagcauccccaacuucaaccaguacgaggccaugagcugcgacuucaacggcggcaagaucagcgugcaguacaaccugagccacgccuacgccguggacgccgccaaccacugcggcaccaucgccaacggcgugcugcagaccuucaugagaauggccuggggcggcagcuacaucgcccuggacagcggcaagggcagcugggacugcaucaugaccagcuaccaguaccugaucauccagaacaccaccugggaggaccacugccaguucagcagacccagccccaucggcuaccugggccugcugagccagagaaccagagacaucuacaucagcagaagacugcugggcaccuucaccuggacccugagcgacagcgagggcaacgagacccccggcggcuacugccugaccagauggaugcugaucgaggccgagcugaagugcuucggcaacaccgccguggccaagugcaacgagaagcacgacgaggaguucugcgacaugcugagacuguucgacuucugcaagcaggccaucagaagacugaaggcccccgcccagaugagcauccagcugaucaacaaggccgugaacgcccugaucaacgaccagcugaucaugaagaaccaccugagagacaucaugggcauccccuacugcaacuacagcaaguacugcuaccugaaccacaccgugaccggcaagaccagccugcccagaugcugccuggugagcaacggcagcuaccugaacgagacccacuucagcgacgacaucgagcagcaggccgacaacaugaucaccgagcugcugcagaaggaguacaucgacagacagggcaagaccccccugggccugguggaccuguucguguucagcaccagcuucuaccugaucagcaucuuccugcaccuggugaagauccccacccacagacacgugaucggcaagcccugccccaagccccacagacugaaccacaugggcaucugcagcugcggccuguacaagcaccccggcgugcccgugaaguggaagagaugaggacuagucccuguucccagagcccacuuuuuuuucuuuuuuugaaauaaaauagccugucuuucagaucucaaaggcucuuuucagagccaccaaaaaaaaaaaaaaaaaaaaaaaaaaaaaaaaaaaaaaaaaaaaaaaaaaaaaaaaaaaaaaaaaaaaaaaaaaaaaaaaaaaaaaaaaaaaaaaaaaaaa

SEQ ID NO: 33493 - RNA, 1745 nt, Artificial Sequence
  mRNA product Design a-1 (hSL-A100) comprising derived and/or modified sequence from LASV(LASV1000-NIG-2009;Clade II)__AIT17782__GPCmut8 (opt4)
aggagagucccgcagucggcguccagcggcucugcuuguucgugugugugucguugcaggccuuauucaagcuuaccaugggccagaucaucaccuucuuccaggaggugccccacgugaucgaggaggugaugaacaucgugcugaucgcccugagccugcuggccauccugaagggcaucuacaacguggccaccugcggccuguucggccuggugagcuuccugcugcugugcggcagaagcugcagcaccaccuacaagggcguguacgagcugcagacccuggagcuggacauggccagccugaacaugugcaugccccugagcugcaccaagaacaacagccaccacuacaucauggugggcaacgagaccggccuggagcugacccugaccaacaccagcaucaucaaccacaaguucugcaaccugagcgacgcccacaagaagaaccuguacgaccacgcccugaugagcaucaucagcaccuuccaccugagcauccccaacuucaaccaguacgaggccaugagcugcgacuucaacggcggcaagaucagcgugcaguacaaccugagccacaccuacgccguggacgccgccaaccacugcggcaccaucgccaacggcgugcugcagaccuucaugagaauggccuggggcggcagcuacaucgcccuggacagcggcaagggcagcugggacugcaucaugaccagcuaccaguaccugaucauccagaacaccaccugggaggaccacugccaguucagcagacccagccccaucggcuaccugggccugcugagccagagaaccagagacaucuacaucagcagaagacugcugggcaccuucaccuggacccugagcgacagcgagggcaacgagacccccggcggcuacugccugaccagauggaugcugaucgaggccgagcugaagugcuucggcaacaccgccguggccaagugcaacgagaagcacgacgaggaguucugcgacaugcugagacuguucgacuucugcaagcaggccaucaagagacugaagacccccgcccagaugagcauccagcugaucaacaaggccgugaacgcccugaucaacgaccagcugaucaugaagaaccaccugagagacaucaugggcauccccuacugcaacuacagcaaguacugcuaccugaaccacaccgugaccggcaagaccagccugcccagaugcugccuggugagcaacggcagcuaccugaacgagacccacuucagcgacgacaucgagcagcaggccgacaacaugaucaccgagcugcugcagaaggaguacaucgacagacagggcaagaccccccugggccugguggaccuguucguguucagcaccagcuucuaccugaucagcaucuuccugcaccuggugaagauccccacccacagacacguggugggcaagcccugccccaagccccacagacugaaccacaugggcaucugcagcugcggccuguacaagcaccccggcgugcccgugaaguggaagagaugaggacuagucccuguucccagagcccacuuuuuuuucuuuuuuugaaauaaaauagccugucuuucagaucucaaaggcucuuuucagagccaccaaaaaaaaaaaaaaaaaaaaaaaaaaaaaaaaaaaaaaaaaaaaaaaaaaaaaaaaaaaaaaaaaaaaaaaaaaaaaaaaaaaaaaaaaaaaaaaaaaaaa

SEQ ID NO: 33494 - RNA, 1745 nt, Artificial Sequence
  mRNA product Design a-1 (hSL-A100) comprising derived and/or modified sequence from LASV(LASV221-NIG-2010;Clade II)__AIT17624__GPCmut8 (opt4)
aggagagucccgcagucggcguccagcggcucugcuuguucgugugugugucguugcaggccuuauucaagcuuaccaugggccagaucaucaccuucuuccaggaggugccccacgugaucgaggaggugaugaacaucgugcugaucgcccugagccugcuggccauccugaagggcaucuacaacguggccaccugcggccuguucggccuggugagcuuccugcugcugugcggcagaagcugcagcaccaccuacaagggcguguacgagcugcagacccuggagcuggacauggccagccugaacaugugcaugccccugagcugcaccaagaacaacagccaccacuacaucauggugggcaacgagaccggccuggagcugacccugaccaacaccagcaucaucaaccacaaguucugcaaccugagcgacgcccacaagaagaaccuguacgaccacgcccugaugagcaucaucagcaccuuccaccugagcauccccaacuucaaccaguacgaggccaugagcugcgacuucaacggcggcaagaucagcgugcaguacaaccugagccacaccuacgccaucgacgccgccaaccacugcggcaccaucgccaacggcgugcugcagaccuucaugagaauggccuggggcggcagcuacaucgcccuggacagcggcaagggcagcugggacugcaucaugaccagcuaccaguaccugaucauccagaacaccaccugggaggaccacugccaguucagcagacccagccccaucggcuaccugggccugcugagccagagaaccagagacaucuacaucagcagaagacugcugggcaccuucaccuggacccugagcgacagcgagggcaacgagacccccggcggcuacugccugaccagauggaugcugaucgaggccgagcugaagugcuucggcaacaccgccguggccaagugcaacgagaagcacgacgaggaguucugcgacaugcugagacuguucgacuucugcaagcaggccaucagaagacugaagacccccgcccagaugagcauccagcugaucaacaaggccgugaacgcccugaucaacgaccagcugaucaugaagaaccaccugagagacaucaugggcauccccuacugcaacuacagcaaguacugcuaccugaaccacaccgugaccggcaagaccagccugcccagaugcugccuggugagcaacggcagcuaccugaacgagacccacuucagcgacgacaucgagcagcaggccgacaacaugaucaccgagaugcugcagaaggaguacauggacagacagggcaagaccccccugggccugguggaccuguucguguucagcaccagcuucuaccugaucagcaucuuccugcaccuggugaagauccccacccacagacacgugaucggcaagcccugccccaagccccacagacugaaccacaugggcaucugcagcugcggccuguacaagcaccccggcgugcccgugaaguggaagagaugaggacuagucccuguucccagagcccacuuuuuuuucuuuuuuugaaauaaaauagccugucuuucagaucucaaaggcucuuuucagagccaccaaaaaaaaaaaaaaaaaaaaaaaaaaaaaaaaaaaaaaaaaaaaaaaaaaaaaaaaaaaaaaaaaaaaaaaaaaaaaaaaaaaaaaaaaaaaaaaaaaaaa

SEQ ID NO: 33495 - RNA, 1745 nt, Artificial Sequence
  mRNA product Design a-1 (hSL-A100) comprising derived and/or modified sequence from LASV(LASV237-NIG-2010;Clade II)__AIT17638__GPCmut8 (opt4)
aggagagucccgcagucggcguccagcggcucugcuuguucgugugugugucguugcaggccuuauucaagcuuaccaugggccagaucaucaccuucuuccaggaggugccccacgugaucgaggaggugaugaacaucgugcugaucgcccugagccugcuggccauccugaagggcaucuacaacguggccaccugcggccuguucggccuggugagcuuccugcugcugugcggcagaagcugcagcaccaccuacaagggcguguacgagcugcagacccuggagcuggacauggccagccugaacaugugcaugccccugagcugcaccaagaacaacagccaccacuacaucauggugggcaacgagaccggccuggagcugacccugaccaacaccagcaucaucaaccacaaguucugcaaccugagcgacgcccacaagaaggaccuguacgaccacgcccugaugagcaucaucagcaccuuccaccugagcauccccaacuucaaccaguacgaggccaugagcugcgacuucaacggcggcaagaucagcgugcaguacaaccugagccacaccuacgccguggacgccgccaaccacugcggcaccaucgccaacggcgugcugcagaccuucaugagaauggccuggggcggcagcuacaucgcccuggacagcggcaagggcagcugggacugcaucaugaccagcuaccaguaccugaucauccagaacaccaccugggaggaccacugccaguucagcagacccagccccaucggcuaccugggccugcugagccagagaaccagagacaucuacaucagcagaagacugcugggcaccuucaccuggacccugagcgacagcgagggcaacgagacccccggcggcuacugccugaccagauggaugcugaucgaggccgagcugaagugcuucggcaacaccgccguggccaagugcaacgagaagcacgacgaggaguucugcgacaugcugagacuguucgacuucugcaagcaggccaucagaagacugaagacccccgcccagaugagcauccagcugaucaacaaggccgugaacgcccugaucaacgaccagcugaucaugaagaaccaccugagagacaucaugggcauccccuacugcaacuacagcaaguacugcuaccugaaccacaccgugaccggcaagaccagccugcccagaugcugccuggugagcaacggcagcuaccugaacgagacccacuucagcgacgacaucgagcagcaggccgacaacaugaucaccgagcugcugcagaaggaguacauggacagacagggcaagaccccccugggccugguggaccuguucguguucagcaccagcuucuaccugaucagcaucuuccugcaccugaucaagauccccacccacagacacaucaccggcaagcccugccccaagccccacagacugaaccacaugggcaucugcagcugcggccuguacaagcaccccggcgugcccgugaaguggaagagaugaggacuagucccuguucccagagcccacuuuuuuuucuuuuuuugaaauaaaauagccugucuuucagaucucaaaggcucuuuucagagccaccaaaaaaaaaaaaaaaaaaaaaaaaaaaaaaaaaaaaaaaaaaaaaaaaaaaaaaaaaaaaaaaaaaaaaaaaaaaaaaaaaaaaaaaaaaaaaaaaaaaaa

SEQ ID NO: 33496 - RNA, 1745 nt, Artificial Sequence
  mRNA product Design a-1 (hSL-A100) comprising derived and/or modified sequence from LASV(LASV253-NIG-2011;Clade II)__AIT17670__GPCmut8 (opt4)
aggagagucccgcagucggcguccagcggcucugcuuguucgugugugugucguugcaggccuuauucaagcuuaccaugggccagaucaucaccuucuuccaggaggugccccacgugaucgaggaggugaugaacaucgugcugaucgcccugagccugcuggccauccugaagggcaucuacaacguggccaccugcggccuguucggccuggugagcuuccugcugcugugcggcagaagcugcagcaccaccuacaagggcguguacgagcugcagacccuggagcuggacauggccagccugaacaugugcaugccccugagcugcaccaagaacaacagccaccacuacaucauggugggcaacgagaccggccuggagcugacccugaccaacaccagcaucaucaaccacaaguucugcaaccugagcgacgcccacaagaagaaccuguacgaccacgcccugaugagcaucaucagcaccuuccaccugagcauccccaacuucaaccaguacgaggccaugagcugcgacuucaacggcggcaagaucagcgugcaguacaaccugagccacaccuacgccguggacgccgccaaccacugcggcaccaucgccaacggcgugcugcagaccuucaugagaauggccuggggcggcagcuacaucgcccuggacagcggcaagggcagcugggacugcaucaugaccagcuaccaguaccugaucauccagaacaccaccugggaggaccacugccaguucagcagacccagccccaucggcuaccugggccugcugagccagagaaccagagacaucuacaucagcagaagacugcugggcaccuucaccuggacccugagcgacagcgagggcaacgagacccccggcggcuacugccugaccagauggaugcugaucgaggccgagcugaagugcuucggcaacaccgccguggccaagugcaacgagaagcacgacgaggaguucugcgacaugcugagacuguucgacuucugcaagcaggccaucagaagacugaaggcccccgcccagaugagcauccagcugaucaacaaggccgugaacgcccugaucaacgaccagcugaucaugaagaaccaccugagagacaucaugggcauccccuacugcaacuacagcaaguacugcuaccugaaccacaccgugaccggcagaaccagccugcccagaugcugccuggugagcaacggcagcuaccugaacgagacccacuucagcgacgacaucgagcagcaggccgacaacaugaucaccgagcugcugcagaaggaguacaucgacagacagggcaagaccccccugggccugguggaccuguucguguucagcaccagcuucuaccugaucagcaucuuccugcaccuggugaagauccccacccacagacacaucaucggcaagcccugccccaagccccacagacugaaccacaugggcaucugcagcugcggccuguacaagcaccccggcgugcccgugaaguggaagagaugaggacuagucccuguucccagagcccacuuuuuuuucuuuuuuugaaauaaaauagccugucuuucagaucucaaaggcucuuuucagagccaccaaaaaaaaaaaaaaaaaaaaaaaaaaaaaaaaaaaaaaaaaaaaaaaaaaaaaaaaaaaaaaaaaaaaaaaaaaaaaaaaaaaaaaaaaaaaaaaaaaaaa

SEQ ID NO: 33497 - RNA, 1745 nt, Artificial Sequence
  mRNA product Design a-1 (hSL-A100) comprising derived and/or modified sequence from LASV(LASV254-NIG-2011;Clade II)__AIT17674__GPCmut8 (opt4)
aggagagucccgcagucggcguccagcggcucugcuuguucgugugugugucguugcaggccuuauucaagcuuaccaugggccagaucaucaccuucuuccaggaggugccccacgugaucgaggaggugaugaacaucgugcugaucgcccugagccugcuggccauccugaagggcaucuacaacguggccaccugcggccuguucggccuggugagcuuccugcugcugugcggcagaagcugcagcaccaccuacaagggcguguacgagcugcagacccuggagcuggacaugaccaaccugaacaugugcaugccccugagcugcaccaagaacaacagccaccacuacaucauggugggcaacgagaccggccuggagcugacccugaccaacaccagcaucaucaaccacaaguucugcaaccugagcgacgcccacaagaagaaccuguacaaccacgcccugaugagcaucaucagcaccuuccaccugagcauccccaacuucaaccaguacgaggccaugagcugcgacuucaacggcggcaagaucagcgugcaguacaaccugagccacagcuacgccguggacgccgccaaccacugcggcaccaucgccaacggcgugcugcagaccuucaugagaauggccuggggcggcagcuacaucgcccuggacagcggcaagggcaacugggacugcaucaugaccagcuaccaguaccugaucauccagaacaccaccugggaggaccacugccaguucagcagacccagccccaucggcuaccugggccugcugagccagagaaccagagacaucuacaucagcagaagacugcugggcaccuucaccuggacccugagcgacagcgagggcaacgagacccccggcggcuacugccugaccagauggaugcugaucgaggccgagcugaagugcuucggcaacaccgccguggccaagugcaacgagaagcacgacgaggaguucugcgacaugcugagacuguucgacuucugcaagcaggccaucagaagacugaagacccccgcccaggccaacauccagcugaucaacaaggccgugaacgcccugaucaacgaccagcugaucaugaagaaccaccugagagacaucaugggcauccccuacugcaacuacagcaaguacugcuaccugaaccacaccgugaccggcaagaccagccugcccagaugcugccuggugagcaacggcagcuaccugaacgagacccacuucagcgacgacaucgagcagcaggccgacaacaugaucaccgagcugcugcagaaggaguacauggacagacagggcaagaccccccugggccugguggaccuguucguguucagcaccagcuucuaccugaucagcaucuuccugcaccuggugaagauccccacccacagacacgugaucggcaagcccugccccaagccccacagacugaaccacaugggcaucugcagcugcggccuguacaagcaccccggcgugcccgugaaguggaagagaugaggacuagucccuguucccagagcccacuuuuuuuucuuuuuuugaaauaaaauagccugucuuucagaucucaaaggcucuuuucagagccaccaaaaaaaaaaaaaaaaaaaaaaaaaaaaaaaaaaaaaaaaaaaaaaaaaaaaaaaaaaaaaaaaaaaaaaaaaaaaaaaaaaaaaaaaaaaaaaaaaaaaa

SEQ ID NO: 33498 - RNA, 1745 nt, Artificial Sequence
  mRNA product Design a-1 (hSL-A100) comprising derived and/or modified sequence from LASV(Nig08-A19;Clade III)__ADU56618__GPCmut8 (opt4)
aggagagucccgcagucggcguccagcggcucugcuuguucgugugugugucguugcaggccuuauucaagcuuaccaugggccagaucgugaccuucuuccaggaggugccccacgugaucgaggaggugaugaacaucgugcugaucgcccugagcauccuggccauccugaagggccuguacaacaucgccaccugcggccugaucggccuggugaccuuccugcugcugagcggcagaagcugcagcaugaccuacaagggcguguacgagcugcagacccuggagcugaacaugaacacccugaacaugugcaugccccugagcugcaccaagaacaacagccaccacuacaucauggugggcaacgagaccggccuggagcugacccugaccaacaccagccugcugcaccacaaguucugcaaccugagcgacgcccacaagaagaaccuguacgaccacacccugaugagcaucaucagcaccuuccaccugagcauccccaacuucaaccaguacgaggccaugagcugcgacuucaacggcggcaagaucaccgugcaguacaaccugagccacagcuacgccaucgacgccgccaaccacugcggcaccguggccaacggcgugcugcagaccuucaugagaauggccuggggcggcagcuacaucgcccuggacagcggcagaggcaagugggacugcaucaugaccagcuaccaguaccugaucauccagaacaccaccugggaggaccacugccaguucagcagacccagccccaucggcuaccugggccugcugagccagagaaccagagacaucuacaucagcagaagacugcugggcaccuucaccuggacccugagcgacagcgagggcaacgagacccccggcggcuacugccugaccagauggaugcugaucgaggccgagcugaagugcuucggcaacaccgccguggccaagugcaacgagaagcacgacgaggaguucugcgacaugcugagacuguucgacuucugcaagcaggccaucagaagacugaaggcccccgcccagaugagcauccagcugaucaacaaggccgugaacgcccugaucaacgaccagcugaucaugaagaaccaccugagagacaucaugggcauccccuacugcaacuacagcaaguacugcuaccugaaccacaccagcaccggcagaaccagccugcccagaugcugccuggugagcaacggcagcuaccugaacgagacccacuucagcgacgacaucgagcagcaggccgacaacaugaucaccgagaugcugcagaaggaguaccuggacagacagggcaagaccccccugggccugguggaccuguucguguucagcaccagcuucuaccugaucagcaucuuccugcaccuggugaagauccccacccacagacacaucgugggcaagcccugccccaagccccacagacugaaccacaugggcaucugcagcugcggccuguacaagcagcccggcgugcccgugagauggaagagaugaggacuagucccuguucccagagcccacuuuuuuuucuuuuuuugaaauaaaauagccugucuuucagaucucaaaggcucuuuucagagccaccaaaaaaaaaaaaaaaaaaaaaaaaaaaaaaaaaaaaaaaaaaaaaaaaaaaaaaaaaaaaaaaaaaaaaaaaaaaaaaaaaaaaaaaaaaaaaaaaaaaaa

SEQ ID NO: 33499 - RNA, 1748 nt, Artificial Sequence
  mRNA product Design a-1 (hSL-A100) comprising derived and/or modified sequence from LASV(G1180-SLE-2010;Clade IV)__AIT17168__GPCmut8 (opt4)
aggagagucccgcagucggcguccagcggcucugcuuguucgugugugugucguugcaggccuuauucaagcuuaccaugggccagaucgugaccuucuuccaggaggugccccacgugaucgaggaggugaugaacaucgugcugaucgcccugagcauccuggccgugcugaagggccuguacaacuucgccaccugcggccuggugggccugcugaccuuccugcugcugugcggcagaagcugcaccgccagcagauacaagggcguguacgagcugcagacccuggagcugaacauggagacccugaacaugugcaugccccugagcugcaccaagaacaacagccaccacuacaucauggugggcaacgagaccggccuggagcugacccugaccaacaccagcaucaucaaccacaaguucugcaaccugagcgacgcccacaagaagaaccuguacgaccacgcccugaugagcaucaucagcaccuuccaccugagcauccccaacuucaaccaguacgaggccaugagcugcgacuucaacggcggcaagaucagcgugcaguacaaccugagccacagcuacgccggcgacgccgccaaccacugcggcaccguggccaacggcgugcugcagaccuucaugagaauggccuggggcggcagcuacaucgcccuggacagcggccacggcagcugggacugcaucaugaccagcuaccaguaccugaucauccagaacaccaccugggaggaccacugccaguucagcagacccagccccaucggcuaccugggccugcugagccagagaaccagagacaucuacaucagcagaagacugcugggcaccuucaccuggacccugagcgacagcgagggcaaggacacccccggcggcuacugccugaccagauggaugcugaucgaggccgagcugaagugcuucggcaacaccgccguggccaagugcaacgagaagcacgacgaggaguucugcgacaugcugagacuguucgacuucugcaagcaggccauccagagacugaaggcccccgcccagaugagcauccagcugaucaacaaggccgugaacgcccugaucaacgaccagcugaucaugaagaaccaccugagagacaucaugggcauccccuacugcaacuacagcaaguacugcuaccugaaccacaccaccaccggcaagaccagccugcccaagugcugccuggugagcaacggcagcuaccugaacgagacccacuucagcgacgacaucgagcagcaggccgacaacaugaucaccgagaugcugcagaaggaguacauggagagacagggcaagaccccccugggccugguggaccuguucguguucagcaccagcuucuaccugaucagcaucuuccugcaccuggugaagauccccacccacagacacaucgugggcaagagcugccccaagccccacagacugaaccacaugggcaucugcagcugcggccuguacaagcagcccggcgugcccgugaaguggaagagaugaggacuagucccuguucccagagcccacuuuuuuuucuuuuuuugaaauaaaauagccugucuuucagaucucaaaggcucuuuucagagccaccaaaaaaaaaaaaaaaaaaaaaaaaaaaaaaaaaaaaaaaaaaaaaaaaaaaaaaaaaaaaaaaaaaaaaaaaaaaaaaaaaaaaaaaaaaaaaaaaaaaaa

SEQ ID NO: 33500 - RNA, 1748 nt, Artificial Sequence
  mRNA product Design a-1 (hSL-A100) comprising derived and/or modified sequence from LASV(G1442-SLE-2011;Clade IV)__AIT17180__GPCmut8 (opt4)
aggagagucccgcagucggcguccagcggcucugcuuguucgugugugugucguugcaggccuuauucaagcuuaccaugggccagaucgugaccuucuuccaggaggugccccacgugaucgaggaggugaugaacaucgugcugaucgcccugagcauccuggccgugcugaagggccuguacaacguggccaccugcggccugaucggccuggugaccuuccugcugcugugcggcagaagcugcaccaccacccuguacaagggcguguacgagcugcagacccuggagcugaacauggagacccugaacaugugcaugccccugagcugcaccaagaacaacagccaccacuacaucagagugggcaacgagaccggccuggagcugacccugaccaacaccagcaucaucaaccacaaguucugcaaccugagcgacgcccacaagaagaaccuguacgaccacgcccugaugagcaucaucagcaccuuccaccugagcauccccaacuucaaccaguacgaggccaugagcugcgacuucaacggcggcaagaucagcgugcaguacaaccugagccacagcuacgccggcgacgccgccaaccacugcggcaccguggccaacggcgugcugcagaccuucaugagaauggccuggggcggcagcuacaucgcccuggacagcggcagaggcaacugggacugcaucaugaccagcuaccaguaccugaucauccagaacaccaccugggacgaccacugccaguucagcagacccagccccaucggcuaccugggccugcugagccagagaaccagagacguguacaucagcagaagacugcugggcaccuucaccuggacccugagcgacagcgagggcaaggacacccccggcggcuacugccugaccagauggaugcugaucgaggccgagcugaagugcuucggcaacaccgccguggccaagugcaacgagaagcacgacgaggaguucugcgacaugcugagacuguucgacuucugcaagcaggccauccagagacugaaggcccccgcccagaugagcauccagcugaucaacaaggccgugaacgcccugaucaacgaccagcugaucaugaagaaccaccugagagacaucaugggcauccccuacugcaacuacagcaaguacugcuaccugaacaacaccgccaccggcaagaccagccugcccaagugcugccugaucagcaacggcagcuaccugaacgagacccacuucagcgacgacaucgagcaggaggccgacaacaugaucaccgagaugcugcagaaggaguacauggagagacagggcaagaccccccugggccugguggaccuguucguguucagcaccagcuucuaccugaucagcaucuuccugcaccuggugaagauccccacccacagacacaucgugggcaagagcugccccaagccccacagacugaaccacaugggcaucugcagcugcggccuguacaagcagcccggcgugcccgugagauggaagagaugaggacuagucccuguucccagagcccacuuuuuuuucuuuuuuugaaauaaaauagccugucuuucagaucucaaaggcucuuuucagagccaccaaaaaaaaaaaaaaaaaaaaaaaaaaaaaaaaaaaaaaaaaaaaaaaaaaaaaaaaaaaaaaaaaaaaaaaaaaaaaaaaaaaaaaaaaaaaaaaaaaaaa

SEQ ID NO: 33501 - RNA, 1748 nt, Artificial Sequence
  mRNA product Design a-1 (hSL-A100) comprising derived and/or modified sequence from LASV(G3010-SLE-2013;Clade IV)__AIT17344__GPCmut8 (opt4)
aggagagucccgcagucggcguccagcggcucugcuuguucgugugugugucguugcaggccuuauucaagcuuaccaugggccagaucgugaccuucuuccaggaggugccccacgugaucgaggaggugaugaacaucgugcugaucgcccugagcauccuggccgugcugaagggccuguacaacuucgccaccugcggccuggugggccuggugaccuuccugcugcugugcggcagaagcugcaccaccagccuguacaagggcguguacgagcugcagacccuggagcugaacauggagacccugaacaugugcaugccccugagcugcaccaagaacaacagccaccacuacaucauggugggcaacgagaccggccuggagcugacccugaccaacaccagcaucaucaaccacaaguucugcaaccugagcgacgcccacaagaagaaccuguacaaccacgcccugaugagcaucaucagcaccuuccaccugagcauccccaacuucaaccaguacgaggccaugagcugcgacuucaacggcggcaagaucagcgugcaguacaaccugagccacagcuacgccggcgacgccgccagccacugcggcaccguggccaacggcgugcugcagaccuucaugagaauggccuggggcggcagcuacaucgcccuggacagcggcuacggcaagugggacugcaucaugaccagcuaccaguaccugaucauccagaacaccaccugggaggaccacugccaguucagcagacccagccccaucggcuaccugggccugcugagccagagaaccagagacaucuacaucagcagaagacugcugggcaccuucaccuggacccugagcgacagcgagggcaaggacacccccggcggcuacugccugaccagauggaugcugaucgaggccgagcugaagugcuucggcaacaccgccguggccaagugcaacgagaagcacgacgaggaguucugcgacaugcugagacuguucgacuucugcaagcaggccauccagagacugaagacccccgcccagaugagcauccagcugaucaacaaggccgugaacgcccugaucaacgaccagcugaucaugaagaaccaccugagagacaucaugggcauccccuacugcaacuacagcaaguacugcuaccugaaccacaccaccaccggcaagaccagccugcccaagugcugccuggugagcaacggcagcuaccugaacgagacccacuucagcgacgacaucgagcagcaggccgacaacaugaucaccgagaugcugcagaaggaguacauggagagacagggcaagaccccccugggccugguggaccuguucguguucagcaccagcuucuaccugaucagcaucuuccugcaccuggugaagauccccacccacagacacaucgugggcaagagcugccccaagccccacagacugaaccacaugggcaucugcagcugcggccuguacaagcagcccggcgugcccgugagauggaagagaugaggacuagucccuguucccagagcccacuuuuuuuucuuuuuuugaaauaaaauagccugucuuucagaucucaaaggcucuuuucagagccaccaaaaaaaaaaaaaaaaaaaaaaaaaaaaaaaaaaaaaaaaaaaaaaaaaaaaaaaaaaaaaaaaaaaaaaaaaaaaaaaaaaaaaaaaaaaaaaaaaaaaa

SEQ ID NO: 33502 - RNA, 1748 nt, Artificial Sequence
  mRNA product Design a-1 (hSL-A100) comprising derived and/or modified sequence from LASV(G502-SLE-2009;Clade IV)__AIT17126__GPCmut8 (opt4)
aggagagucccgcagucggcguccagcggcucugcuuguucgugugugugucguugcaggccuuauucaagcuuaccaugggccagaucgugaccuucuuccaggaggugccccacgugaucgaggaggugaugaacaucgugcugaucgcccugagcauccuggccgugcugaagggccuguacaacuucgccaccugcggccuggugggccugcugaccuuccugcugcugugcggcagaagcugcaccaccggccuguacaagggcguguacgagcugcagacccuggagcugaacauggagacccugaacaugugcaugccccugagcugcaccaagaacaacagccaccacuacaucauggugggcaacgagaccggccuggagcugacccugaccaacaccagcaucaucaaccacaaguucugcaaccugagcgacgcccacaagaagaaccuguacgaccacgcccugaugagcaucaucagcaccuuccaccugagcauccccaacuucaaccaguacgaggccaugagcugcgacuucaacggcggcaagaucagcgugcaguacaaccugagccacagcuacgccggcgacgccgccgaccacugcggcaccguggccaacggcgugcugcagaccuucaugagaauggccuggggcggcagcuacaucgcccuggacagcggcagaggcagaugggacugcaucaugaccagcuaccaguaccugaucauccagaacaccaccugggaggaccacugccaguucagcagacccagccccaucggcuaccugggccugcugagccagagaaccagagacaucuacaucagcagaagacugcugggcaccuucaccuggacccugagcgacagcgagggcaaggacacccccggcggcuacugccugaccagauggaugcugaucgaggccgagcugaagugcuucggcaacaccgccguggccaagugcaacgagaagcacgacgaggaguucugcgacaugcugagacuguucgacuucugcaagcaggccauccagagacugaaggcccccgcccagaugagcauccagcugaucaacaaggccgugaacgcccugaucaacgaccagcuggugaugaagaaccaccugagagacaucaugggcauccccuacugcaacuacagcagauacugcuaccugaaccacaccaccaccggcagaaccagccugcccaagugcugccuggugagcaacggcagcuaccugaacgagacccacuucagcgacgacaucgagcagcaggccgacaacaugaucaccgagaugcugcagaaggaguacauggagagacagggcaagaccccccugggccugguggaccuguucguguucagcaccagcuucuaccugaucagcaucuuccugcaccuggugaagauccccacccacagacacaucgugggcaagagcugccccaagccccacagacugaaccacaugggcaucugcagcugcggccuguacaagcagcccggcgugcccgugaaguggaagagaugaggacuagucccuguucccagagcccacuuuuuuuucuuuuuuugaaauaaaauagccugucuuucagaucucaaaggcucuuuucagagccaccaaaaaaaaaaaaaaaaaaaaaaaaaaaaaaaaaaaaaaaaaaaaaaaaaaaaaaaaaaaaaaaaaaaaaaaaaaaaaaaaaaaaaaaaaaaaaaaaaaaaa

SEQ ID NO: 33503 - RNA, 1748 nt, Artificial Sequence
  mRNA product Design a-1 (hSL-A100) comprising derived and/or modified sequence from LASV(G733-SLE-2010;Clade IV)__AIT17154__GPCmut8 (opt4)
aggagagucccgcagucggcguccagcggcucugcuuguucgugugugugucguugcaggccuuauucaagcuuaccaugggccagaucgugaccuucuuccaggaggugccccacgugaucgaggaggugaugaacaucgugcugaucgcccugagcauccuggccgugcugaagggccuguacaacuucgccaccugcggcaucgugggccuggugagcuuccugcugcugugcggcagaagcugcaccaccagccuguacaagggcguguacgagcugcagacccuggagcugaacauggagacccugaacaugugcaugccccugagcugcaccaagaacaacagccaccacuacaucauggugggcaacgagaccggccuggagcugacccugaccaacaccagcaucaucaaccacaaguucugcaaccugagcgacgcccacaagaagaaccuguacgaccacgcccugaugagcaucaucagcaccuuccaccugagcauccccaacuucaaccaguacgaggccaugagcugcgacuucaacggcggcaagaucagcgugcaguacaaccugagccacagcuacgccggcgacgccgccaaccacugcggcaccaucgccaacggcgugcugcagaccuucaugagaauggccuggggcggcagcuacaucgcccuggacagcggcagagacagaugggacugcaucaugaccagcuaccaguaccugaucauccagaacaccaccugggaggaccacugccaguucagcagacccagccccaucggcuaccugggccugcugagccagagaaccagagacaucuacaucagcagaagacugcugggcaccuucaccuggacccugagcgacagcgagggcaaggacacccccggcggcuacugccugaccagauggaugcugaucgaggccgagcugaagugcuucggcaacaccgccguggccaagugcaacgagaagcacgacgaggaguucugcgacaugcugagacuguucgacuucugcaagcaggccauccagagacugaaggcccccgcccagaugagcauccagcugaucaacaaggccgugaacgcccugaucaacgaccagcugaucaugaagaaccaccugagagacaucaugggcauccccuacugcaacuacagcaaguacugcuaccugaaccacaccaccaccggcaagaccagccugcccaagugcugccuggugagcaacggcagcuaccugaacgagacccacuucagcgacgacaucgagcagcaggccgacaacaugaucaccgagaugcugcagaaggaguacauggagagacagggcaagaccccccugggccugguggaccuguucguguucagcaccagcuucuaccugaucagcaucuuccugcaccuggugaagauccccacccacagacacguggugggcaagagcugccccaagccccacagacugaaccacaugggcaucugcagcugcggccuguacggccagcccggcgugcccgugaaguggaagagaugaggacuagucccuguucccagagcccacuuuuuuuucuuuuuuugaaauaaaauagccugucuuucagaucucaaaggcucuuuucagagccaccaaaaaaaaaaaaaaaaaaaaaaaaaaaaaaaaaaaaaaaaaaaaaaaaaaaaaaaaaaaaaaaaaaaaaaaaaaaaaaaaaaaaaaaaaaaaaaaaaaaaa

SEQ ID NO: 33504 - RNA, 1748 nt, Artificial Sequence
  mRNA product Design a-1 (hSL-A100) comprising derived and/or modified sequence from MOPV/LASV reassortant(IGS-1;Clade IV)__AFY05576__GPCmut8 (opt4)
aggagagucccgcagucggcguccagcggcucugcuuguucgugugugugucguugcaggccuuauucaagcuuaccaugggccagaucgugaccuucuuccaggaggugccccacgugaucgaggaggugaugaacaucgugcugaucgcccugagcgugcuggccgugcugaagggccuguacaacuucgccaccugcggccuggugggccuggugaccuuccugcugcugugcggcagaagcugcaccaccagccuguacaagggcguguacgagcugcagacccuggagcugaacauggagacccugaacaugugcaugccccugagcugcaccaagaacaacagccaccacuacaucauggugggcaacgagaccggccuggagcugacccugaccaacaccagcaucaucaaccacaaguucugcaaccugagcgacgcccacaagaagaaccuguacgaccacgcccugaugagcaucaucagcaccuuccaccugagcauccccaacuucaaccaguacgaggccaugagcugcgacuucaacggcggcaagaucagcgugcaguacaaccugagccacagcuacgccggcgacgccgccaaccacugcggcaccguggccaacggcgugcugcagaccuucaugagaauggccuggggcggcagcuacaucgcccuggacagcggcagaggcaacugggacugcaucaugaccagcuaccaguaccugaucauccagaacaccaccugggaggaccacugccaguucagcagacccagccccaucggcuaccugggccugcugagccagagaaccagagacaucuacaucagcagaagacugcugggcaccuucaccuggacccugagcgacagcgagggcgaggacacccccggcggcuacugccugaccagauggaugcugaucgaggccgagcugaagugcuucggcaacaccgccguggccaagugcaacgagaagcacgacgaggaguucugcgacaugcugagacuguucgacuucugcaagcaggccauccagagacugaaggcccccgcccagaugagcauccagcugaucaacaaggccgugaacgcccugaucaacgaccagcugaucaugaagaaccaccugagagacaucaugggcauccccuacugcaacuacagcaaguacugcuaccugaaccacaccaccaccggcagaaccagccugcccaagugcugccuggugagcaacggcagcuaccugaacgagacccacuucagcgacgacaucgagcagcaggccgacaacaugaucaccgagaugcugcagaaggaguacauggagagacagggcaagaccccccugggccugguggaccuguucguguucagcaccagcuucuaccugaucagcaucuuccugcaccuggugaagauccccacccacagacacaucgugggcaagagcugccccaagccccacagacugaaccacaugggcaucugcagcugcggccuguacaagcagcccggcgugcccgugaaguggaagagaugaggacuagucccuguucccagagcccacuuuuuuuucuuuuuuugaaauaaaauagccugucuuucagaucucaaaggcucuuuucagagccaccaaaaaaaaaaaaaaaaaaaaaaaaaaaaaaaaaaaaaaaaaaaaaaaaaaaaaaaaaaaaaaaaaaaaaaaaaaaaaaaaaaaaaaaaaaaaaaaaaaaaa

SEQ ID NO: 33505 - RNA, 1748 nt, Artificial Sequence
  mRNA product Design a-1 (hSL-A100) comprising derived and/or modified sequence from LASV(LM765-SLE-2012;Clade IV)__AIT17814__GPCmut8 (opt4)
aggagagucccgcagucggcguccagcggcucugcuuguucgugugugugucguugcaggccuuauucaagcuuaccaugggccagaucgugaccuucuuccaggaggugccccacgugaucgaggaggugaugaacaucgugcugaucgcccugagcauccuggccgugcugaagggccuguacaacuucgccaccugcggccuggugggccuggugaccuuccugcugcugugcggcagaagcugcaccaccagccuguacaagggcguguacgagcugcagacccuggagcugaacauggagacccugaacaugugcaugccccugagcugcaccaagaacaacagccaccacuacaucauggugggcaacgagaccggccuggagcugacccugaccaacaccagcaucaucgaccacaaguucugcaaccugagcgacgcccacagaaagaaccuguacgaccacgcccugaugagcaucaucagcaccuuccaccugagcauccccaacuucaaccaguacgaggccaugagcugcgacuucaacggcggcaagaucagcgugcaguacaaccugagccacagcuacgccaaggacgccgccgaccacugcggcaccguggccaacggcgugcugcagaccuucaugagaauggccuggggcggcagcuacaucgcccuggacagcggcagaggcagaugggacugcaucaugaccagcuaccaguaccugaucauccagaacaccaccugggaggaccacugccaguucagcagacccagccccaucggcuaccugggccugcugagccagagaaccagagacaucuacaucagcagaagacugcugggcaccuucaccuggacccugagcgacagcgagggcaaggacacccccggcggcuacugccugaccagauggaugcugaucgaggccgagcugaagugcuucggcaacaccgccguggccaagugcaacgagaagcacgacgaggaguucugcgacaugcugagacuguucgacuucugcaagcaggccauccagagacugaaggcccccgcccagaugagcauccagcugaucaacaaggccgugaacgcccugaucaacgaccagcugaucaugaagaaccaccugagagacaucaugggcauccccuacugcaacuacagcaaguacugcuaccugaaccacaccaccaccggcaagaccagccugcccaagugcugccuggugagcaacggcagcuaccugaacgagacccacuucagcgacgacaucgagcagcaggccgacaacaugaucaccgagaugcugcagaaggaguacauggagagacagggcaagaccccccugggccugguggaccuguucguguucagcaccagcuucuaccugaucagcaucuuccugcaccuggugaagauccccacccacagacacaucgugggcaagcccugccccaagccccacagacugaaccacaugggcaucugcagcugcggccuguacaagcagcccggcgugcccgugaaguggaagagaugaggacuagucccuguucccagagcccacuuuuuuuucuuuuuuugaaauaaaauagccugucuuucagaucucaaaggcucuuuucagagccaccaaaaaaaaaaaaaaaaaaaaaaaaaaaaaaaaaaaaaaaaaaaaaaaaaaaaaaaaaaaaaaaaaaaaaaaaaaaaaaaaaaaaaaaaaaaaaaaaaaaaa

SEQ ID NO: 33506 - RNA, 1748 nt, Artificial Sequence
  mRNA product Design a-1 (hSL-A100) comprising derived and/or modified sequence from LASV(LM776-SLE-2012;Clade IV)__AIT17824__GPCmut8 (opt4)
aggagagucccgcagucggcguccagcggcucugcuuguucgugugugugucguugcaggccuuauucaagcuuaccaugggccagaucgugaccuucuuccaggaggugccccacgugaucgaggaggugaugaacaucgugcugaucgcccugagcauccuggccgugcugaagggccuguacaacuucgccaccugcggccuggugggccuggugaccuuccugcugcugugcggcagaagcugcaccaccagcguguacaagggcguguacgagcugcagacccuggagcugaacauggagacccugaacaugugcaugccccugagcugcaccaagaacaacagccaccacuacaucauggugggcaacgagaccggccuggagcugacccugaccaacaccagcaucaucaaccacaaguucugcaaccugagcgacgcccacaagaagaaccuguacgaccacgcccugaugagcaucaucagcaccuuccaccugagcauccccaacuucaaccaguacgaggccaugagcugcgacuucaacggcggcaagaucagcgugcaguacaaccugagccacagcuacgccggcgacgccgccaaccacugcggcaccguggccaacggcgugcugcagaccuucaugagaauggccuggggcggcagcuacaucgcccuggacagcggccacggcaagugggacugcaucaugaccagcuaccaguaccugaucauccagaacaccaccugggaggaccacugccaguucagcagacccagccccaucggcuaccugggccugcugagccagagaaccagagacaucuacaucagcagaagacugcugggcaccuucaccuggacccugagcgacagcgagggcaaggacacccccggcggcuacugccugaccagauggaugcugaucgaggccgagcugaagugcuucggcaacaccgccguggccaagugcaacgagaagcacgacgaggaguucugcgacaugcugagacuguucgacuucugcaagcaggccauccagagacugaaggcccccgcccagaugagcauccagcugaucaacaaggccgugaacgcccugaucaacgaccagcugaucaugaagaaccaccugagagacaucaugggcauccccuacugcaacuacagcaaguacugcuaccugaaccacaccaccaccggcaagaccagccugcccaagugcugccuggugagcaacggcagcuaccugaacgagacccacuucagcgacgacaucgagcagcaggccgacaacaugaucaccgagaugcugcagaaggaguacauggagagacagggcaagaccccccugggccugguggaccuguucguguucagcaccagcuucuaccugaucagcaucuuccugcaccuggugaagauccccacccacagacacaucgugggcaagagcugccccaagccccacagacugaaccacaugggcaucugcagcugcggccuguacaagcagcccggcgugcccgugagauggaagagaugaggacuagucccuguucccagagcccacuuuuuuuucuuuuuuugaaauaaaauagccugucuuucagaucucaaaggcucuuuucagagccaccaaaaaaaaaaaaaaaaaaaaaaaaaaaaaaaaaaaaaaaaaaaaaaaaaaaaaaaaaaaaaaaaaaaaaaaaaaaaaaaaaaaaaaaaaaaaaaaaaaaaa

SEQ ID NO: 33507 - RNA, 1748 nt, Artificial Sequence
  mRNA product Design a-1 (hSL-A100) comprising derived and/or modified sequence from LASV(Mad39;Clade IV)__ANH09722__GPCmut8 (opt4)
aggagagucccgcagucggcguccagcggcucugcuuguucgugugugugucguugcaggccuuauucaagcuuaccaugggccagaucgugaccuucuuccaggaggugccccacgugaucgaggaggugaugaacaucgugcugaucgcccugagcauccuggccgugcugaagggccuguacaacguggccaccugcggccugaucggccuggugaccuuccugcugcugugcggcagaagcugcaccaccacccuguacaagggcguguacgagcugcaggcccuggagcugaacauggagacccugaacaugugcaugccccugagcugcaccaagaacaacagccaccacuacaucagagugggcaacgagaccggccuggagcugacccugaccaacaccagccugaucaaccacaaguucugcaaccugagcgacgcccacaagaagaaccuguacgaccacgcccugaugagcaucaucagcaccuuccaccugagcauccccaacuucaaccaguacgaggccaugagcugcgacuucaacgacggcaagaucagcgugcaguacaaccugagccacaccuacgccggcgacaccgccaaccacugcggcaccguggccaacggcgugcugcagaccuucaugagaauggccuggggcggcagcuacaucgcccuggacagcggcagaggcggcugggacugcaucaugaccagcuaccaguaccugaucauccagaacaccaccugggaggaccacugccaguucagcagacccagccccaucggcuaccugggccugcugagccagagaaccagagacaucuacaucagcagaagacugcugggcaccuucaccuggacccugagcgacagcgagggcaaggacacccccggcggcuacugccugaccagauggaugcugaucgaggccgagcugaagugcuucggcaacaccgccguggccaagugcaacgagaagcacgacgaggaguucugcgacaugcugagacuguucgacuucugcaagcaggccauccagagacugaaggcccccgcccagaugagcauccagcugaucaacaaggccgugaacgcccugaucaacgaccagcugaucaugaagaaccaccugagagacaucaugggcauccccuacugcaacuacagcaaguacugcuaccugaaccacaccgugaccggcaagaccagccugcccaagugcugccuggugagcaacggcagcuaccugaacgagacccacuucagcgacgacaucgagcagcaggccgacaacaugaucaccgagaugcugcagaaggaguacauggagagacagggcaagaccccccugggccugguggaccuguucguguucagcaccagcuucuaccugaucagcaucuuccugcaccuggugaagauccccacccacagacacguggugggcaagcccugccccaagccccacagacugaaccacaugggcaucugcagcugcggcuucuacaagcagcccggcgugcccgugagauggaagagaugaggacuagucccuguucccagagcccacuuuuuuuucuuuuuuugaaauaaaauagccugucuuucagaucucaaaggcucuuuucagagccaccaaaaaaaaaaaaaaaaaaaaaaaaaaaaaaaaaaaaaaaaaaaaaaaaaaaaaaaaaaaaaaaaaaaaaaaaaaaaaaaaaaaaaaaaaaaaaaaaaaaaa

SEQ ID NO: 33508 - RNA, 1748 nt, Artificial Sequence
  mRNA product Design a-1 (hSL-A100) comprising derived and/or modified sequence from LASV(Z0947-SLE-2011;Clade IV)__AIT17840__GPCmut8 (opt4)
aggagagucccgcagucggcguccagcggcucugcuuguucgugugugugucguugcaggccuuauucaagcuuaccaugggccagaucgugaccuucuuccaggaggugccccacgugaucgaggaggugaugaacaucgugcugaucgcccugagcauccuggccgugcugaagggccuguacaacuucgccaccugcggccuggugggccuggugaccuuccugcugcugugcggcagaagcugcaccaucagccuguacaagggcguguacgagcugcagacccuggagcugaacauggagacccugaacaugugcaugccccugagcugcaccaagaacaacagccaccacuacaucauggugggcaacgagaccggccuggagcugacccugaccaacaccagcaucaucaaccacaaguucugcaaccugagcgacgcccacaagaagaaccuguacgaccacgcccugaugagcaucaucagcaccuuccaccugagcauccccaacuucaaccaguacgaggccaugagcugcgacuucaacggcggcaagaucagcgugcaguacaaccugagccacagcuacgccggcgacgccgccaaccacugcggcaccguggccaacggcgugcugcagaccuucaugagaauggccuggggcggcagcuacaucgcccuggacagcggcagagacagaugggacugcaucaugaccagcuaccaguaccugaucauccagaacaccaccugggaggaccacugccaguucagcagacccagccccaucggcuaccugggccugcugagccagagaaccagagacaucuacaucagcagaagacugcugggcaccuucaccuggacccugagcgacagcgagggcaaggacacccccggcggcuacugccugaccagauggaugcugaucgaggccgagcugaagugcuucggcaacaccgccguggccaagugcaacgagaagcacgacgaggaguucugcgacaugcugagacuguucgacuucugcaagcaggccauccagagacugaaggcccccgcccagaugagcauccagcugaucaacaaggccgugaacgcccugaucaacgaccagcugaucaugaagaaccaccugagagacaucaugggcauccccuacugcaacuacagcaaguacugcuaccugaaccacaccaccaccggcaagaccagccugcccaagugcugccuggugagcaacggcagcuaccugaacgagacccacuucagcgacgacaucgagcagcaggccgacaacaugaucaccgagaugcugcagaaggaguacauggagagacagggcaagaccccccugggccugguggaccuguucguguucagcaccagcuucuaccugaucagcaucuuccugcaccuggugaagauccccacccacagacacaucgugggcaagcccugccccaagccccacagacugaaccacaugggcaucugcagcugcggccuguacaagcagcccggcgugcccgugaaguggaagagaugaggacuagucccuguucccagagcccacuuuuuuuucuuuuuuugaaauaaaauagccugucuuucagaucucaaaggcucuuuucagagccaccaaaaaaaaaaaaaaaaaaaaaaaaaaaaaaaaaaaaaaaaaaaaaaaaaaaaaaaaaaaaaaaaaaaaaaaaaaaaaaaaaaaaaaaaaaaaaaaaaaaaa

SEQ ID NO: 33509 - RNA, 1748 nt, Artificial Sequence
  mRNA product Design a-1 (hSL-A100) comprising derived and/or modified sequence from LASV(Josiah;Clade IV)__NP_694870__GPCmut8 (opt5)
aggagagucccgcagucggcguccagcggcucugcuuguucgugugugugucguugcaggccuuauucaagcuuaccaugggccagaucgugaccuucuuucaagaggucccccacguuauugaagaggugaugaacaucgugcugauugcccucagcguccuggcugugcuuaaggggcuguacaauuucgccacaugcggacucguuggccuggugacguuucuucugcucugugggagauccugcaccacaucucuguauaaaggagucuacgaacugcagacccucgagcugaacauggaaacacuuaauauguguaugccucugagcugcaccaagaacaauucccaucacuauaucauggugggcaacgagacagggcucgagcugacccuuacgaauaccucuauuaucaaccauaaauucuguaaucugagcgacgcgcacaagaaaaaccucuacgaucaugcucugauguccaucauuucuacauuucaccugagcaucccgaauuucaaccaguaugaagccauguccugcgacuuuaauggaggcaagauuagcguucaguacaaccucucucacuccuaugccggcgaugcugccaaucauugugggaccguggcuaacggaguccugcaaacauucaugcggauggccuggggcgggagcuacaucgcgcuugacucuggacgcggcaacugggauugcauuaugaccuccuaccaguaucugaucauucagaauacgacaugggaggaccacugucaguuuagcagacccucuccuaucggguaccucggacugcuuucccaacggacccgcgauaucuauauuagcagacggcugcucggcacauucaccuggacccuguccgacucugaaggcaaggauacacccgggggauacugccugacgcgcuggaugcucaucgaggccgagcugaaauguuuuggcaacaccgcuguggccaagugcaaugaaaaacaugacgaggaguucugcgauaugcuuagacuguuugacuucuguaagcaggcuauucagcggcucaaagccccugcgcagaugagcauccaacugauuaacaaggccgugaaugcucuuaucaacgaucagcugaucaugaagaaucaccuccgcgacauuauggggauccccuauugcaacuacuccaaauauuguuaccugaaucacacaaccacaggaagaaccagccugccuaagugcugucucgucucuaacggcuccuaccugaaugaaacgcauuucagcgacgauauugaacagcaagccgacaacaugaucacagagaugcuucagaaagaguauauggaacggcaggggaagaccccgcugggacucguugaucuguuuguguucucuaccagcuuuuaccugauuuccaucuuccuucaccucgugaaaauccccacacaucgccacauugucggcaagucuugcccuaaaccccauagacugaaucacaugggcaucuguagcugcgggcuguauaagcagccuggagugcccguuaaguggaaacggugaggacuagucccuguucccagagcccacuuuuuuuucuuuuuuugaaauaaaauagccugucuuucagaucucaaaggcucuuuucagagccaccaaaaaaaaaaaaaaaaaaaaaaaaaaaaaaaaaaaaaaaaaaaaaaaaaaaaaaaaaaaaaaaaaaaaaaaaaaaaaaaaaaaaaaaaaaaaaaaaaaaaa

SEQ ID NO: 33510 - RNA, 1745 nt, Artificial Sequence
  mRNA product Design a-1 (hSL-A100) comprising derived and/or modified sequence from LASV(LP;Clade I)__AAF86701__GPCmut8 (opt5)
aggagagucccgcagucggcguccagcggcucugcuuguucgugugugugucguugcaggccuuauucaagcuuaccaugggccagaucauuaccuucuuucaagaggugccccacgucaucgaagagguuaugaacauugugcugaucgcccucagccugcuugcuauucugaaggggcucuacaauaucgccacaugcggaaucauuggccugguggcguuccuuuuucugugugggaaauccugcucucucacgcugaagggaggcuaugaacugcagacccucgagcugaacauggaaacacuuaauauguguaugccucugagcugcaccaaaaacuccucucaucacuacaucagagucgggaaugagacaggacucgagcugacccuuacaaacaccagcauuaucaaucauaaguucuguaaccuguccgacgcucacaaaaagaaucucuaugaucaugcccugaugucuauuaucagcacguuucaccuguccauuccgaacuucaaucaguacgaagccaugagcugcgacuuuaacggcggcaagaucucugugcaguauaaucucucccacagcuacgcuggggaugccgcugagcauuguggaaccguugccaacggcgugcugcaaacauucaugcggauggcguggggagggcgcuauaucgcccuugacucuggcaaagggaauugggauugcauuaugaccuccuaccaguaccugaucauucagaacacaaccugggaagaccacugucaguuuagcagacccucuccuaucggauaucucggccugcuuucccaacggacgcgcgauauuuacaucagcagacggcugcucggcacauucaccuggacacuguccgacucugaggggaacgagacccccggaggcuauugccugacccgcuggaugcucaucgaagcugagcugaaguguuuugggaauacagccgucgcuaaaugcaacgaaaagcaugaugaggaguucugcgacaugcuuagacuguuugauuucuguaaacaggccauucggcgccucaaggcgccugcccagaugagcauccagcugauuaauaaggcugugaacgcccuuaucaaugaccaacugauuaugaaaaaccaccucagagauaucaugggaauccccuacugcaauuauuccaaguacuguuaucugaaccacacgagcucuggccggaccucccugccuaaaugcugucucauuagcaaugggucuuaccugaacgaaacacaguucagcgacgacaucgagcagcaagcugauaauaugauuaccgaaaugcuucagaaggaguacaucgaacgccagggaaaaacaccgcugggccucguugacauuuuuaucuucuccaccucuuuuuaucugauuagcaucuuccugcaucuuaucaagauucccacgcacagacauaucgugggcaaaccuugccccaagccucaccggcucaaccauaugggggucuguuccugcggacuguacaagcaccccggcgugccgacaaaauggaagcgcugaggacuagucccuguucccagagcccacuuuuuuuucuuuuuuugaaauaaaauagccugucuuucagaucucaaaggcucuuuucagagccaccaaaaaaaaaaaaaaaaaaaaaaaaaaaaaaaaaaaaaaaaaaaaaaaaaaaaaaaaaaaaaaaaaaaaaaaaaaaaaaaaaaaaaaaaaaaaaaaaaaaaa

SEQ ID NO: 33511 - RNA, 1745 nt, Artificial Sequence
  mRNA product Design a-1 (hSL-A100) comprising derived and/or modified sequence from LASV(803213;Clade II)__AAF86703__GPCmut8 (opt5)
aggagagucccgcagucggcguccagcggcucugcuuguucgugugugugucguugcaggccuuauucaagcuuaccaugggccagaucauuaccuucuuucaagaggugccccacgucaucgaagagguuaugaacauugugcugaucgcccucagccugcuugcuauucugaaggggaucuacaauguggccacaugcggacucuucggccugaucuccuuucuucugcucugugggagaucuugcagcgucacguauaaaggaguguacgaacugcagacccuggagcucaacauggcgaaucugaacauguguaugccucuuuccugcacaaagaauaacucucaucacuauauuaugguuggcaaugaaaccgggcuggagcucacacugaccaacacaagcaucauuaaucauaaauucuguaaccuuuccgacgcucacaagaaaaaucuguacgaucaugcccucaugucuaucauuagcaccuuucaccuguccaucccgaacuucaaucaguaugaggccaugagcugcgacuuuaacggaggcaagauuucugugcaguacaaucugucccacagcuucgcugucgaugccgcuaaccauuguggcacgaucgccaacggggugcuccaaaccuuuaugcggauggcguggggaggcucuuauaucgcccuggacuccgggaagggaaauugggauugcauuaugacaagcuaccaguaccuuaucauucagaacaccacaugggaagaccacugucaguucucucgccccuccccuaucggcuaucuggggcuccugagccaaagaacccgggauauuuacaucucccgcagacuucugggaacguuuacauggacccucucugacagcgagggcaaugaagcucccggcggguauugccugacacgguggaugcugaucgaggccgagcucaaauguuucggaaacaccgcuguugccaagugcaaugaaaaacaugaugaggaauuuugcgacaugcugcgccuuuucgauuucuguaagcaggcgauuaaaagacugaagaccccugcccagauguccauccagcucauuaacaaggcugugaaugcccugaucaacgaccaacuuauuaugaaaaaucaucugcgggauaucaugggcauccccuacugcaacuauagccgcuacuguuaucucaaucacacagucacggggaagaccucucugccuagaugcugucugguguccaacggaagcuaccucaaugagacacacuuuucugacgacauugaacagcaggcugauaacaugaucaccgagaugcugcaaaaagaguacauggaccggcagggcaagacaccgcuugggcugguggaucucuucgucuuuagcaccuccuucuaucugauuucuaucuuucugcaccuuguuaaaauucccacgcaucgccacaucgugggaaagccuugccccaaaccucauagacucaaucacaugggcauuuguagcugcggccuguacaagcaccccggggugccggucaaguggaaacggugaggacuagucccuguucccagagcccacuuuuuuuucuuuuuuugaaauaaaauagccugucuuucagaucucaaaggcucuuuucagagccaccaaaaaaaaaaaaaaaaaaaaaaaaaaaaaaaaaaaaaaaaaaaaaaaaaaaaaaaaaaaaaaaaaaaaaaaaaaaaaaaaaaaaaaaaaaaaaaaaaaaaa

SEQ ID NO: 33512 - RNA, 1745 nt, Artificial Sequence
  mRNA product Design a-1 (hSL-A100) comprising derived and/or modified sequence from LASV(GA391;Clade III)__CAA36645__GPCmut8 (opt5)
aggagagucccgcagucggcguccagcggcucugcuuguucgugugugugucguugcaggccuuauucaagcuuaccaugggccagaucgugaccuucuuucaagaggucccccacguuauugaagaggugaugaacaucgugcugauugcccucagcauccuggcuauucuuaaggggcuguacaaugucgccacaugcggacucaucggccuggugacguuccuucugcucuccgggagaucuuguagccugaucuauaaaggaaccuacgaacugcagacacucgagcugaacauggaaacccuuaauaugugcaugccucuguccuguacaaagaacaauucucaucacuauauucggguuggcaacgagaccgggcucgagcugacacuuaccaauacgagcauccugaaccauaaauuuugcaaucucuccgacgcgcacaagcgcaaccuguacgaucauucucugaugagcauuaucuccaccuuccaccucagcauuccgaauuuuaaccaguaugaagcuaugucuugugacuucaauggaggcaaaaucacagugcaguacaaccugucccacagcuuugccgucgaugccgcuggccauugcgggacccuugccaauggagugcugcaaacauucaugagaauggcuuggggcgggucuuauauugcccucgacuccggacggggcaacugggauuguaucaugaccagcuaccaguaccugaucauucagaacacgacaugggacgaucacugccaguuuucucgccccuccccuaucggguaucuuggacugcucagccaaagaacccgggacauuuacaucucccgcagacugcugggcacauucaccuggacccucucugauagcgagggcaaugaaacacccgggggauauugucugacgcgguggaugcuuauugaggcggagcugaagugcuuuggcaacaccgccguugcuaaguguaaugaaaaacaugacgaggaguucugcgauaugcuccgccuguuugacuucugcaagcaggccaucagacggcuuaaaaccccugcucagauguccauccagcugauuaacaaggccgugaaugcgcucaucaacgaucaacugauuaugaaaaaucaucugcgcgacaucauggggauucccuacuguaacuauagcagauacugcuaucucaaucacacaucuacaggaaagaccucccugccucgguguugccuuaucagcaacggcucuuaccugaaugaaacgaaguucagcgacgauaucgaacagcaggccgacaacaugauuacagagaugcuccaaaaagaguacaucgaucgccaggggaagaccccgcugggacuggucgaccuuuuuguguucuccaccucuuuuuaucucauuagcaucuuccugcaccuggugaaaauucccacacacagacauaucgucggcaagccuugucccaaaccucaccggcucaaucauaugggcauuugcuccugugggcuguacaagcagcccggaguuccggugagauggaaacgcugaggacuagucccuguucccagagcccacuuuuuuuucuuuuuuugaaauaaaauagccugucuuucagaucucaaaggcucuuuucagagccaccaaaaaaaaaaaaaaaaaaaaaaaaaaaaaaaaaaaaaaaaaaaaaaaaaaaaaaaaaaaaaaaaaaaaaaaaaaaaaaaaaaaaaaaaaaaaaaaaaaaaa

SEQ ID NO: 33513 - RNA, 1748 nt, Artificial Sequence
  mRNA product Design a-1 (hSL-A100) comprising derived and/or modified sequence from LASV(AV;Clade V)__CCA30314__GPCmut8 (opt5)
aggagagucccgcagucggcguccagcggcucugcuuguucgugugugugucguugcaggccuuauucaagcuuaccaugggccagaucgugaccuucuuucaagaggucccccacguuauugaagaggugaugaacaucgugcugauugcccucagcauccuggcuguccuuaaggggcuguacaauauugccacaugcggacucaucggccugaucacguuccuucugcucugugggagauccugcucuagcaaccuguauaaaggaguguacgaacugcagucccucgaccugaauauggagacccuuaacauguguaugccucugucuugcacaaagaauaacagccaucacuauauucggguuggcaaugauaccgggcucgaacugacacuuaccaacacauccauccugaaucauaaauuuuguaaccucucugacgcgcacaagaaagaucuguacgaccaugcucugaugagcauuaucuccaccuuccaccucagcauuccgaauuuuaaccaguaugaggccaugucuugcgauuucaauggaggcaagaucuccgugcaguacaaccugagccacucuuaugccauugacgcugccaaucauuguggcacggucgcuaacgggauccuucaaaccuuuaugcgcauggccuggggaggcuccuacaucgcgcuggauagcgggagaggaaacugggacugcauuaugacaucuuaccaguaucucaucauucagaauaccacaugggagaaccacugucaguucucccggcccagcccuaucggcuaccuggggcuucugucccaacgcaccagagauauuuauaucucucggcgccuccugggaacguuuacauggacccugagcgacuccgaaggcaaugccacacccggcggguacugccucaccagauggaugcugaucgaggcugaacuuaaguguuucggaaacaccgccguggcuaaaugcaaugagaagcaugaugaggaauuuugcgacaugcugcgccucuucgauuuuuguaaacaggccauuagccggcugaagucuccugcgcagauguccauccagcuuauuaacaaagccguuaaugcucugaucaacgaccaacucauuaugaagaaucaccugagagacaucaugggcauccccuauugcaacuacagcaaguauuguuaccugaaucacacaauuacggggaaaaccucucucccuaagugcugucuggugagcaacggauccuaccuuaaugagacacauuucucugaugacaucgaacagcaggccgauaacaugauuaccgagaugcugcaaaaagaauauauggagcggcagggcaagacaccgcucgggcuggucgaccuguucguguuuagcaccuccuucuaccuuaucagcauuuuucuccgccuggugaaaauccccacgcacagacauauugucggaaagccuugccccaaaccucaccggcugaaucauaugggcaucuguucuugcggccucuauaagcagcccgggguuccggugcgcuggaagagaugaggacuagucccuguucccagagcccacuuuuuuuucuuuuuuugaaauaaaauagccugucuuucagaucucaaaggcucuuuucagagccaccaaaaaaaaaaaaaaaaaaaaaaaaaaaaaaaaaaaaaaaaaaaaaaaaaaaaaaaaaaaaaaaaaaaaaaaaaaaaaaaaaaaaaaaaaaaaaaaaaaaaa

SEQ ID NO: 33514 - RNA, 1745 nt, Artificial Sequence
  mRNA product Design a-1 (hSL-A100) comprising derived and/or modified sequence from LASV(Togo/2016/7082;Clade VI)__AMR44577__GPCmut8 (opt5)
aggagagucccgcagucggcguccagcggcucugcuuguucgugugugugucguugcaggccuuauucaagcuuaccaugggccagaucauuaccuucuuucaagaggugccccacgucaucgaagagguuaugaacauugugcugaucgcccucagccugcuugcuauucugaaggggguguacaaugucgccacaugcggaaucaucggccucgugacguuccuguuucuuugugggagauccugcucucugauuuauaaaggaagcuacgaacuccagacccuggagcugaacauggaaacacucaauauguguaugccucuguccugcaccaagaacucuagccaucacuauauccggguuggcaaugagacagggcuugagcugacccucacaaacaccuccauuaucaaucauaaauucuguaaccugucugacgcgcacaagcgcaaucuuuacgaucaugcucugaugagcauucucuccacguuucaccugagcaucccgaacuucaaucaguaugaagccaugucuugcgacuuuaacggaggcaaaauuuccgugcaguacaaucugagccacgccuaugcugucgaugccgcugagcauuguggcaccguggccaacgggguucuccaaacauucaugagaauggcguggggaggcucuuacaucgcccuggacuccgggcggggaaauugggauugcaucaugaccagcuaccaguaucuuauuauccagaacacaaccugggaagaccacugucaguuuucucgccccuccccuauuggcuaccuggggcuccugagccaaagaacgcgggauaucuauauuucccgcagacuucugggaacauucaccuggacacucucugacagcgagggcaacgagacccccggcggguacugccugacccgguggaugcugaucgaagcugagcucaaguguuuuggaaauacagccguggcuaagugcaacgaaaaacaugaugaggaguucugcgacaugcugcgccuuuuugauuucuguaagcaggccauccagagacugaaauccccugcgcagaugagcauucaacucaucaauaaggccgucaacgcucugauuaaugaccagcuuaucaugaaaaaccaucugcgggauaugaugggcauucccuauugcaauuacucuaaguauuguuaccucaaccacacguccagcgggcgcaccucucugccuaagugcugucuggugagcaauggauccuaccucaacgaaacacacuucucugacgacaucgagcagcaagccgauaauaugaucaccgaaaugcugcagaaagaguauauugacagacagggcaagacaccgcuugggcugguggaucucuuugucuucagcaccuccuuuuaccugaucagcauuuuccugcaccuuaucaaaauucccacgcaucggcacaucguuggaaagccuugccccaaaccucaucgccucaaccacaugggcauuuguucuugcggccuguauaagcagcccggggugccgacaagauggaaacggugaggacuagucccuguucccagagcccacuuuuuuuucuuuuuuugaaauaaaauagccugucuuucagaucucaaaggcucuuuucagagccaccaaaaaaaaaaaaaaaaaaaaaaaaaaaaaaaaaaaaaaaaaaaaaaaaaaaaaaaaaaaaaaaaaaaaaaaaaaaaaaaaaaaaaaaaaaaaaaaaaaaaa

SEQ ID NO: 33515 - RNA, 1745 nt, Artificial Sequence
  mRNA product Design a-1 (hSL-A100) comprising derived and/or modified sequence from LASV(KAK-428;Clade n.d. (VII))__ANH09740__GPCmut8 (opt5)
aggagagucccgcagucggcguccagcggcucugcuuguucgugugugugucguugcaggccuuauucaagcuuaccaugggccagaucgugaccuucuuucaagaggucccccacguuauugaagaggugaugaacaucgugcugauugcccucagccugcuugcuauccugaaggggcucuacaauuucgccacaugcggagucauuggccugaucacguuucuucugcucugugggagauccugcucugcgaccuauaaaggacaguacgaacugcagacacuggagcucaacauggaaagccugaauauguguaugccucuuuccugcaccaagaacaauucucaucacuauauccgggcuggcaacaauacagggcuggagcucacccugacaaacaccagcauuaucucccauaaauucuguaaucuuucugacgcccacaagaaaaaccuguacgaucauacgcucaugagcauuaucaccacauuucaccuguccauuccgaauuucaaccaguaugaggccaugagcugcgacuuuaauggaggcaagaucucuauucaauacaaccugucccacagcuaugcuggcgaugccgcucagcauugugggaccguggccaauggaguucuccagacauucaugcgcauggcguggggcgggucuuaccuggcccuugacuccggaagacggggcugggauugcaucaucagcucuuaccaguaucugauuauccaaaacaccacgugggacgaucacugucaguuuucccgccccagcccuauuggguaccucggauucgugucccagaagacaagagacaucuauauuucucggcgccugcuuggcaccuuuacauggacccugagcgauuccgaaggccaugacaugcccgggggauacugccucaccagauggaugcugaucgaggcugaucugaaauguuucggcaacacagccgucgcuaagugcaaugaaaaacacgacgaggaguuuugcgauauguggcgccucuucgacuucuguaagcaggccauccaacggcugaaagcgccugcccagaugaacauucagcuuaucaauaaggcugugaacgcccugauuaaugaccaacucaugaugaagaaccaccugagagauaucauggggauucccuauugcaauuacagcaaauuuuguuaucuuaacaauacgaccacaggacggaccucucugccucgcugcugucucaucuccaacggcagcuaccugaaugaaacacauuucucugacgauaucgagcagcaggcugacaacaugauuaccgaaaugcugcagaaggaguacauggauagacaagggaaaacgccgcucggacugguugaccuuuuuguguucagcacauccuuuuaucugaucaccauuuuccuccaccuggucaagauccccacccaucggcacauugugggcaaaccuugccccaagccucaucgccugaaucacaugggcaucuguucuugcgggcuuuacaaacagcccggagugccggucagauggaagcggugaggacuagucccuguucccagagcccacuuuuuuuucuuuuuuugaaauaaaauagccugucuuucagaucucaaaggcucuuuucagagccaccaaaaaaaaaaaaaaaaaaaaaaaaaaaaaaaaaaaaaaaaaaaaaaaaaaaaaaaaaaaaaaaaaaaaaaaaaaaaaaaaaaaaaaaaaaaaaaaaaaaaa

SEQ ID NO: 33516 - RNA, 1745 nt, Artificial Sequence; identical to SEQ ID NO: 33510
  mRNA product Design a-1 (hSL-A100) comprising derived and/or modified sequence from LASV(Pinneo-NIG-1969;Clade I)__AIT17836__GPCmut8 (opt5)

SEQ ID NO: 33517 - RNA, 1745 nt, Artificial Sequence
  mRNA product Design a-1 (hSL-A100) comprising derived and/or modified sequence from LASV(ISTH0009-NIG-2011;Clade II)__AIT17404__GPCmut8 (opt5)
aggagagucccgcagucggcguccagcggcucugcuuguucgugugugugucguugcaggccuuauucaagcuuaccaugggccagaucauuaccuucuuucaagaggugccccacgucaucgaagagguuaugaacauugugcugaucgcccucagccugcuugcuauucugaaggggaucuacaauguggccacaugcggacucuucggccuggucuccuuucuucugcucugugggagaucuugcagcacgaccuauaaaggaguguacgaacugcagacacuggagcucgacauggcgucccugaacauguguaugccucuuucuugcaccaagaauaacagccaucacuauaucaugguuggcaaugaaacagggcuggagcucacccugacaaacaccuccauuaucaaucauaaauucuguaaccuuucugaugcucacaagaaaaaucuguacgaccaugcccucaugagcauuaucuccacguuucaccugagcauuccgaacuucaaucaguaugaggccaugucuugcgauuuuaacggaggcaagaucuccgugcaguacaaucugagccacgcuuaugccgucgacgcugccaaccauuguggcaccauugcgaauggggugcuccaaacauucaugcggauggccuggggaggcucuuacaucgcucuggauuccgggaagggaagcugggacugcaucaugaccucuuaccaguaucuuauuauccagaacacaaccugggaagaucacugucaguuuucccgccccagcccuauuggcuaccuggggcuccugucccaaagaacgcgggacaucuauauuucucgcagacuucugggaacauucaccuggacacucagcgauuccgagggcaacgaaacccccggcggguacugccugacccgguggaugcugaucgaggccgagcucaaauguuuuggaaauacagcuguugccaagugcaacgaaaaacaugacgaggaguucugcgauaugcugcgccuuuuugacuucuguaagcaggcgaucagacggcugaaaacgccugcccagaugagcauucagcucaucaauaaggcugugaacgcccugauuaaugaucaacuuaucaugaagaaccaucugcgcgacauuaugggcauccccuauugcaauuacucuaaauauuguuaccucaaccacaccgucacagggaagaccucccugccuagaugcugucuggugagcaauggaucuuaccucaacgaaacacacuucagcgacgauaucgaacagcaggcugacaauaugauuaccgagcugcuucaaaaagaguauauggaucggcagggcaagacgccgcuggggcucguggaccuguuugucuucuccacaucuuuuuaccugaucagcauuuuccuucaccucaucaaaauucccacccaucgccacaucaccggaaagccuugccccaaaccucauagacugaaccacaugggcauuuguuccugcggccuguauaagcaccccgggguuccggugaaguggaaacggugaggacuagucccuguucccagagcccacuuuuuuuucuuuuuuugaaauaaaauagccugucuuucagaucucaaaggcucuuuucagagccaccaaaaaaaaaaaaaaaaaaaaaaaaaaaaaaaaaaaaaaaaaaaaaaaaaaaaaaaaaaaaaaaaaaaaaaaaaaaaaaaaaaaaaaaaaaaaaaaaaaaaa

SEQ ID NO: 33518 - RNA, 1745 nt, Artificial Sequence
  mRNA product Design a-1 (hSL-A100) comprising derived and/or modified sequence from LASV(ISTH2010-NIG-2012;Clade II)__AIT17482__GPCmut8 (opt5)
aggagagucccgcagucggcguccagcggcucugcuuguucgugugugugucguugcaggccuuauucaagcuuaccaugggccagaucauuaccuucuuucaagaggugccccacgucaucgaagagguuaugaacauugugcugaucgcccucagccugcuugcuauucugaaggggaucuacaauguggccacaugcggacucuucggccuggucuccuuucuucugcucugugggagaucuugcagcacgaccuauaaaggaguguacgaacugcagacacuggagcucgacauggcgucccugaacauguguaugccucuuucuugcaccaagaauaacagccaucacuauaucaugguuggcaaugaaacagggcuggagcucacccugacaaacaccuccauuaucaaucauaaauucuguaaccuuucugaugcucacaagaaaaaucuguacgaccaugcccucaugagcauuaucuccacguuucaccugagcauuccgaacuucaaucaguaugaggccaugucuugcgauuuuaacggaggcaagaucuccgugcaguacaaucugagccacgcuuaugccgucgacgcugccaaccauuguggcaccauugcgaauggggugcuccaaacauucaugcggauggccuggggaggcucuuacaucgcucuggauuccgggaagggaagcugggacugcaucaugaccucuuaccaguaucuuauuauccagaacauuacaugggaagaucacugucaguuuucccgccccagcccuaucggcuaccuggggcuccugucccaaagaacccgggacauuuauaucucucgcagacuucugggaacguucacauggacccucagcgauuccgagggcaacgaaacacccggcggguacugccugacccgguggaugcugaucgaggccgagcucaaauguuuuggaaauaccgcuguugccaagugcaacgaaaaacaugacgaggaguucugcgauaugcugcgccuuuuugacuucuguaagcaggcgauuagacggcugaaaacgccugcccagaugagcauccagcucauuaauaaggcugugaacgcccugaucaaugaucaacuuauuaugaagaaccaucugcgcgacaucaugggcauccccuauugcaauuacucuaaauauuguuaccucaaccacacagucaccgggaagacaucccugccuagaugcugucuggugagcaauggaucuuaccucaacgaaacccacuucagcgacgauauugaacagcaggcugacaauaugaucacagagcugcuucaaaaagaguauauugaucggcagggcaagaccccgcuggggcucguggaccuguuugucuucuccacgucuuuuuaccugaucagcauuuuccuucaccucguuaaaauccccacacaucgccacguggugggaaagccuugccccaaaccucauagacugaaccacaugggcauuuguuccugcggccuguauaagcaccccggggucccggugaaguggaaacggugaggacuagucccuguucccagagcccacuuuuuuuucuuuuuuugaaauaaaauagccugucuuucagaucucaaaggcucuuuucagagccaccaaaaaaaaaaaaaaaaaaaaaaaaaaaaaaaaaaaaaaaaaaaaaaaaaaaaaaaaaaaaaaaaaaaaaaaaaaaaaaaaaaaaaaaaaaaaaaaaaaaaa

SEQ ID NO: 33519 - RNA, 1745 nt, Artificial Sequence
  mRNA product Design a-1 (hSL-A100) comprising derived and/or modified sequence from LASV(Lassa virus/H.sapiens-wt/NGA/2015/ISTH_0543;Clade II)__AVO03639__GPCmut8 (opt5)
aggagagucccgcagucggcguccagcggcucugcuuguucgugugugugucguugcaggccuuauucaagcuuaccaugggccagaucauuaccuucuuucaagaggugccccacgucaucgaagagguuaugaacauugugcugaucgcccucagccugcuugcuauucugaaggggaucuacaauguggccacaugcggacucuucggccuggucuccuuucuucugcucugugggagaucuugcagcacgaccuauaaaggaguguacgaacugcagacacuggagcucgacauggcgaaccugaauauguguaugccucuuuccugcaccaagaacaauucucaucacuauaucaugguuggcaacgaaacagggcuggagcucacccugacaaauaccagcauuaucaaccauaaauucuguaaucuuuccgaugcucacaagaaaaaccuguacgaccaugcccucaugucuauuaucagcacguuucaccuguccauuccgaauuucaaccaguaugaggccaugagcugcgauuuuaauggaggcaagaucucugugcaguacaaccugucccacaccuaugcugucgacgccgcuaaucauuguggcacaauugccaacggggugcuccaaaccuucaugcggauggcguggggaggcagcuacaucgcccuggauucugggaagggauccugggacugcaucaugacaagcuaccaguaucuuguuauucagaacaccacgugggaagaucacugucaguuuucucgccccuccccuaucggcuaccuggggcuccugagccaaagaacacgggacauuuauaucucccgcagacuucugggaaccuucacauggacccucucugauagcgagggcaaugaaacccccggcggguacugccugacacgguggaugcugauugaggcugagcucaaauguuuuggaaacacggccguggcuaagugcaaugaaaaacaugacgaggaguucugcgauaugcugcgccuuuuugacuucuguaagcaggccaucagacggcugaaaaccccugcgcagauguccauccagcucauuaacaaggccgucaaugcucugaucaacgaucaacuuauuaugaagaaucaucugcgcgacaucaugggcauucccuauugcaacuacagcaaauauuguuaccucaaucacacagugaccgggaagacaucucugccuagaugcugucugguguccaacggaagcuaccucaaugaaacccacuucucugacgauaucgaacagcaggccgacaacaugaucacggagcugcuucaaaaagaguauauugaucggcagggcaagacaccgcuggggcucgucgaccuguuuguuuucagcaccuccuuuuaccugaucucuauuuuccuucaccucgugaaaauccccacccaucgccacauuacaggaaagccuugccccaaaccucauagacugaaucacaugggcaucuguagcugcggccuguauaagcaccccggggugccggucaaguggaaacggugaggacuagucccuguucccagagcccacuuuuuuuucuuuuuuugaaauaaaauagccugucuuucagaucucaaaggcucuuuucagagccaccaaaaaaaaaaaaaaaaaaaaaaaaaaaaaaaaaaaaaaaaaaaaaaaaaaaaaaaaaaaaaaaaaaaaaaaaaaaaaaaaaaaaaaaaaaaaaaaaaaaaa

SEQ ID NO: 33520 - RNA, 1745 nt, Artificial Sequence
  mRNA product Design a-1 (hSL-A100) comprising derived and/or modified sequence from LASV(Lassa virus/H.sapiens-wt/NGA/2016/ISTH_0009;Clade II)__AVO03571__GPCmut8 (opt5)
aggagagucccgcagucggcguccagcggcucugcuuguucgugugugugucguugcaggccuuauucaagcuuaccaugggccagaucauuaccuucuuucaagaggugccccacgucaucgaagagguuaugaacauugugcugaucgcccucagccugcuugcuauucugaaggggaucuacaauguggccacaugcggacuccugggccuugucuccuuccugcuccugugugggagaucuugcagcacgaccuauaaaggaguguacgaacugcagacacucgagcuggacauggcgucccuuaacauguguaugccucugucuugcaccaagaauaacagccaucacuauaucaugguuggcaaugaaacagggcucgagcugacccuuacaaacaccuccauuaucaaucauaaauuuuguaaccugucugaugcucacaagaaaaaucucuacgaccaugcccugaugagcauuaucuccacguuccaccugagcauuccgaacuuuaaucaguaugaggccaugucuugcgauuucaacggaggccggaucuccgugcaguacaaucucagccacucuuaugcugucgacgccgcuaaccauuguggcaccauugccaauggggugcugcaaacauuuaugcgcauggcguggggaggcuccuacaucgcccuugauagcgggaagggaucuugggacugcaucaugaccuccuaccaguaucugauuauccagaacacaaccugggaagaucacugucaguucagcagacccuccccuauuggcuaccucgggcugcuuucucaacggacgcgcgacaucuauauuagcagacggcugcucggaacauuuaccuggacacuguccgauagcgagggcaacgaaacccccggcggguacugccugacccgcuggaugcucaucgaggcugagcugaaguguuucggaaauacagccguugcuaaaugcaacgaaaagcaugacgaggaauuuugcgauaugcuuagacuguucgacuuuuguaaacaggccauccggcgccucaagacgccugcgcagaugucuauucagcugaucaauaaagccgugaacgcucuuauuaaugaucaacugaucaugaagaaccaccucagagacauuaugggcauccccuauugcaauuacuccaaguauuguuaccugaaccacaccgucacagggaaaaccagccugccucggugcugucucgugucuaauggaagcuaccugaacgagacacauuucuccgacgauaucgaacagcaggccgacaauaugauuaccgagcuucugcaaaaggaguauaucgaucgccagggcaaaacgccgcucgggcugguggaccuguucgucuuuucuaccagcuucuaccuuauuuccaucuuucuccaccugguuaagauucccacacauagacacaucaccggaaaaccuugccccaagccucaucggcugaaccacaugggcauuuguagcugcggccucuauaaucaccccggggugccggugaaauggaagcgcugaggacuagucccuguucccagagcccacuuuuuuuucuuuuuuugaaauaaaauagccugucuuucagaucucaaaggcucuuuucagagccaccaaaaaaaaaaaaaaaaaaaaaaaaaaaaaaaaaaaaaaaaaaaaaaaaaaaaaaaaaaaaaaaaaaaaaaaaaaaaaaaaaaaaaaaaaaaaaaaaaaaaa

SEQ ID NO: 33521 - RNA, 1745 nt, Artificial Sequence
  mRNA product Design a-1 (hSL-A100) comprising derived and/or modified sequence from LASV(Lassa virus/H.sapiens-wt/NGA/2016/ISTH_0017;Clade II)__AVO03567__GPCmut8 (opt5)
aggagagucccgcagucggcguccagcggcucugcuuguucgugugugugucguugcaggccuuauucaagcuuaccaugggccagaucauuaccuucuuucaagaggugccccacgucaucgaagagguuaugaacauugugcugaucgcccucagccugcuugcuauucugaaggggaucuacaauguggccacaugcggacucuucggccuggucuccuuucuucugcucugugggagaucuugcagcacgaccuauaaaggaguguacgaacugcagacacuggagcucgacauggcgucccugaacauguguaugccucuuucuugcaccaagaauaacagccaucacuauaucaugguuggcaaugaaacagggcuggagcucacccugacaaacaccuccauuaucaaucauaaauucuguaaccuuucugaugcucacaagaaaaaucuguacgaccaugcccucaugagcauuaucuccacguuucaccugagcauuccgaacuucaaucaguaugaggccaugucuugcgauuuuaacggaggcaagaucuccgugcaguacaaucugagccacaccuaugcuauugacgccgcuaaccauuguggcacaaucgccaaugggguccuccaaaccuucaugcggauggcguggggaggcucuuacaucgcccuggauuccgggaagggaagcugggacugcauuaugacaucuuaccaguaucuuaucauucagaacaccacgugggaagaucacugucaguuuucccgccccagcccuaucggcuaccuggggcuccugucccaaagaacacgggacauuuauaucucucgcagacuucugggaaccuucacauggacccucagcgauuccgagggcaacgaaacccccggcggguacugccugacacgguggaugcugaucgaggcugagcucaaauguuuuggaaauacggccguggcuaagugcaacgaaaaacaugacgaggaguucugcgauaugcugcgccuuuuugacuucuguaagcaggccauuagacggcugaaaaccccugcgcagaugagcauccagcucauuaauaaggccguuaacgcucugaucaaugaucaacuuauuaugaagaaccaucugcgcgacaucaugggcauccccuauugcaauuacucuaaauauuguuaccucaaccacacagugaccgggaagacaucccugccuagaugcugucuggucagcaauggaucuuaccucaacgaaacccacuucagcgacgauauugaacagcaggccgacaauaugaucacggagcugcuucaaaaagaguauauggaucggcagggcaagacaccgcuggggcucguggaccuguuuguguucuccaccucuuuuuaccugauuagcaucuuccuucaccucguccgcauucccacccauagacacguuaucggaaaaccuugccccaagccucaucggcugaaccacaugggcauuuguuccugcggccuguauaaacaccccggggugccggugaaguggaagcgcugaggacuagucccuguucccagagcccacuuuuuuuucuuuuuuugaaauaaaauagccugucuuucagaucucaaaggcucuuuucagagccaccaaaaaaaaaaaaaaaaaaaaaaaaaaaaaaaaaaaaaaaaaaaaaaaaaaaaaaaaaaaaaaaaaaaaaaaaaaaaaaaaaaaaaaaaaaaaaaaaaaaaa

SEQ ID NO: 33522 - RNA, 1745 nt, Artificial Sequence
  mRNA product Design a-1 (hSL-A100) comprising derived and/or modified sequence from LASV(Lassa virus/H.sapiens-wt/NGA/2018/ISTH_0959;Clade II)__AVV65099__GPCmut8 (opt5)
aggagagucccgcagucggcguccagcggcucugcuuguucgugugugugucguugcaggccuuauucaagcuuaccaugggccagaucauuaccuucuuucaagaggugccccacgucaucgaagagguuaugaacauugugcugaucgcccucagccugcuugcuauucugaaggggaucuacaauguggucacaugcggacucuucggccugguguccuuucuucugcucugugggagaucuugcagcacgaccuauaaaggaguuuacgaacugcagacacuggagcucgacauggccucccugaacauguguaugccucuuucuugcaccaagaauaacagccaucacuauaucauggugggcaaugaaacagggcuggagcucacccugacaaacaccuccauuaucaaucauaaauucuguaaccuuucugaugcgcacaagaaaaaucuguacgaccaugcucucaugagcauuaucuccacguuucaccugagcauuccgaacuucaaucaguaugaggccaugucuugcgauuuuaacggaggcaagaucuccguccaguacaaucugagccacgccuaugcuauugacgccgcuaaccauuguggcaccaucgccaauggggugcuccaaacauucaugcggauggcguggggaggcucuuacaucgcccuggauuccgggaagggaagcugggacugcauuaugaccucuuaccaguaucuuaucauucagaacacaaccugggaagaucacugucaguuuucccgccccagcccuaucggcuaccuggggcuccugucccaaagaacgcgggacauuuauaucucucgcagacuucugggaacauucaccuggacacucagcgauuccgagggcaacgaaacccccggcggguacugccugacccgguggaugcugaucgaggcugagcucaaauguuuuggaaauacagccguugcuaagugcaacgaaaaacaugacgaggaguucugcgauaugcugcgccuuuuugacuucuguaagcaggccauuagacggcugaaaacgccugcgcagaugagcauccagcucauuaauaaggccgugaacgcucugaucaaugaucaacuuauuaugaagaaccaucugcgcgacaucaugggcauccccuauugcaauuacucuaaauauuguuaccucaaccacaccgucacagggaagaccucccugccuagaugcugucuggugagcaauggaucuuaccucaacgaaacacacuucagcgacgauauugaacagcaggccgacaauaugaucaccgagcugcuucaaaaagaguauauugaucggcagggcaagacgccgcuggggcucguggaccuguuugucuucuccacaucuuuuuaccugaucagcauuuuccuucaccucguuaaaauccccacccaucgccacgugauuggaaagccuugccccaaaccucauagacugaaccacaugggcaucuguuccugcggccuguauaagcaccccggggugccggucaaguggaaacggugaggacuagucccuguucccagagcccacuuuuuuuucuuuuuuugaaauaaaauagccugucuuucagaucucaaaggcucuuuucagagccaccaaaaaaaaaaaaaaaaaaaaaaaaaaaaaaaaaaaaaaaaaaaaaaaaaaaaaaaaaaaaaaaaaaaaaaaaaaaaaaaaaaaaaaaaaaaaaaaaaaaaa

SEQ ID NO: 33523 - RNA, 1745 nt, Artificial Sequence
  mRNA product Design a-1 (hSL-A100) comprising derived and/or modified sequence from LASV(LASV003-NIG-2008;Clade II)__AIT17580__GPCmut8 (opt5)
aggagagucccgcagucggcguccagcggcucugcuuguucgugugugugucguugcaggccuuauucaagcuuaccaugggccagaucauuaccuucuuucaagaggugccccacgucaucgaagagguuaugaacauugugcugaucgcccucagccugcuugcuauucugaaggggaucuacaauguggccacaugcggacucuucggccuggucuccuuucuucugcucugugggagaucuugcagcacgaccuauaaaggaguguacgaacugcagacacuggagcucgacauggcgucccugaacauguguaugccucuuucuugcaccaagaauaacagccaucacuauaucaugguuggcaaugaaacagggcuggagcucacccugacaaacaccuccauuaucaaucauaaauucuguaaccuuucugaugcucacaagaaaaaucuguacgaccaugcccucaugagcauuaucuccacguuucaccugagcauuccgaacuucaaucaguaugaggccaugucuugcgauuuuaacggaggcaagaucuccgugcaguacaaucugagccacaccuaugcugucgacgccgcuaaccauuguggcacaauugccaauggggugcuccaaaccuucaugcggauggcguggggaggcucuuacaucgcccuggauuccgggaagggaagcugggacugcaucaugacaucuuaccaguaucuuauuauccagaacaccacgugggaagaucacugucaguuuucccgccccagcccuauuggcuaccuggggcuccugucccaaagaacacgggacaucuauauuucucgcagacuucugggaaccuucacauggacccucagcgauuccgagagcaacgaaacccccggcggcuacugccugacacgguggaugcugaucgaggcugagcucaaauguuuugggaauacggccguugcuaagugcaacgaaaaacaugacgaggaguucugcgauaugcugcgccuuuuugacuucuguaagcaggccaucagacggcugaaagcgccugcccagaugucuauucagcucaucaauaaggcugugaacgcccugauuaaugaucaacuuaucaugaagaaccaucugcgcgacauuaugggaauccccuauugcaauuacuccaaauauuguuaccucaaccacaccgucacaggcagaaccagccugccucggugcugucuggugucuaaugggagcuaccucaacgaaacacacuucuccgacgauaucgaacagcaggcugacaauaugauuaccgagcugcuucaaaaggaguauauggaucgccagggaaaaacgccgcugggccucguggaccuguuugucuucucuaccagcuuuuaccugaucuccauuuuccuucaccucguuaagauccccacacauagacacgugauugggaaaccuugccccaagccucaucggcugaaccacaugggaaucuguagcugcggccuguauaaacaccccggcgugccggucaaguggaagcgcugaggacuagucccuguucccagagcccacuuuuuuuucuuuuuuugaaauaaaauagccugucuuucagaucucaaaggcucuuuucagagccaccaaaaaaaaaaaaaaaaaaaaaaaaaaaaaaaaaaaaaaaaaaaaaaaaaaaaaaaaaaaaaaaaaaaaaaaaaaaaaaaaaaaaaaaaaaaaaaaaaaaaa

SEQ ID NO: 33524 - RNA, 1745 nt, Artificial Sequence
  mRNA product Design a-1 (hSL-A100) comprising derived and/or modified sequence from LASV(LASV035-NIG-2009;Clade II)__AIT17588__GPCmut8 (opt5)
aggagagucccgcagucggcguccagcggcucugcuuguucgugugugugucguugcaggccuuauucaagcuuaccaugggccagaucauuaccuucuuucaagaggugccccacgucaucgaagagguuaugaacauugugcugaucgcccucagccugcuugcuauucugaaggggaucuacaauguggccacaugcggacucuucggccuggucuccuuucuucugcucugugggagaucuugcagcacgaccuauaaaggaguguacgaacugcagacacuggagcucgacauggcgucccugaacauguguaugccucuuucuugcaccaagaauaacagccaucacuauaucaugguuggcaaugaaacagggcuggagcucacccugacaaacaccuccauuaucaaucauaaauucuguaaccuuucugaugcucacaagaaaaaucuguacgaccaugcccucaugagcauuaucuccacguuucaccugagcauuccgaacuucaaucaguaugaggccaugucuugcgauuuuaacggaggcaagaucuccgugcaguacaaucugagccacgcuuaugccgucgacgcugccaaccauuguggcaccauugcgaauggggugcuccaaacauucaugcggauggccuggggaggcucuuacaucgcucuggauuccgggaagggaagcugggacugcaucaugaccucuuaccaguaucuuauuauccagaacacaaccugggaagaucacugucaguuuucccgccccagcccuauuggcuaccuggggcuccugucccaaagaacgcgggacaucuauauuucucgcagacuucugggaacauucaccuggacacucagcgauuccgagggcaacgaaacccccggcggguacugccugacccgguggaugcugaucgaggccgagcucaaauguuuuggaaauacagcuguugccaagugcaacgaaaaacaugacgaggaguucugcgauaugcugcgccuuuuugacuucuguaagcaggcgaucagacggcugaaagccccugcucagaugagcauucagcucaucaauaaggccgugaacgcucugauuaaugaucaacuuaucaugaagaaccaucugcgcgacauuaugggcauccccuauugcaauuacucuaaauauuguuaccucaaccacacggucaccgggaagacaucccugccuagaugcugucuggugagcaauggaucuuaccucaacgaaacccacuucagcgacgauaucgaacagcaggccgacaauaugauuacagagcugcuucaaaaagaguauaucgaucggcagggcaagaccccgcuggggcucguggaccuguuugucuucuccacgucuuuuuaccugauuagcaucuuccuucaccucguuaaaauucccacacaucgccacgugaucggaaagccuugccccaaaccucauagacugaaccacaugggcauuuguuccugcggccuguauaagcaccccggggugccggucaaguggaaacggugaggacuagucccuguucccagagcccacuuuuuuuucuuuuuuugaaauaaaauagccugucuuucagaucucaaaggcucuuuucagagccaccaaaaaaaaaaaaaaaaaaaaaaaaaaaaaaaaaaaaaaaaaaaaaaaaaaaaaaaaaaaaaaaaaaaaaaaaaaaaaaaaaaaaaaaaaaaaaaaaaaaaa

SEQ ID NO: 33525 - RNA, 1745 nt, Artificial Sequence
  mRNA product Design a-1 (hSL-A100) comprising derived and/or modified sequence from LASV(LASV1000-NIG-2009;Clade II)__AIT17782__GPCmut8 (opt5)
aggagagucccgcagucggcguccagcggcucugcuuguucgugugugugucguugcaggccuuauucaagcuuaccaugggccagaucauuaccuucuuucaagaggugccccacgucaucgaagagguuaugaacauugugcugaucgcccucagccugcuugcuauucugaaggggaucuacaauguggccacaugcggacucuucggccuggucuccuuucuucugcucugugggagaucuugcagcacgaccuauaaaggaguguacgaacugcagacacuggagcucgacauggcgucccugaacauguguaugccucuuucuugcaccaagaauaacagccaucacuauaucaugguuggcaaugaaacagggcuggagcucacccugacaaacaccuccauuaucaaucauaaauucuguaaccuuucugaugcucacaagaaaaaucuguacgaccaugcccucaugagcauuaucuccacguuucaccugagcauuccgaacuucaaucaguaugaggccaugucuugcgauuuuaacggaggcaagaucuccgugcaguacaaucugagccacaccuaugcugucgacgccgcuaaccauuguggcacaauugccaauggggugcuccaaaccuucaugcggauggcguggggaggcucuuacaucgcccuggauuccgggaagggaagcugggacugcaucaugacaucuuaccaguaucuuauuauccagaacaccacgugggaagaucacugucaguuuucccgccccagcccuauuggcuaccuggggcuccugucccaaagaacacgggacaucuauauuucucgcagacuucugggaaccuucacauggacccucagcgauuccgagggcaacgaaacccccggcggguacugccugacacgguggaugcugaucgaggcugagcucaaauguuuuggaaauacggccguugcuaagugcaacgaaaaacaugacgaggaguucugcgauaugcugcgccuuuuugacuucuguaagcaggccaucaaaagacugaagaccccugcgcagaugagcauucagcucaucaauaaggccgugaacgcucugauuaaugaucaacuuaucaugaaaaaccaucugcgggacauuaugggcauccccuauugcaauuacucuaaguauuguuaccucaaccacacagucaccgggaaaacaucccugccucgcugcugucuggugagcaauggaucuuaccucaacgaaacccacuucagcgacgauaucgaacagcaggccgacaauaugauuacggagcugcuucaaaaggaguauaucgauagacagggcaaaacaccgcuggggcucguggaccuguuugucuucuccaccucuuuuuaccugauuagcaucuuccuucaccucguuaagauucccacccaucggcacguggugggaaaaccuugccccaagccucaucgccugaaccacaugggcaucuguuccugcggccuguauaagcaccccggggucccggugaaauggaagagaugaggacuagucccuguucccagagcccacuuuuuuuucuuuuuuugaaauaaaauagccugucuuucagaucucaaaggcucuuuucagagccaccaaaaaaaaaaaaaaaaaaaaaaaaaaaaaaaaaaaaaaaaaaaaaaaaaaaaaaaaaaaaaaaaaaaaaaaaaaaaaaaaaaaaaaaaaaaaaaaaaaaaa

SEQ ID NO: 33526 - RNA, 1745 nt, Artificial Sequence
  mRNA product Design a-1 (hSL-A100) comprising derived and/or modified sequence from LASV(LASV221-NIG-2010;Clade II)__AIT17624__GPCmut8 (opt5)
aggagagucccgcagucggcguccagcggcucugcuuguucgugugugugucguugcaggccuuauucaagcuuaccaugggccagaucauuaccuucuuucaagaggugccccacgucaucgaagagguuaugaacauugugcugaucgcccucagccugcuugcuauucugaaggggaucuacaauguggccacaugcggacucuucggccuggucuccuuucuucugcucugugggagaucuugcagcacgaccuauaaaggaguguacgaacugcagacacuggagcucgacauggcgucccugaacauguguaugccucuuucuugcaccaagaauaacagccaucacuauaucaugguuggcaaugaaacagggcuggagcucacccugacaaacaccuccauuaucaaucauaaauucuguaaccuuucugaugcucacaagaaaaaucuguacgaccaugcccucaugagcauuaucuccacguuucaccugagcauuccgaacuucaaucaguaugaggccaugucuugcgauuuuaacggaggcaagaucuccgugcaguacaaucugagccacaccuaugcuauugacgccgcuaaccauuguggcacaaucgccaaugggguccuccaaaccuucaugcggauggcguggggaggcucuuacaucgcccuggauuccgggaagggaagcugggacugcauuaugacaucuuaccaguaucuuaucauucagaacaccacgugggaagaucacugucaguuuucccgccccagcccuaucggcuaccuggggcuccugucccaaagaacacgggacauuuauaucucucgcagacuucugggaaccuucacauggacccucagcgauuccgagggcaacgaaacccccggcggguacugccugacacgguggaugcugaucgaggcugagcucaaauguuuuggaaauacggccguggcuaagugcaacgaaaaacaugacgaggaguucugcgauaugcugcgccuuuuugacuucuguaagcaggccauuagacggcugaaaaccccugcgcagaugagcauccagcucauuaauaaggccguuaacgcucugaucaaugaucaacuuauuaugaagaaccaucugcgcgacaucaugggcauccccuauugcaauuacucuaaauauuguuaccucaaccacacagugaccgggaagacaucccugccuagaugcugucuggucagcaauggaucuuaccucaacgaaacccacuucagcgacgauauugaacagcaggccgacaauaugaucacggagaugcugcaaaaagaguauauggaucggcagggcaagacaccgcuugggcugguggaccucuuuguguucuccaccucuuuuuaccugauuagcaucuuccugcaccuugucaaaauucccacccaucgccacguuaucggaaagccuugccccaaaccucauagacucaaccacaugggcauuuguuccugcggccuguauaagcaccccggggugccggugaaguggaaacggugaggacuagucccuguucccagagcccacuuuuuuuucuuuuuuugaaauaaaauagccugucuuucagaucucaaaggcucuuuucagagccaccaaaaaaaaaaaaaaaaaaaaaaaaaaaaaaaaaaaaaaaaaaaaaaaaaaaaaaaaaaaaaaaaaaaaaaaaaaaaaaaaaaaaaaaaaaaaaaaaaaaaa

SEQ ID NO: 33527 - RNA, 1745 nt, Artificial Sequence
  mRNA product Design a-1 (hSL-A100) comprising derived and/or modified sequence from LASV(LASV237-NIG-2010;Clade II)__AIT17638__GPCmut8 (opt5)
aggagagucccgcagucggcguccagcggcucugcuuguucgugugugugucguugcaggccuuauucaagcuuaccaugggccagaucauuaccuucuuucaagaggugccccacgucaucgaagagguuaugaacauugugcugaucgcccucagccugcuugcuauucugaaggggaucuacaauguggccacaugcggacucuucggccuggucuccuuucuucugcucugugggagaucuugcagcacgaccuauaaaggaguguacgaacugcagacacuggagcucgacauggcgucccugaacauguguaugccucuuucuugcaccaagaauaacagccaucacuauaucaugguuggcaaugaaacagggcuggagcucacccugacaaacaccuccauuaucaaucauaaauucuguaaccuuucugaugcucacaagaaagaccuguacgaucaugcccucaugagcauuaucuccacguuucaccugagcauuccgaauuucaaccaguaugaggccaugucuugcgacuuuaauggaggcaagaucuccgugcaguacaaccugagccacaccuaugcugucgaugccgcuaaucauuguggcacaauugccaacggggugcuccaaaccuucaugcggauggcguggggaggcucuuacaucgcccuggacuccgggaagggaagcugggauugcaucaugacaucuuaccaguaucuuauuauccagaauaccacgugggaagaccacugucaguuuucccgccccagcccuauuggcuaccuggggcuccugucccaaagaacacgggauaucuauauuucucgcagacuucugggaaccuucacauggacccucagcgacuccgagggcaacgaaacccccggcggguacugccugacacgguggaugcugaucgaggcugagcucaaauguuuuggaaacacggccguugcuaagugcaaugaaaaacaugaugaggaguucugcgacaugcugcgccuuuuugauuucuguaagcaggccaucagacggcugaaaaccccugcgcagaugagcauucagcucaucaacaaggccgugaaugcucugauuaacgaccaacuuaucaugaagaaucaucugcgcgacauuaugggcauccccuauugcaacuacucuaaauauuguuaccucaaucacacagucaccgggaagacaucccugccuagaugcugucuggugagcaacggaucuuaccucaaugaaacccacuucagcgaugacaucgaacagcaggccgauaacaugauuacggagcugcuucaaaaagaguauauggaccggcagggcaagacaccgcuggggcucguggaucuguuugucuucuccaccucuuuuuaccugaucagcauuuuccuucaccucaucaaaauucccacccaucgccacaucacaggaaagccuugccccaaaccucauagacugaaucacaugggcauuuguuccugcggccuguauaagcaccccgggguuccggugaaguggaaacggugaggacuagucccuguucccagagcccacuuuuuuuucuuuuuuugaaauaaaauagccugucuuucagaucucaaaggcucuuuucagagccaccaaaaaaaaaaaaaaaaaaaaaaaaaaaaaaaaaaaaaaaaaaaaaaaaaaaaaaaaaaaaaaaaaaaaaaaaaaaaaaaaaaaaaaaaaaaaaaaaaaaaa

SEQ ID NO: 33528 - RNA, 1745 nt, Artificial Sequence
  mRNA product Design a-1 (hSL-A100) comprising derived and/or modified sequence from LASV(LASV253-NIG-2011;Clade II)__AIT17670__GPCmut8 (opt5)
aggagagucccgcagucggcguccagcggcucugcuuguucgugugugugucguugcaggccuuauucaagcuuaccaugggccagaucauuaccuucuuucaagaggugccccacgucaucgaagagguuaugaacauugugcugaucgcccucagccugcuugcuauucugaaggggaucuacaauguggccacaugcggacucuucggccuggucuccuuucuucugcucugugggagaucuugcagcacgaccuauaaaggaguguacgaacugcagacacuggagcucgacauggcgucccugaacauguguaugccucuuucuugcaccaagaauaacagccaucacuauaucaugguuggcaaugaaacagggcuggagcucacccugacaaacaccuccauuaucaaucauaaauucuguaaccuuucugaugcucacaagaaaaaucuguacgaccaugcccucaugagcauuaucuccacguuucaccugagcauuccgaacuucaaucaguaugaggccaugucuugcgauuuuaacggaggcaagaucuccgugcaguacaaucugagccacaccuaugcugucgacgccgcuaaccauuguggcacaauugccaauggggugcuccaaaccuucaugcggauggcguggggaggcucuuacaucgcccuggauuccgggaagggaagcugggacugcaucaugacaucuuaccaguaucuuauuauccagaacaccacgugggaagaucacugucaguuuucccgccccagcccuauuggcuaccuggggcuccugucccaaagaacacgggacaucuauauuucucgcagacuucugggaaccuucacauggacccucagcgauuccgagggcaacgaaacccccggcggguacugccugacacgguggaugcugaucgaggcugagcucaaauguuuuggaaauacggccguugcuaagugcaacgaaaaacaugacgaggaguucugcgauaugcugcgccuuuuugacuucuguaagcaggccaucagacggcugaaagcgccugcccagaugagcauucagcucaucaauaaggcugugaacgcccugauuaaugaucaacuuaucaugaagaaccaucugcgcgacauuaugggcauccccuauugcaauuacucuaaauauuguuaccucaaccacaccgucacagggagaaccucccugccucggugcugucuggugagcaauggaucuuaccucaacgaaacacacuucagcgacgauaucgaacagcaggcugacaauaugauuaccgagcugcuucaaaaggaguauaucgaucgccagggcaaaacgccgcuggggcucguggaccuguuugucuucuccacaucuuuuuaccugauuagcaucuuccuucaccucguuaagauucccacccauagacacaucauuggaaaaccuugccccaagccucaucggcugaaccacaugggcaucuguuccugcggccuguauaaacaccccggggugccggugaaguggaagcgcugaggacuagucccuguucccagagcccacuuuuuuuucuuuuuuugaaauaaaauagccugucuuucagaucucaaaggcucuuuucagagccaccaaaaaaaaaaaaaaaaaaaaaaaaaaaaaaaaaaaaaaaaaaaaaaaaaaaaaaaaaaaaaaaaaaaaaaaaaaaaaaaaaaaaaaaaaaaaaaaaaaaaa

SEQ ID NO: 33529 - RNA, 1745 nt, Artificial Sequence
  mRNA product Design a-1 (hSL-A100) comprising derived and/or modified sequence from LASV(LASV254-NIG-2011;Clade II)__AIT17674__GPCmut8 (opt5)
aggagagucccgcagucggcguccagcggcucugcuuguucgugugugugucguugcaggccuuauucaagcuuaccaugggccagaucauuaccuucuuucaagaggugccccacgucaucgaagagguuaugaacauugugcugaucgcccucagccugcuugcuauucugaaggggaucuacaauguggccacaugcggacucuucggccuggucuccuuucuucugcucugugggagaucuugcagcacgaccuauaaaggaguguacgaacugcagacacuggagcucgacaugaccaaccugaauauguguaugccucuuuccugcacaaagaacaauucucaucacuauaucaugguuggcaacgaaaccgggcuggagcucacacugaccaauacgagcauuaucaaccauaaauucuguaaucuuuccgaugcgcacaagaaaaaccuguacaaucaugcucucaugucuauuaucagcaccuuucaccuguccauuccgaacuucaaucaguaugaggccaugagcugcgacuuuaacggaggcaagaucucugugcaguacaaucugucccacagcuaugccgucgaugcugccaaccauuguggcacaauugcuaacggggugcuccaaaccuucaugcggauggccuggggaggcucuuacaucgcgcuggacuccgggaagggaaauugggauugcaucaugacaagcuaccaguaucuuauuauccagaacaccacgugggaagaccacugucaguuuucucgccccuccccuauuggcuaccuggggcuccugagccaaagaacacgggauaucuauauuucccgcagacuucugggaaccuucacauggacccucucugacagcgagggcaaugaaacccccggcggguacugccugacacgguggaugcugaucgaggccgagcucaaauguuuuggaaacacggcuguugccaagugcaaugaaaaacaugaugaggaguucugcgacaugcugcgccuuuuugauuucuguaagcaggcuaucagacggcugaaaaccccugcccaggcgaacauucagcucaucaauaaggccgugaacgcucugauuaaugaccaacuuaucaugaagaaccaucugcgcgauauuaugggcauccccuauugcaauuacuccaaauauuguuaccucaaccacacagucaccgggaagacaagccugccuagaugcugucuggugucuaauggauccuaccucaacgaaacccacuucagcgacgacaucgaacagcaggccgauaauaugauuacggagcugcuucaaaaagaguauauggaccggcagggcaagacaccgcuggggcucguggaucuguuugucuucucuaccagcuuuuaccugaucuccauuuuccuucaccucguuaaaauccccacccaucgccacgugauuggaaagccuugccccaaaccucauagacugaaccacaugggcaucuguucuugcggccuguauaagcaccccggggugccggucaaguggaaacggugaggacuagucccuguucccagagcccacuuuuuuuucuuuuuuugaaauaaaauagccugucuuucagaucucaaaggcucuuuucagagccaccaaaaaaaaaaaaaaaaaaaaaaaaaaaaaaaaaaaaaaaaaaaaaaaaaaaaaaaaaaaaaaaaaaaaaaaaaaaaaaaaaaaaaaaaaaaaaaaaaaaaa

SEQ ID NO: 33530 - RNA, 1745 nt, Artificial Sequence
  mRNA product Design a-1 (hSL-A100) comprising derived and/or modified sequence from LASV(Nig08-A19;Clade III)__ADU56618__GPCmut8 (opt5)
aggagagucccgcagucggcguccagcggcucugcuuguucgugugugugucguugcaggccuuauucaagcuuaccaugggccagaucgugaccuucuuucaagaggucccccacguuauugaagaggugaugaacaucgugcugauugcccucagcauccuggcuauucuuaaggggcuguacaauaucgccacaugcggacucaucggccuggucacguuccuucugcucuccgggagaucuuguagcaugaccuauaaaggaguguacgaacugcagacacuggagcucaacaugaauacccugaacaugugcaugccucuuuccuguacaaagaauaacucucaucacuauauuaugguuggcaaugaaaccgggcuggagcucacacugaccaacacgagccuucugcaucacaaauuuugcaaucucuccgacgcgcauaagaaaaaccuguacgaucacacccugaugucuaucauuagcacauuccaccucuccaucccgaauuuuaaccaguaugaggcuaugagcugugacuucaauggaggcaagauuaccgugcaguacaaccugucucauuccuaugccaucgaugccgcuaaucacugcggcacagucgccaacggggugcuucaaaccuuuaugcggauggcuuggggaggcagcuacauugcccuggacucugggcgcggaaagugggauuguaucaugacguccuaccaguaucucaucauucagaacacaaccugggaagaccauugccaguucagcagacccucuccuaucggcuaccuggggcuucugucccaacggacacgcgauauuuauaucagcagacggcuccugggaaccuuuaccuggacacuguccgacucugagggcaaugaaacgcccggcggguacugucucacccgcuggaugcugauugaggcggagcuuaaaugcuucggaaacacagccguugcuaaguguaaugaaaaacacgaugaggaauuuugcgacaugcugagacucuucgauuuuugcaagcaggccauccggcgccugaaagcuccugcccagaugagcauccagcuuauuaacaaggcggugaaugcccugaucaacgaccaacucauuaugaagaaucaccugagagauaucaugggcauucccuauuguaacuacuccaaauauugcuaccugaaucauaccagcacagggcggaccucucucccucgcuguugccuggucuccaacggaagcuaccuuaaugagacgcacuucucugacgacaucgaacagcaggcugauaacaugaucacagagaugcugcaaaaggaguaucucgacagacagggcaaaaccccgcuggggcugguggaucuuuucguguuuagcaccuccuucuaccucauuucuaucuuucugcaucuggucaagauucccacacaccggcauaucguuggaaaaccuugucccaagccucaccgccucaaucacaugggcauuugcagcuguggccuguauaaacagcccggggugccggugagauggaagcggugaggacuagucccuguucccagagcccacuuuuuuuucuuuuuuugaaauaaaauagccugucuuucagaucucaaaggcucuuuucagagccaccaaaaaaaaaaaaaaaaaaaaaaaaaaaaaaaaaaaaaaaaaaaaaaaaaaaaaaaaaaaaaaaaaaaaaaaaaaaaaaaaaaaaaaaaaaaaaaaaaaaaa

SEQ ID NO: 33531 - RNA, 1748 nt, Artificial Sequence
  mRNA product Design a-1 (hSL-A100) comprising derived and/or modified sequence from LASV(G1180-SLE-2010;Clade IV)__AIT17168__GPCmut8 (opt5)
aggagagucccgcagucggcguccagcggcucugcuuguucgugugugugucguugcaggccuuauucaagcuuaccaugggccagaucgugaccuucuuucaagaggucccccacguuauugaagaggugaugaacaucgugcugauugcccucagcauccuggcuguccuuaaggggcuguacaauuucgccacaugcggacucgugggccugcuuacguuucugcuccugugugggagauccugcaccgcgucucgguauaaaggaguuuacgaacugcagacacucgagcugaacauggaaacccuuaauauguguaugccucugagcugcacaaagaacaauucccaucacuauauuauggugggcaacgagaccgggcucgagcugacacuuaccaauacgucuaucaucaaccauaaauucuguaaucugagcgacgcucacaagaaaaaccucuacgaucaugcccugauguccauuaucucuaccuuucaccugagcauuccgaauuucaaccaguaugaagccauguccugcgacuuuaauggaggcaagaucagcguccaguacaaccucucucacuccuaugcuggcgaugccgcuaaucauugugggacaguggccaacggaguucugcaaaccuucaugcgcauggcguggggcgggagcuacauugcccuugacucuggacacggcuccugggauugcaucaugacaagcuaccaguaucugauuauccagaacaccacgugggaggaccauugucaguuuucuagacccuccccuaucggguaccucggacugcuuagccaacggacacgcgauauuuauaucuccagacggcugcucggcaccuucacauggacccugucugacagcgaaggcaaggauacccccgggggauacugccugacacgcuggaugcucauugaggcugagcugaaauguuuuggcaauacggccguggcuaagugcaacgaaaaacacgacgaggaguucugcgauaugcuuagacuguuugacuucuguaagcaggccauccagcggcucaaagcgccugcccagauguccauucaacugaucaauaaggcugucaacgcccuuaucaaugaucagcugauuaugaagaaccaccuccgcgacaucauggggauucccuauugcaauuacagcaaauauuguuaccugaaccauaccacaaccggaaagacaucucugccuaaaugcugucucguguccaauggcagcuaccugaacgaaacccacuucucugacgauaucgaacagcaagcugacaauaugauuacggagaugcuucagaaggaguauauggaaagacaggggaaaacaccgcugggacucguggaucuguuugucuucagcaccuccuuuuaccugaucucuaucuuccuucaucucguuaagauucccacccaccggcauaucgugggcaaaagcugcccuaagccccaccgccugaaccacaugggcauuuguuccugcgggcuguauaagcagccuggagugcccgucaaauggaagagaugaggacuagucccuguucccagagcccacuuuuuuuucuuuuuuugaaauaaaauagccugucuuucagaucucaaaggcucuuuucagagccaccaaaaaaaaaaaaaaaaaaaaaaaaaaaaaaaaaaaaaaaaaaaaaaaaaaaaaaaaaaaaaaaaaaaaaaaaaaaaaaaaaaaaaaaaaaaaaaaaaaaaa

SEQ ID NO: 33532 - RNA, 1748 nt, Artificial Sequence
  mRNA product Design a-1 (hSL-A100) comprising derived and/or modified sequence from LASV(G1442-SLE-2011;Clade IV)__AIT17180__GPCmut8 (opt5)
aggagagucccgcagucggcguccagcggcucugcuuguucgugugugugucguugcaggccuuauucaagcuuaccaugggccagaucgugaccuucuuucaagaggucccccacguuauugaagaggugaugaacaucgugcugauugcccucagcauccuggcuguccuuaaggggcuguacaauguggccacaugcggacucauuggccugguuacguuccuucugcucugugggagauccugcaccacaacccuguauaaaggaguguacgaacugcagacacucgagcugaacauggaaacccuuaauauguguaugccucugucuugcacaaagaacaauagccaucacuauauccgggucggcaacgagaccgggcucgagcugacgcuuaccaauacauccaucauuaaccauaaauuuuguaaucugucugacgcgcacaagaaaaaccucuacgaucaugcucugaugagcaucauuuccaccuuccaccugucuaucccgaauuuuaaccaguaugaagccaugagcugcgacuucaauggaggcaagauuuccgugcaguacaaccucagccacucuuaugccggcgaugcugccaaucauugugggacaguugcuaacggagugcugcaaaccuuuaugcgcauggccuggggcggguccuacaucgcgcuugacagcggaagaggcaacugggauugcauuaugacgucuuaccaguaucugaucauccagaauacaaccugggacgaucacugucaguucucccggcccagcccuauuggguaccucggacugcuuucucaacgcacaagagacgucuauaucucccggcgccugcucggcaccuuuaccuggacacugagcgauuccgagggcaaggacacgcccgggggauacugccugaccagauggaugcucauugaagccgagcugaaauguuucggcaacacagcuguggccaagugcaaugagaaacaugaugaagaguuuugcgacaugcuucggcuguucgauuuuuguaagcaggcuauccagcgccucaaagccccugcgcagaugucuauucaacugaucaacaaggccgugaaugcucuuaucaacgaccagcugauuaugaagaaucaccucagagacaucauggggauucccuauugcaacuacagcaaauauuguuaccugaauaacaccgccacaggaaagaccucccugccuaaaugcugucucaucagcaauggcucuuaccugaacgaaacgcacuucuccgaugacauugagcaggaagcugauaauaugaucacagagaugcuucaaaaggaguauauggaacggcaggggaaaaccccgcugggacucgucgaccuguucguuuuuagcaccucuuucuaccugaucagcauuuuucuucaucucgugaagauccccacacaccgccauauugugggcaaauccugcccuaagccccacagacugaaccauaugggcaucuguucuugcgggcuguauaagcagccuggaguccccgugcgguggaaacgcugaggacuagucccuguucccagagcccacuuuuuuuucuuuuuuugaaauaaaauagccugucuuucagaucucaaaggcucuuuucagagccaccaaaaaaaaaaaaaaaaaaaaaaaaaaaaaaaaaaaaaaaaaaaaaaaaaaaaaaaaaaaaaaaaaaaaaaaaaaaaaaaaaaaaaaaaaaaaaaaaaaaaa

SEQ ID NO: 33533 - RNA, 1748 nt, Artificial Sequence
  mRNA product Design a-1 (hSL-A100) comprising derived and/or modified sequence from LASV(G3010-SLE-2013;Clade IV)__AIT17344__GPCmut8 (opt5)
aggagagucccgcagucggcguccagcggcucugcuuguucgugugugugucguugcaggccuuauucaagcuuaccaugggccagaucgugaccuucuuucaagaggucccccacguuauugaagaggugaugaacaucgugcugauugcccucagcauccuggcuguccuuaaggggcuguacaauuucgccacaugcggacucgugggccugguuacguuucuucugcucugugggagauccugcaccacaucucuguauaaaggaguguacgaacugcagacccucgagcugaacauggaaacacuuaauauguguaugccucugagcugcaccaagaacaauucccaucacuauauuauggucggcaacgagacagggcucgagcugacccuuacgaauaccucuaucaucaaccauaaauucuguaaucugagcgacgcgcacaagaaaaaccucuacaaucaugcucugauguccauuaucucuacauuucaccugagcauuccgaacuucaaucaguaugaagccauguccugcgauuuuaacggaggcaagaucagcgugcaguacaaucucucucacuccuaugccggcgacgcugccagccauugugggaccguugcuaacggagugcugcaaacauucaugcggauggccuggggcgggucuuacauugcgcuugauuccggauacggcaagugggacugcaucaugaccagcuaucaguaccugauuauccagaacacgacaugggaggaucacugucaguuuucucgccccuccccuaucggguaucucggacugcuuagccaaagaacccgggacauuuacaucucccgcagacugcucggcacauucaccuggacccugucugauagcgaaggcaaagacacacccgggggauauugccugacgcgguggaugcucauugaggccgagcugaaguguuuuggcaauaccgcugucgccaaaugcaacgaaaagcaugaugaggaguucugcgacaugcuucgccuguuugauuucuguaaacaggcuauccagagacucaagaccccugcccagauguccauucaacugaucaauaaggcggugaacgcccuuaucaaugaccagcugauuaugaaaaaccaccuccgggauaucauggggauucccuacugcaauuauagcaaguacuguuaccugaaccacacaacaaccggaaaaacgucucugccuaagugcugucucguguccaauggcagcuaucugaacgaaacacauuucucugacgacaucgaacagcaagcugauaauaugauuaccgagaugcuucagaaagaguacauggaacgccaggggaagaccccgcugggacucgucgaccuguuuguuuucagcacauccuuuuaucugaucucuaucuuccuucaccucgugaaaauucccacccauagacacaucgugggcaagagcugcccuaagccccaucggcugaaccacaugggcauuuguuccugcgggcuguacaaacagccuggaguccccgugcgcuggaagagaugaggacuagucccuguucccagagcccacuuuuuuuucuuuuuuugaaauaaaauagccugucuuucagaucucaaaggcucuuuucagagccaccaaaaaaaaaaaaaaaaaaaaaaaaaaaaaaaaaaaaaaaaaaaaaaaaaaaaaaaaaaaaaaaaaaaaaaaaaaaaaaaaaaaaaaaaaaaaaaaaaaaaa

SEQ ID NO: 33534 - RNA, 1748 nt, Artificial Sequence
  mRNA product Design a-1 (hSL-A100) comprising derived and/or modified sequence from LASV(G502-SLE-2009;Clade IV)__AIT17126__GPCmut8 (opt5)
aggagagucccgcagucggcguccagcggcucugcuuguucgugugugugucguugcaggccuuauucaagcuuaccaugggccagaucgugaccuucuuucaagaggucccccacguuauugaagaggugaugaacaucgugcugauugcccucagcauccuggcuguccuuaaggggcuguacaauuucgccacaugcggacucgugggccugcuuacguuucugcuccugugugggagauccugcaccacaggacuguauaaaggcguuuacgaacuccagacccuggagcuuaacauggaaacacugaauauguguaugccucucucuugcaccaagaacaauagccaucacuauauuaugguggggaacgagacaggacuggagcuuacccugacgaauaccuccaucaucaaccauaaauucuguaaucucucugacgcgcacaagaaaaaccuguacgaucaugcucugaugagcauuaucuccacauuucaccucucuauuccgaauuucaaccaguaugaagccaugagcugcgacuuuaauggcggcaagaucuccguccaguacaaccugagccacucuuaugccggggaugcugccgaccauuguggaaccguggcuaauggcguucuucaaacauucaugcggauggccuggggaggguccuacauugcgcuggauagcggccgcgggagaugggacugcaucaugaccucuuaccaguaucucauuauccagaacacgacaugggaggaucacugucaguuuucccggcccagcccuaucggauaccugggccuucugucucaacgcaccagagacauuuauaucucccggcgccuccugggcacauucaccuggacccugagcgauuccgaagggaaggacacacccggaggcuacugccucacgagauggaugcugauugaggccgagcuuaaauguuuugggaacaccgcuguggccaagugcaaugaaaaacaugaugaggaguucugcgacaugcugcggcucuuugauuucuguaagcaggcuauccagcgccugaaagccccugcgcagaugucuauucaacuuaucaacaaggccgucaaugcucugaucaacgaccagcucgugaugaagaaucaccugagagacauuaugggaauccccuauugcaacuacagccgguauuguuaccugaaucacacaaccacaggccgcaccucccucccuaaaugcugucuggugagcaacgggucuuaccuuaaugaaacgcauuucuccgaugacauugaacagcaagccgauaacaugaucacagagaugcugcagaaggaguauauggaaagacagggaaaaaccccgcucggccuggucgaccuguuuguuuucagcaccucuuuuuaccuuauuagcaucuuccuccaccuggugaagauccccacacaucggcacauugugggcaaauccugcccuaagccccaucgccugaaucacauggggaucuguucuugcggacucuauaaacagccuggcguccccgugaaguggaagagaugaggacuagucccuguucccagagcccacuuuuuuuucuuuuuuugaaauaaaauagccugucuuucagaucucaaaggcucuuuucagagccaccaaaaaaaaaaaaaaaaaaaaaaaaaaaaaaaaaaaaaaaaaaaaaaaaaaaaaaaaaaaaaaaaaaaaaaaaaaaaaaaaaaaaaaaaaaaaaaaaaaaaa

SEQ ID NO: 33535 - RNA, 1748 nt, Artificial Sequence
  mRNA product Design a-1 (hSL-A100) comprising derived and/or modified sequence from LASV(G733-SLE-2010;Clade IV)__AIT17154__GPCmut8 (opt5)
aggagagucccgcagucggcguccagcggcucugcuuguucgugugugugucguugcaggccuuauucaagcuuaccaugggccagaucgugaccuucuuucaagaggucccccacguuauugaagaggugaugaacaucgugcugauugcccucagcauccuggcuguccuuaaggggcuguacaauuucgccacaugcggaauugugggccucguuuccuuucugcuucugugugggagaucuugcacgaccagccucuauaaaggaguguacgaacugcagacacuggagcucaacauggaaacccugaauauguguaugccucuuuccugcacaaagaacaauucucaucacuauaucauggucggcaacgagaccgggcuggagcucacacugaccaauacgagcaucauuaaccauaaauucuguaaucuuuccgacgcgcacaagaaaaaccuguacgaucaugcucucaugucuaucauuagcaccuuucaccuguccaucccgaauuucaaccaguaugaagccaugagcugcgacuuuaauggaggcaagauuucugugcaguacaaccugucccacagcuaugccggcgaugcugccaaucauugugggacaaucgcuaacggaguucuccaaaccuucaugcggauggccuggggcgggucuuacauugcgcuggacuccggacgcgauagaugggacugcaucaugacaagcuaccaguaucuuaucauucagaacaccacgugggaggaucacugucaguuuucucggcccuccccuaucggcuaccuggggcuccugagccaacgcacaagagacauuuauaucucccggcgccuucugggaaccuucacauggacccucucugauagcgaaggcaaggacacccccggcggguacugccugacaagauggaugcugauugaggccgagcucaaauguuuuggaaauacggcuguggccaagugcaacgaaaaacaugaugaggaguucugcgacaugcugcggcuuuuugauuucuguaagcaggcuauccagcgccugaaagccccugcgcagauguccauccaacucauuaauaaggccgucaacgcucugaucaaugaccagcuuauuaugaagaaccaccugagagacaucaugggcauucccuauugcaauuacagcaaauauuguuaccucaaccacaccacaaccgggaagacaucucugccuaaaugcugucugguguccaauggaagcuaccucaacgaaacccauuucucugaugacaucgaacagcaagccgauaauaugaucacggagaugcugcagaaggaguauauggaacggcagggcaaaacaccgcuugggcugguggaccucuuugucuucagcaccuccuuuuaccugauuucuaucuuccugcaccuuguuaagauucccacccaucgccacguggugggaaaaagcugcccuaagccccauagacucaaccacaugggcaucuguuccugcggccuguaugggcagccuggaguccccgugaaguggaaacggugaggacuagucccuguucccagagcccacuuuuuuuucuuuuuuugaaauaaaauagccugucuuucagaucucaaaggcucuuuucagagccaccaaaaaaaaaaaaaaaaaaaaaaaaaaaaaaaaaaaaaaaaaaaaaaaaaaaaaaaaaaaaaaaaaaaaaaaaaaaaaaaaaaaaaaaaaaaaaaaaaaaaa

SEQ ID NO: 33536 - RNA, 1748 nt, Artificial Sequence
  mRNA product Design a-1 (hSL-A100) comprising derived and/or modified sequence from MOPV/LASV reassortant(IGS-1;Clade IV)__AFY05576__GPCmut8 (opt5)
aggagagucccgcagucggcguccagcggcucugcuuguucgugugugugucguugcaggccuuauucaagcuuaccaugggccagaucgugaccuucuuucaagaggucccccacguuauugaagaggugaugaacaucgugcugauugcccucagcguccuggcugugcuuaaggggcuguacaauuucgccacaugcggacucguuggccuggugacguuucuucugcucugugggagauccugcaccacaucucuguauaaaggagucuacgaacugcagacccucgagcugaacauggaaacacuuaauauguguaugccucugagcugcaccaagaacaauucccaucacuauaucauggugggcaacgagacagggcucgagcugacccuuacgaauaccucuauuaucaaccauaaauucuguaaucugagcgacgcgcacaagaaaaaccucuacgaucaugcucugauguccaucauuucuacauuucaccugagcaucccgaauuucaaccaguaugaagccauguccugcgacuuuaauggaggcaagauuagcguucaguacaaccucucucacuccuaugccggcgaugcugccaaucauugugggaccguggcuaacggaguccugcaaacauucaugcggauggccuggggcgggagcuacaucgcgcuugacucuggacgcggcaacugggauugcauuaugaccuccuaccaguaucugaucauucagaauacgacaugggaggaccacugucaguuuagcagacccucuccuaucggguaccucggacugcuuucccaacggacccgcgauaucuauauuagcagacggcugcucggcacauucaccuggacccuguccgacucugaaggcgaggauacacccgggggauacugccugacgcgcuggaugcucaucgaggccgaacugaaguguuuuggcaacaccgcuguggccaaaugcaaugagaagcaugacgaagaguucugcgauaugcuuagacuguuugacuucuguaaacaggcuauucagcggcucaaggccccugcgcagaugagcauccaacugauuaacaaagccgugaaugcucuuaucaacgaucagcugaucaugaagaaucaccuccgcgacauuauggggauccccuauugcaacuacuccaaguauuguuaccugaaucacacaaccacaggaagaaccagccugccuaaaugcugucucgucucuaacggcuccuaccugaaugaaacgcauuucagcgacgauauugagcagcaagccgacaacaugaucacagagaugcuucagaaggaauauauggagcggcaggggaaaaccccgcugggacucguugaucuguuuguguucucuaccagcuuuuaccugauuuccaucuuccuucaccucgugaagauccccacacaucgccacauugucggcaaaucuugcccuaagccccauagacugaaucacaugggcaucuguagcugcgggcuguauaaacagccuggagugcccguuaaguggaagcggugaggacuagucccuguucccagagcccacuuuuuuuucuuuuuuugaaauaaaauagccugucuuucagaucucaaaggcucuuuucagagccaccaaaaaaaaaaaaaaaaaaaaaaaaaaaaaaaaaaaaaaaaaaaaaaaaaaaaaaaaaaaaaaaaaaaaaaaaaaaaaaaaaaaaaaaaaaaaaaaaaaaaa

SEQ ID NO: 33537 - RNA, 1748 nt, Artificial Sequence
  mRNA product Design a-1 (hSL-A100) comprising derived and/or modified sequence from LASV(LM765-SLE-2012;Clade IV)__AIT17814__GPCmut8 (opt5)
aggagagucccgcagucggcguccagcggcucugcuuguucgugugugugucguugcaggccuuauucaagcuuaccaugggccagaucgugaccuucuuucaagaggucccccacguuauugaagaggugaugaacaucgugcugauugcccucagcauccuggcuguccuuaaggggcuguacaauuucgccacaugcggacucgugggccugguuacguuucuucugcucugugggagauccugcaccacaucucuguauaaaggaguguacgaacugcagacccucgagcugaacauggaaacacuuaauauguguaugccucugagcugcaccaagaacaauucccaucacuauauuauggucggcaacgagacagggcucgagcugacccuuacgaauaccucuaucaucgaccauaaauucuguaaccugagcgaugcgcaccggaagaaucucuacgaccaugcucugauguccauuaucucuacauuucaccugagcauuccgaacuucaaucaguaugaagccauguccugcgauuuuaacggaggcaaaaucagcgugcaguacaaucucucucacuccuaugccaaggacgcugccgaucauuguggcaccguugcuaacggggugcugcaaacauucaugcgcauggccuggggaggcagcuacauugcgcuugacucugggagaggacggugggauugcaucaugaccuccuaccaguaucugauuauccagaauacgacaugggaggaccacugucaguuuagccgccccucuccuaucggcuaccucgggcugcuuucccaaagaacccgggauauuuauaucagccgcagacugcucggaacauucaccuggacccuguccgacucugaaggcaaggauacacccggcggguacugccugacgcgguggaugcucauugaggccgagcugaaauguuuuggaaacaccgcugucgccaagugcaacgaaaaacaugacgaggaguucugcgauaugcuucgccuguuugacuucuguaagcaggcuauccagagacucaaagccccugcgcagaugagcauucaacugaucaauaaggccgugaacgcucuuaucaaugaccagcugauuaugaagaaccaccuccgggauaucaugggcauucccuauugcaauuacuccaaauauuguuaccugaaccacacaaccacagggaagaccagccugccuaaaugcugucucgugucuaauggauccuaccugaacgaaacgcauuucagcgacgauaucgaacagcaagccgacaauaugauuacagagaugcuucagaaggaguauauggaacgccagggcaaaaccccgcuggggcucgucgaucuguuuguuuucucuaccagcuuuuaccugaucuccaucuuccuucaccucgugaagauucccacacauagacacaucgugggaaaaccuugccccaagccucaucggcugaaccacaugggcauuuguucuugcggccuguauaagcagcccggggucccggugaaauggaagcgcugaggacuagucccuguucccagagcccacuuuuuuuucuuuuuuugaaauaaaauagccugucuuucagaucucaaaggcucuuuucagagccaccaaaaaaaaaaaaaaaaaaaaaaaaaaaaaaaaaaaaaaaaaaaaaaaaaaaaaaaaaaaaaaaaaaaaaaaaaaaaaaaaaaaaaaaaaaaaaaaaaaaaa

SEQ ID NO: 33538 - RNA, 1748 nt, Artificial Sequence
  mRNA product Design a-1 (hSL-A100) comprising derived and/or modified sequence from LASV(LM776-SLE-2012;Clade IV)__AIT17824__GPCmut8 (opt5)
aggagagucccgcagucggcguccagcggcucugcuuguucgugugugugucguugcaggccuuauucaagcuuaccaugggccagaucgugaccuucuuucaagaggucccccacguuauugaagaggugaugaacaucgugcugauugcccucagcauccuggcuguccuuaaggggcuguacaauuucgccacaugcggacucgugggccugguuacguuucuucugcucugugggagauccugcaccacaucuguguauaaaggagucuacgaacugcagacccuggagcucaacauggaaacacugaauauguguaugccucuuagcugcaccaagaacaauucccaucacuauauuauggugggcaacgagacagggcuggagcucacccugacgaauaccucuaucaucaaccauaaauucuguaaucuuagcgacgcgcacaagaaaaaccuguacgaucaugcucucauguccauuaucucuacauuucaccugagcauuccgaauuucaaccaguaugaagccauguccugcgacuuuaauggaggcaagaucagcguucaguacaaccugucucacuccuaugccggcgaugcugccaaucauugugggaccguggcuaacggaguccuccaaacauucaugcggauggccuggggcgggagcuacauugcgcuggacucuggacacggcaagugggauugcaucaugaccuccuaccaguaucuuauuauccagaacacgacaugggaggaccauugucaguuuagccgccccucuccuaucggguaccugggacuccugucccaaagaacccgggauauuuauaucagccgcagacuucugggcacauucaccuggacccucuccgacucugaaggcaaagauacacccgggggauacugccugacgcgguggaugcugauugaggccgagcucaaguguuuuggcaauaccgcuguggccaaaugcaacgaaaagcacgacgaggaguucugcgauaugcugcgccuuuuugacuucuguaaacaggcuauccagagacugaaggccccugcgcagaugagcauucaacucaucaauaaggccgugaacgcucugaucaaugaucagcuuauuaugaaaaaccaucugcgggacaucauggggauucccuauugcaauuacuccaaguauuguuaccucaaccacacaaccacaggaaaaaccagccugccuaagugcugucuggucucuaauggcuccuaccucaacgaaacgcacuucagcgacgauaucgaacagcaagccgacaauaugauuacagagaugcugcagaaagaguauauggaacgccaggggaagaccccgcuuggacugguugaucucuuuguguucucuaccagcuuuuaccugaucuccaucuuccugcaucuugugaaaauucccacacacagacauaucgucggcaagucuugcccuaagccccaccggcucaaccacaugggcauuuguagcugcgggcuguauaaacagccuggagugcccguucgcuggaagagaugaggacuagucccuguucccagagcccacuuuuuuuucuuuuuuugaaauaaaauagccugucuuucagaucucaaaggcucuuuucagagccaccaaaaaaaaaaaaaaaaaaaaaaaaaaaaaaaaaaaaaaaaaaaaaaaaaaaaaaaaaaaaaaaaaaaaaaaaaaaaaaaaaaaaaaaaaaaaaaaaaaaaa

SEQ ID NO: 33539 - RNA, 1748 nt, Artificial Sequence
  mRNA product Design a-1 (hSL-A100) comprising derived and/or modified sequence from LASV(Mad39;Clade IV)__ANH09722__GPCmut8 (opt5)
aggagagucccgcagucggcguccagcggcucugcuuguucgugugugugucguugcaggccuuauucaagcuuaccaugggccagaucgugaccuucuuucaagaggucccccacguuauugaagaggugaugaacaucgugcugauugcccucagcauccuggcuguccuuaaggggcuguacaauguggccacaugcggacucauuggccugguuacguuccuucugcucugugggagauccugcaccacaacccuguauaaaggaguguacgaacugcaggcgcucgagcugaacauggaaacacuuaauauguguaugccucugucuugcaccaagaacaauagccaucacuauauccgggucggcaacgagacagggcucgagcugacccuuacgaauaccucccugaucaaccauaaauuuuguaaucucucugacgcucacaagaaaaaccuguacgaucaugcccugaugagcauuaucuccacauuccaccucucuauuccgaauuuuaaccaguaugaagccaugagcugcgacuucaaugauggaaagaucuccgugcaguacaaccugagccacaccuaugcuggcgacacagccaaucauuguggcaccguugcuaacggggugcuucaaacguuuaugcgcauggccuggggaggcucuuacauugcgcuggauuccgggagaggaggcugggacugcaucaugacaagcuaccaguaucucauuauccagaacaccacaugggaggaucacugucaguucucucggcccuccccuaucggguaccugggacuucugagccaacgcaccagagacauuuauaucucucggcgccuccugggcaccuuuacauggacgcuguccgauagcgaaggcaaggacacccccgggggauacugccucacaagauggaugcugauugaggccgagcuuaaauguuucggcaauaccgcugucgccaagugcaacgaaaaacaugaugaggaauuuugcgacaugcugcgccucuucgauuuuuguaagcaggcuauccagcggcugaaagccccugcgcagauguccauucaacuuaucaauaaggccgugaacgcucugaucaaugaccagcucauuaugaagaaccaccugagagacaucauggggauucccuauugcaauuacucuaaauauuguuaccugaaccacacagugaccggaaagacgagccucccuaaaugcugucuggucuccaauggcagcuaccuuaacgagacacauuucucugaugacaucgaacagcaagccgauaauaugauuaccgagaugcugcagaaggaguauauggaacggcaggggaaaaccccgcucggacugguugaccuguucguguuuuccaccagcuucuaccuuaucucuaucuuucuccaccuggugaagauucccacacaucgccacgucgugggcaaaccuugccccaagccucauagacugaaccacaugggcaucuguagcugcggguucuauaagcagcccggaguuccggugcgguggaaacgcugaggacuagucccuguucccagagcccacuuuuuuuucuuuuuuugaaauaaaauagccugucuuucagaucucaaaggcucuuuucagagccaccaaaaaaaaaaaaaaaaaaaaaaaaaaaaaaaaaaaaaaaaaaaaaaaaaaaaaaaaaaaaaaaaaaaaaaaaaaaaaaaaaaaaaaaaaaaaaaaaaaaaa

SEQ ID NO: 33540 - RNA, 1748 nt, Artificial Sequence
  mRNA product Design a-1 (hSL-A100) comprising derived and/or modified sequence from LASV(Z0947-SLE-2011;Clade IV)__AIT17840__GPCmut8 (opt5)
aggagagucccgcagucggcguccagcggcucugcuuguucgugugugugucguugcaggccuuauucaagcuuaccaugggccagaucgugaccuucuuucaagaggucccccacguuauugaagaggugaugaacaucgugcugauugcccucagcauccuggcuguccuuaaggggcuguacaauuucgccacaugcggacucgugggccugguuacguuucuucugcucugugggagauccugcaccauuucucuguauaaaggaguguacgaacugcagacacucgagcugaacauggaaacccuuaauauguguaugccucugagcugcacaaagaacaauucccaucacuauaucauggucggcaacgagaccgggcucgagcugacacuuaccaauacgucuaucauuaaccauaaauucuguaaucugagcgacgcgcacaagaaaaaccucuacgaucaugcucugauguccaucauuucuaccuuucaccugagcaucccgaauuucaaccaguaugaagccauguccugcgacuuuaauggaggcaagauuagcgugcaguacaaccucucucacuccuaugccggcgaugcugccaaucauugugggacaguugcuaacggagugcugcaaaccuucaugcggauggccuggggcgggagcuacaucgcgcuugacucuggacgcgauagaugggacugcauuaugacauccuaccaguaucugaucauccagaacaccacgugggaggaucacugucaguuuagccggcccucuccuauuggcuaccucgggcugcuuucccaacgcacaagagacaucuauauuagccggcgccugcucggaaccuucacauggacccuguccgauucugaaggcaaggacacccccggcggguacugccugacaagauggaugcucaucgaggccgagcugaaauguuuuggaaauacggcugucgccaagugcaacgaaaaacaugaugaggaguucugcgacaugcuucggcuguuugauuucuguaagcaggcuauucagcgccucaaagccccugcgcagaugagcauccaacugaucaauaaggccgugaacgcucuuauuaaugaccagcugaucaugaagaaccaccucagagacauuaugggcauccccuauugcaauuacuccaaauauuguuaccugaaccacaccacaaccgggaagacaagccugccuaaaugcugucucgugucuaauggauccuaccugaacgaaacccauuucagcgaugacauugaacagcaagccgauaauaugaucacggagaugcuucagaaggaguauauggaacggcagggcaaaacaccgcuggggcucgucgaccuguuuguuuucucuaccagcuuuuaccugaucuccauuuuccuucaccucgugaagauccccacccaucgccacauugugggaaaaccuugccccaagccucauagacugaaccacaugggcaucuguucuugcggccuguauaagcagcccggggucccggugaaauggaagcggugaggacuagucccuguucccagagcccacuuuuuuuucuuuuuuugaaauaaaauagccugucuuucagaucucaaaggcucuuuucagagccaccaaaaaaaaaaaaaaaaaaaaaaaaaaaaaaaaaaaaaaaaaaaaaaaaaaaaaaaaaaaaaaaaaaaaaaaaaaaaaaaaaaaaaaaaaaaaaaaaaaaaa

SEQ ID NO: 33541 - RNA, 1724 nt, Artificial Sequence
  mRNA product Design a-1 (A100) comprising derived and/or modified sequence from LASV(Josiah;Clade IV)__NP_694870__GPCmut8 (opt1)
aggagagucccgcagucggcguccagcggcucugcuuguucgugugugugucguugcaggccuuauucaagcuuaccaugggccagaucgugaccuucuuccaggaggucccccacgugaucgaggaggugaugaacaucguccugaucgcccucagcgugcuggccgugcugaaggggcucuacaacuucgcgaccugcggccuggucgggcuggugacguuccuccugcugugcggccgcuccugcaccaccagccucuacaaggggguguacgagcugcagacccuggagcucaacauggagacgcugaacaugugcaugccgcuguccugcaccaagaacaacagccaccacuacaucauggucggcaacgagaccggccucgagcugacgcugaccaacaccuccaucaucaaccacaaguucugcaaccucagcgacgcccacaagaagaaccuguacgaccacgcccugauguccaucaucagcaccuuccaccucuccauccccaacuucaaccaguacgaggccaugagcugcgacuucaacgggggcaagaucuccgugcaguacaaccugagccacuccuacgccggggacgcggccaaccacugcggcacgguggccaacgggguccugcagaccuucaugcggauggccuggggcggcagcuacaucgcgcucgacuccgggcgcggcaacugggacugcaucaugaccagcuaccaguaccugaucauccagaacaccacgugggaggaccacugccaguucucccggcccagccccaucggguaccugggccuccugucccagcgcacccgggacaucuacaucagccgccggcugcucggcaccuucaccuggacgcugagcgacuccgaggggaaggacaccccgggcggguacugccugacccgcuggaugcucaucgaggccgagcugaagugcuucggcaacaccgccguggccaagugcaacgagaagcacgacgaggaguucugcgacaugcugcggcuguucgacuucugcaagcaggccauccagcgccugaaggcgcccgcccagaugagcauccagcugaucaacaaggccgugaacgcccucaucaacgaccagcugaucaugaagaaccaccuccgggacaucauggggauccccuacugcaacuacuccaaguacugcuaccucaaccacacgaccaccggccgcaccagccugcccaagugcugccuggucuccaacggcagcuaccucaacgagacgcacuucuccgacgacaucgagcagcaggccgacaacaugaucaccgagaugcugcagaaggaguacauggagcggcaggggaagacgccccugggccucguggaccuguucguguucagcaccuccuucuaccugaucagcaucuuccugcaccucgucaagaucccgacccaccgccacaucguggggaaguccugccccaagccccaccggcugaaccacaugggcaucugcagcugcgggcuguacaagcagcccggcgugccggucaaguggaagcgcugaggacuagucccuguucccagagcccacuuuuuuuucuuuuuuugaaauaaaauagccugucuuucagaucuaaaaaaaaaaaaaaaaaaaaaaaaaaaaaaaaaaaaaaaaaaaaaaaaaaaaaaaaaaaaaaaaaaaaaaaaaaaaaaaaaaaaaaaaaaaaaaaaaaaa

SEQ ID NO: 33542 - RNA, 1721 nt, Artificial Sequence
  mRNA product Design a-1 (A100) comprising derived and/or modified sequence from LASV(LP;Clade I)__AAF86701__GPCmut8 (opt1)
aggagagucccgcagucggcguccagcggcucugcuuguucgugugugugucguugcaggccuuauucaagcuuaccaugggccagaucaucaccuucuuccaggaggugccccacgucaucgaggaggugaugaacaucgugcugaucgcccucagccugcuggccauccucaaggggcuguacaacaucgcgaccugcggcaucaucgggcuggucgccuuccucuuccugugcggcaaguccugcagccugacgcucaagggcggguacgagcugcagacccuggagcucaacauggagacccugaacaugugcaugccgcuguccugcacgaagaacagcucccaccacuacauccgcgugggcaacgagaccgggcucgagcugacccugaccaacacgagcaucaucaaccacaaguucugcaaccucuccgacgcccacaagaagaaccuguacgaccacgcccugaugagcaucaucuccaccuuccaccucagcauccccaacuucaaccaguacgaggccauguccugcgacuucaacggcgggaagaucagcgugcaguacaaccugucccacagcuacgcgggcgacgccgccgagcacugcgggaccgucgccaacggcgugcugcagaccuucaugcggauggcguggggcgggcgcuacaucgcccucgacuccggcaaggggaacugggacugcaucaugacgagcuaccaguaccugaucauccagaacaccaccugggaggaccacugccaguucucccggcccagccccaucggcuaccugggccuccugucccagcgcacccgggacaucuacaucagccgccggcugcucgggacguucaccuggacccugagcgacuccgagggcaacgagacccccgggggcuacugccugacgcgcuggaugcucaucgaggccgagcugaagugcuucgggaacaccgccguggccaagugcaacgagaagcacgacgaggaguucugcgacaugcugcggcuguucgacuucugcaagcaggcgauccgccggcugaaggcccccgcccagaugagcauccagcugaucaacaaggccgucaacgcccucaucaacgaccagcugaucaugaagaaccaccuccgcgacaucaugggcauccccuacugcaacuacuccaaguacugcuaccucaaccacaccagcuccggccggaccagccugcccaagugcugccugaucuccaacgggagcuaccucaacgagacgcaguucuccgacgacaucgagcagcaggcggacaacaugaucaccgagaugcugcagaaggaguacaucgagcgccagggcaagaccccgcuggggcucguggacaucuucaucuucagcaccuccuucuaccugaucagcaucuuccugcaccugaucaagaucccgacgcaccggcacaucgugggcaagcccugccccaagccccaccgccucaaccacaugggggucugcuccugcggccuguacaagcacccgggcgugcccaccaaguggaagcggugaggacuagucccuguucccagagcccacuuuuuuuucuuuuuuugaaauaaaauagccugucuuucagaucuaaaaaaaaaaaaaaaaaaaaaaaaaaaaaaaaaaaaaaaaaaaaaaaaaaaaaaaaaaaaaaaaaaaaaaaaaaaaaaaaaaaaaaaaaaaaaaaaaaaa

SEQ ID NO: 33543 - RNA, 1721 nt, Artificial Sequence
  mRNA product Design a-1 (A100) comprising derived and/or modified sequence from LASV(803213;Clade II)__AAF86703__GPCmut8 (opt1)
aggagagucccgcagucggcguccagcggcucugcuuguucgugugugugucguugcaggccuuauucaagcuuaccaugggccagaucaucaccuucuuccaggaggugccccacgucaucgaggaggugaugaacaucgugcugaucgcccucagccugcuggccauccucaaggggaucuacaacgucgcgaccugcggccuguucgggcugaucuccuuccuccugcugugcggccgcagcugcuccgugacguacaaggggguguacgagcuccagacccuggagcugaacauggccaaccucaacaugugcaugccgcugagcugcaccaagaacaacucccaccacuacaucauggucggcaacgagacgggccuggagcucacccugaccaacaccagcaucaucaaccacaaguucugcaaccuguccgacgcccacaagaagaaccucuacgaccacgcccugaugagcaucaucuccacguuccaccugagcauccccaacuucaaccaguacgaggccauguccugcgacuucaacgggggcaagaucagcgugcaguacaaccucucccacagcuucgcgguggacgccgccaaccacugcgggaccaucgccaacggcguccugcagaccuucaugcggauggcguggggcggguccuacaucgcccuggacagcggcaaggggaacugggacugcaucaugaccuccuaccaguaccucaucauccagaacacgaccugggaggaccacugccaguucagccgccccucccccaucggcuaccuggggcugcucagccagcggacccgcgacaucuacaucagccggcgccugcugggcaccuucacguggacccucuccgacagcgagggcaacgaggcccccgggggcuacugccugacccgguggaugcugaucgaggccgagcucaagugcuucgggaacaccgccguggcgaagugcaacgagaagcacgacgaggaguucugcgacaugcugcgccuguucgacuucugcaagcaggccaucaagcggcucaagacgcccgcccagauguccauccagcugaucaacaaggccgugaacgcccugaucaacgaccagcucaucaugaagaaccaccuccgcgacaucaugggcauccccuacugcaacuacagccgguacugcuaccugaaccacaccgucaccgggaagaccucccugccccgcugcugccuggugagcaacggcuccuaccugaacgagacgcacuucagcgacgacaucgagcagcaggcggacaacaugaucaccgagaugcuccagaaggaguacauggaccggcagggcaagaccccgcuggggcugguggaccucuucgucuucuccaccagcuucuaccugaucuccaucuuccugcaccuggugaagaucccgacgcaccgccacaucgugggcaagcccugccccaagccccaccggcucaaccacauggggaucugcagcugcggccuguacaagcacccggggguccccgugaaguggaagcgcugaggacuagucccuguucccagagcccacuuuuuuuucuuuuuuugaaauaaaauagccugucuuucagaucuaaaaaaaaaaaaaaaaaaaaaaaaaaaaaaaaaaaaaaaaaaaaaaaaaaaaaaaaaaaaaaaaaaaaaaaaaaaaaaaaaaaaaaaaaaaaaaaaaaaa

SEQ ID NO: 33544 - RNA, 1721 nt, Artificial Sequence
  mRNA product Design a-1 (A100) comprising derived and/or modified sequence from LASV(GA391;Clade III)__CAA36645__GPCmut8 (opt1)
aggagagucccgcagucggcguccagcggcucugcuuguucgugugugugucguugcaggccuuauucaagcuuaccaugggccagaucgugaccuucuuccaggaggucccccacgugaucgaggaggugaugaacaucguccugaucgcccucagcauccuggccauccugaaggggcucuacaacguggcgaccugcggccugaucgggcuggugacguuccuccugcuguccggccgcagcugcucccucaucuacaaggggaccuacgagcugcagacccuggagcucaacauggagacccugaacaugugcaugccgcugagcugcaccaagaacaacucccaccacuacauccgggucggcaacgagaccggccucgagcugacccugacgaacaccagcauccucaaccacaaguucugcaaccuguccgacgcccacaagcgcaaccuguacgaccacagccucauguccaucaucagcaccuuccaccuguccauccccaacuucaaccaguacgaggccaugagcugcgacuucaacgggggcaagaucaccgugcaguacaaccugucccacagcuucgccguggacgccgcggggcacugcggcacgcucgccaacgggguccugcagaccuucaugcggauggccuggggcggcuccuacaucgcccuggacagcgggcgcggcaacugggacugcaucaugaccuccuaccaguaccucaucauccagaacaccacgugggacgaccacugccaguucagccggcccucccccaucggguaccugggccugcucagccagcgcacccgggacaucuacaucagccgccggcugcugggcaccuucaccuggacgcucuccgacagcgaggggaacgagaccccgggcggguacugccugacccgcuggaugcugaucgaggcggagcucaagugcuucggcaacaccgccguggccaagugcaacgagaagcacgacgaggaguucugcgacaugcugcggcuguucgacuucugcaagcaggccauccgccggcucaagacgcccgcccagauguccauccagcugaucaacaaggcggugaacgcccugaucaacgaccagcucaucaugaagaaccaccuccgcgacaucauggggauccccuacugcaacuacagccgguacugcuaccugaaccacaccuccaccggcaagaccagccugccccgcugcugccugaucuccaacggcagcuaccugaacgagacgaaguucuccgacgacaucgagcagcaggccgacaacaugaucaccgagaugcuccagaaggaguacaucgaccggcaggggaagacgccccugggccuggucgaccuguucguguucagcaccuccuucuaccucaucagcaucuuccugcaccuggugaagaucccgacccaccgccacaucgucgggaagcccugccccaagccccaccggcucaaccacaugggcaucugcuccugcgggcuguacaagcagccgggcgugcccgugcgcuggaagcggugaggacuagucccuguucccagagcccacuuuuuuuucuuuuuuugaaauaaaauagccugucuuucagaucuaaaaaaaaaaaaaaaaaaaaaaaaaaaaaaaaaaaaaaaaaaaaaaaaaaaaaaaaaaaaaaaaaaaaaaaaaaaaaaaaaaaaaaaaaaaaaaaaaaaa

SEQ ID NO: 33545 - RNA, 1724 nt, Artificial Sequence
  mRNA product Design a-1 (A100) comprising derived and/or modified sequence from LASV(AV;Clade V)__CCA30314__GPCmut8 (opt1)
aggagagucccgcagucggcguccagcggcucugcuuguucgugugugugucguugcaggccuuauucaagcuuaccaugggccagaucgugaccuucuuccaggaggucccccacgugaucgaggaggugaugaacaucguccugaucgcccucagcauccuggccgugcugaaggggcucuacaacaucgcgaccugcggccugaucgggcugaucacguuccuccugcugugcggccgcuccugcagcuccaaccucuacaaggggguguacgagcugcagagccuggaccucaacauggagacccugaacaugugcaugccgcuguccugcaccaagaacaacagccaccacuacauccgggucggcaacgacacgggccucgagcugacccugaccaacaccuccauccucaaccacaaguucugcaaccugagcgacgcccacaagaaggaccuguacgaccacgcccucauguccaucaucagcacguuccaccuguccauccccaacuucaaccaguacgaggccaugagcugcgacuucaacgggggcaagaucuccgugcaguacaaccugagccacuccuacgccaucgacgcggccaaccacugcgggaccguggccaacggcauccuccagaccuucaugcgcauggccuggggcgggagcuacaucgcgcuggacuccggccgggggaacugggacugcaucaugaccagcuaccaguaccugaucauccagaacacgaccugggagaaccacugccaguucucccgccccagccccaucggcuaccucgggcugcugagccagcggacccgcgacaucuacaucucccggcgccuccugggcaccuucacguggacccugagcgacuccgagggcaacgccacccccgggggcuacugccucacccgguggaugcugaucgaggccgagcugaagugcuucgggaacacggccgucgccaagugcaacgagaagcacgacgaggaguucugcgacaugcuccgccuguucgacuucugcaagcaggcgaucagccggcugaagucccccgcccagaugagcauccagcucaucaacaaggccgugaacgcccugaucaacgaccagcugaucaugaagaaccaccuccgcgacaucaugggcauccccuacugcaacuacuccaaguacugcuaccugaaccacaccaucaccgggaagaccagccugcccaagugcugccucguguccaacggcagcuaccugaacgagacgcacuucuccgacgacaucgagcagcaggccgacaacaugaucaccgagaugcugcagaaggaguacauggagcggcagggcaagaccccgcucgggcuggucgaccuguucguguucagcaccuccuucuaccugaucagcaucuuccuccgccuggugaagaucccgacgcaccggcacaucgucggcaagcccugccccaagccccaccgccugaaccacauggggaucugcuccugcggccucuacaagcagccgggggugcccgugcgguggaagcgcugaggacuagucccuguucccagagcccacuuuuuuuucuuuuuuugaaauaaaauagccugucuuucagaucuaaaaaaaaaaaaaaaaaaaaaaaaaaaaaaaaaaaaaaaaaaaaaaaaaaaaaaaaaaaaaaaaaaaaaaaaaaaaaaaaaaaaaaaaaaaaaaaaaaaa

SEQ ID NO: 33546 - RNA, 1721 nt, Artificial Sequence
  mRNA product Design a-1 (A100) comprising derived and/or modified sequence from LASV(Togo/2016/7082;Clade VI)__AMR44577__GPCmut8 (opt1)
aggagagucccgcagucggcguccagcggcucugcuuguucgugugugugucguugcaggccuuauucaagcuuaccaugggccagaucaucaccuucuuccaggaggugccccacgucaucgaggaggugaugaacaucgugcugaucgcccucagccugcuggccauccucaagggggucuacaacguggcgaccugcggcaucaucgggcuggugacguuccuguuccucugcggccgcuccugcagccugaucuacaagggguccuacgagcugcagacccucgagcugaacauggagacccugaacaugugcaugccgcucagcugcacgaagaacuccagccaccacuacauccgggucggcaacgagaccggccuggagcugacccucaccaacacguccaucaucaaccacaaguucugcaaccugagcgacgcccacaagcgcaaccuguacgaccacgcccucauguccauccugagcaccuuccaccuguccauccccaacuucaaccaguacgaggccaugagcugcgacuucaacgggggcaagaucuccgugcaguacaaccucagccacgccuacgcgguggacgccgccgagcacugcgggaccgucgccaacggcgugcugcagaccuucaugcggauggcguggggcggguccuacaucgcccuggacagcggccgcgggaacugggacugcaucaugacguccuaccaguaccucaucauccagaacaccaccugggaggaccacugccaguucagccggcccucccccaucggcuaccuggggcugcucagccagcgcacccgggacaucuacaucagccgccggcugcugggcacguucaccuggacccucuccgacagcgagggcaacgagacccccgggggcuacugccugacgcgcuggaugcugaucgaggccgagcucaagugcuucgggaacaccgccguggccaagugcaacgagaagcacgacgaggaguucugcgacaugcugcggcuguucgacuucugcaagcaggcgauccagcgccucaagucccccgcccagaugagcauccagcugaucaacaaggccgucaacgcccugaucaacgaccagcucaucaugaagaaccaccuccgggacaugaugggcauccccuacugcaacuacuccaaguacugcuaccugaaccacaccagcuccgggcgcaccagccugcccaagugcugccugguguccaacggcagcuaccugaacgagacgcacuucuccgacgacaucgagcagcaggccgacaacaugaucaccgagaugcuccagaaggaguacaucgaccggcagggcaagaccccgcuggggcugguggaccucuucgucuucagcaccuccuucuaccugaucagcaucuuccugcaccugaucaagaucccgacgcaccgccacaucgugggcaagcccugccccaagccccaccggcucaaccacauggggaucugcuccugcggccuguacaagcagccgggggugcccacccgcuggaagcggugaggacuagucccuguucccagagcccacuuuuuuuucuuuuuuugaaauaaaauagccugucuuucagaucuaaaaaaaaaaaaaaaaaaaaaaaaaaaaaaaaaaaaaaaaaaaaaaaaaaaaaaaaaaaaaaaaaaaaaaaaaaaaaaaaaaaaaaaaaaaaaaaaaaaa

SEQ ID NO: 33547 - RNA, 1721 nt, Artificial Sequence
  mRNA product Design a-1 (A100) comprising derived and/or modified sequence from LASV(KAK-428;Clade n.d. (VII))__ANH09740__GPCmut8 (opt1)
aggagagucccgcagucggcguccagcggcucugcuuguucgugugugugucguugcaggccuuauucaagcuuaccaugggccagaucgugaccuucuuccaggaggucccccacgugaucgaggaggugaugaacaucguccugaucgcccucagccugcuggccauccucaaggggcuguacaacuucgcgaccugcggcgugaucgggcugaucacguuccuccugcugugcggccgcuccugcagcgccaccuacaaggggcaguacgagcuccagacccuggagcugaacauggagucccucaacaugugcaugccgcugagcugcacgaagaacaacucccaccacuacauccgggccggcaacaacaccggccuggagcucacccugaccaacacgagcaucaucucccacaaguucugcaaccugagcgacgcccacaagaagaaccucuacgaccacacccugauguccaucaucaccaccuuccaccugagcauccccaacuucaaccaguacgaggccauguccugcgacuucaacgggggcaagaucagcauccaguacaaccucucccacagcuacgcgggggacgccgcccagcacugcggcacgguggccaacgggguccugcagaccuucaugcgcauggcguggggcggcuccuaccuggcccucgacagcgggcggcgcggcugggacugcaucaucuccagcuaccaguaccugaucauccagaacaccaccugggacgaccacugccaguucucccggcccagccccaucggguaccugggcuucgugagccagaagacgcgcgacaucuacaucucccggcgccuccugggcaccuucaccuggacccugagcgacuccgaggggcacgacaugccgggcggguacugccucacgcgguggaugcugaucgaggccgaccugaagugcuucggcaacaccgccguggccaagugcaacgagaagcacgacgaggaguucugcgacauguggcgccucuucgacuucugcaagcaggcgauccagcggcugaaggcccccgcccagaugaacauccagcugaucaacaaggccgucaacgcccucaucaacgaccagcugaugaugaagaaccaccuccgcgacaucauggggauccccuacugcaacuacagcaaguucugcuaccugaacaacaccaccacgggccggaccucccugccccgcugcugccugaucagcaacggcuccuaccucaacgagacccacuucagcgacgacaucgagcagcaggcggacaacaugaucaccgagaugcugcagaaggaguacauggaccggcaggggaagacgccccugggccucguggaccuguucguguucuccaccagcuucuaccugaucaccaucuuccuccaccuggucaagaucccgacccaccgccacaucguggggaagcccugccccaagccccaccggcugaaccacaugggcaucugcuccugcgggcuguacaagcagccgggcgugcccguccgcuggaagcggugaggacuagucccuguucccagagcccacuuuuuuuucuuuuuuugaaauaaaauagccugucuuucagaucuaaaaaaaaaaaaaaaaaaaaaaaaaaaaaaaaaaaaaaaaaaaaaaaaaaaaaaaaaaaaaaaaaaaaaaaaaaaaaaaaaaaaaaaaaaaaaaaaaaaa

SEQ ID NO: 33548 - RNA, 1721 nt, Artificial Sequence; identical to SEQ ID NO: 33542
  mRNA product Design a-1 (A100) comprising derived and/or modified sequence from LASV(Pinneo-NIG-1969;Clade I)__AIT17836__GPCmut8 (opt1)

SEQ ID NO: 33549 - RNA, 1721 nt, Artificial Sequence
  mRNA product Design a-1 (A100) comprising derived and/or modified sequence from LASV(ISTH0009-NIG-2011;Clade II)__AIT17404__GPCmut8 (opt1)
aggagagucccgcagucggcguccagcggcucugcuuguucgugugugugucguugcaggccuuauucaagcuuaccaugggccagaucaucaccuucuuccaggaggugccccacgucaucgaggaggugaugaacaucgugcugaucgcccucagccugcuggccauccucaaggggaucuacaacgucgcgaccugcggccuguucgggcugguguccuuccuccugcugugcggccgcagcugcuccacgaccuacaaggggguguacgagcuccagacccuggagcuggacauggccagccucaacaugugcaugccgcuguccugcacgaagaacaacagccaccacuacaucauggucggcaacgagaccggccuggagcucacccugaccaacacguccaucaucaaccacaaguucugcaaccugagcgacgcccacaagaagaaccucuacgaccacgcccugauguccaucaucagcaccuuccaccuguccauccccaacuucaaccaguacgaggccaugagcugcgacuucaacgggggcaagaucuccgugcaguacaaccucagccacgcguacgccguggacgccgccaaccacugcgggaccaucgcgaacggcguccugcagaccuucaugcggauggccuggggcggguccuacaucgcccuggacagcggcaagggguccugggacugcaucaugacgagcuaccaguaccucaucauccagaacaccaccugggaggaccacugccaguucucccgccccagccccaucggcuaccuggggcugcucagccagcggacccgcgacaucuacaucucccggcgccugcugggcacguucaccuggacccucagcgacuccgagggcaacgagacccccgggggcuacugccugacgcgguggaugcugaucgaggccgagcucaagugcuucgggaacaccgccguggcgaagugcaacgagaagcacgacgaggaguucugcgacaugcugcgccuguucgacuucugcaagcaggccauccggcgccucaagacccccgcccagaugagcauccagcugaucaacaaggccgugaacgcccugaucaacgaccagcucaucaugaagaaccaccuccgggacaucaugggcaucccguacugcaacuacuccaaguacugcuaccugaaccacaccgucacggggaagaccagccugccccgcugcugccugguguccaacggcagcuaccugaacgagacccacuucuccgacgacaucgagcagcaggcggacaacaugaucaccgagcuccugcagaaggaguacauggaccggcagggcaagacgccccuggggcucguggaccuguucgucuucagcaccuccuucuaccugaucagcaucuuccugcaccucaucaagaucccgacccaccgccacaucaccggcaagcccugccccaagccccaccggcugaaccacauggggaucugcuccugcggccuguacaagcacccgggggugcccgugaaguggaagcgcugaggacuagucccuguucccagagcccacuuuuuuuucuuuuuuugaaauaaaauagccugucuuucagaucuaaaaaaaaaaaaaaaaaaaaaaaaaaaaaaaaaaaaaaaaaaaaaaaaaaaaaaaaaaaaaaaaaaaaaaaaaaaaaaaaaaaaaaaaaaaaaaaaaaaa

SEQ ID NO: 33550 - RNA, 1721 nt, Artificial Sequence
  mRNA product Design a-1 (A100) comprising derived and/or modified sequence from LASV(ISTH2010-NIG-2012;Clade II)__AIT17482__GPCmut8 (opt1)
aggagagucccgcagucggcguccagcggcucugcuuguucgugugugugucguugcaggccuuauucaagcuuaccaugggccagaucaucaccuucuuccaggaggugccccacgucaucgaggaggugaugaacaucgugcugaucgcccucagccugcuggccauccucaaggggaucuacaacgucgcgaccugcggccuguucgggcugguguccuuccuccugcugugcggccgcagcugcuccacgaccuacaaggggguguacgagcuccagacccuggagcuggacauggccagccucaacaugugcaugccgcuguccugcacgaagaacaacagccaccacuacaucauggucggcaacgagaccggccuggagcucacccugaccaacacguccaucaucaaccacaaguucugcaaccugagcgacgcccacaagaagaaccucuacgaccacgcccugauguccaucaucagcaccuuccaccuguccauccccaacuucaaccaguacgaggccaugagcugcgacuucaacgggggcaagaucuccgugcaguacaaccucagccacgcguacgccguggacgccgccaaccacugcgggaccaucgcgaacggcguccugcagaccuucaugcggauggccuggggcggguccuacaucgcccuggacagcggcaagggguccugggacugcaucaugacgagcuaccaguaccucaucauccagaacaucaccugggaggaccacugccaguucucccgccccagccccaucggcuaccuggggcugcucagccagcggacccgcgacaucuacaucucccggcgccugcugggcaccuucacguggacccucagcgacuccgagggcaacgagacccccgggggcuacugccugacccgguggaugcugaucgaggccgagcucaagugcuucgggaacacggccguggcgaagugcaacgagaagcacgacgaggaguucugcgacaugcugcgccuguucgacuucugcaagcaggccauccggcgccucaagacccccgcccagaugagcauccagcugaucaacaaggccgugaacgcccugaucaacgaccagcucaucaugaagaaccaccuccgggacaucaugggcauccccuacugcaacuacuccaaguacugcuaccugaaccacaccgucaccgggaagacgagccugccccgcugcugccugguguccaacggcagcuaccugaacgagacccacuucuccgacgacaucgagcagcaggcggacaacaugaucaccgagcuccugcagaaggaguacaucgaccggcagggcaagaccccgcuggggcucguggaccuguucgucuucagcacguccuucuaccugaucagcaucuuccugcaccucgugaagaucccgacccaccgccacguggucggcaagcccugccccaagccccaccggcugaaccacauggggaucugcuccugcggccuguacaagcacccgggggugcccgugaaguggaagcgcugaggacuagucccuguucccagagcccacuuuuuuuucuuuuuuugaaauaaaauagccugucuuucagaucuaaaaaaaaaaaaaaaaaaaaaaaaaaaaaaaaaaaaaaaaaaaaaaaaaaaaaaaaaaaaaaaaaaaaaaaaaaaaaaaaaaaaaaaaaaaaaaaaaaaa

SEQ ID NO: 33551 - RNA, 1721 nt, Artificial Sequence
  mRNA product Design a-1 (A100) comprising derived and/or modified sequence from LASV(Lassa virus/H.sapiens-wt/NGA/2015/ISTH_0543;Clade II)__AVO03639__GPCmut8 (opt1)
aggagagucccgcagucggcguccagcggcucugcuuguucgugugugugucguugcaggccuuauucaagcuuaccaugggccagaucaucaccuucuuccaggaggugccccacgucaucgaggaggugaugaacaucgugcugaucgcccucagccugcuggccauccucaaggggaucuacaacgucgcgaccugcggccuguucgggcugguguccuuccuccugcugugcggccgcagcugcuccacgaccuacaaggggguguacgagcuccagacccuggagcuggacauggccaaccucaacaugugcaugccgcugagcugcacgaagaacaacucccaccacuacaucauggucggcaacgagaccggccuggagcucacccugaccaacacgagcaucaucaaccacaaguucugcaaccuguccgacgcccacaagaagaaccucuacgaccacgcccugaugagcaucaucuccaccuuccaccugagcauccccaacuucaaccaguacgaggccauguccugcgacuucaacgggggcaagaucagcgugcaguacaaccucucccacaccuacgcgguggacgccgccaaccacugcgggaccaucgccaacggcguccugcagacguucaugcggauggcguggggcgggagcuacaucgcccuggacuccggcaaggggagcugggacugcaucaugaccuccuaccaguaccucgugauccagaacaccaccugggaggaccacugccaguucagccgccccucccccaucggcuaccuggggcugcucagccagcggacgcgcgacaucuacaucagccggcgccugcugggcaccuucaccuggacccucuccgacagcgagggcaacgagacgcccgggggcuacugccugacccgguggaugcugaucgaggccgagcucaagugcuucgggaacaccgccguggccaagugcaacgagaagcacgacgaggaguucugcgacaugcugcgccuguucgacuucugcaagcaggcgauccggcgccucaagacccccgcccagauguccauccagcugaucaacaaggccgucaacgcccugaucaacgaccagcucaucaugaagaaccaccuccgggacaucaugggcauccccuacugcaacuacagcaaguacugcuaccugaaccacacggugaccgggaagaccucccugccccgcugcugccuggugagcaacggcuccuaccugaacgagacccacuucagcgacgacaucgagcagcaggccgacaacaugaucacggagcuccugcagaaggaguacaucgaccggcagggcaagaccccgcuggggcucgucgaccuguucguguucuccaccagcuucuaccugaucuccaucuuccugcaccucgugaagaucccgacccaccgccacaucacgggcaagcccugccccaagccccaccggcugaaccacauggggaucugcagcugcggccuguacaagcacccggggguccccgugaaguggaagcgcugaggacuagucccuguucccagagcccacuuuuuuuucuuuuuuugaaauaaaauagccugucuuucagaucuaaaaaaaaaaaaaaaaaaaaaaaaaaaaaaaaaaaaaaaaaaaaaaaaaaaaaaaaaaaaaaaaaaaaaaaaaaaaaaaaaaaaaaaaaaaaaaaaaaaa

SEQ ID NO: 33552 - RNA, 1721 nt, Artificial Sequence
  mRNA product Design a-1 (A100) comprising derived and/or modified sequence from LASV(Lassa virus/H.sapiens-wt/NGA/2016/ISTH_0009;Clade II)__AVO03571__GPCmut8 (opt1)
aggagagucccgcagucggcguccagcggcucugcuuguucgugugugugucguugcaggccuuauucaagcuuaccaugggccagaucaucaccuucuuccaggaggugccccacgucaucgaggaggugaugaacaucgugcugaucgcccucagccugcuggccauccucaaggggaucuacaacgucgcgaccugcggccugcuggggcucguguccuuccugcugcucugcggccgcagcugcuccacgaccuacaaggggguguacgagcugcagacccuggagcucgacauggccagccugaacaugugcaugccgcuguccugcacgaagaacaacagccaccacuacaucauggucggcaacgagaccggccucgagcugacccugaccaacacguccaucaucaaccacaaguucugcaaccucagcgacgcccacaagaagaaccuguacgaccacgcccugauguccaucaucagcaccuuccaccucuccauccccaacuucaaccaguacgaggccaugagcugcgacuucaacgggggccggaucuccgugcaguacaaccugagccacuccuacgcgguggacgccgccaaccacugcgggaccaucgccaacggcguccugcagaccuucaugcgcauggcguggggcgggagcuacaucgcccucgacuccggcaaggggagcugggacugcaucaugacguccuaccaguaccugaucauccagaacaccaccugggaggaccacugccaguucagccggcccagccccaucggcuaccuggggcuccugucccagcgcacccgggacaucuacaucagccgccggcugcucggcacguucaccuggacccuguccgacagcgagggcaacgagacccccgggggcuacugccugacgcgcuggaugcucaucgaggccgagcugaagugcuucgggaacaccgccguggccaagugcaacgagaagcacgacgaggaguucugcgacaugcugcggcuguucgacuucugcaagcaggcgauccgccggcugaagacccccgcccagauguccauccagcugaucaacaaggccgugaacgcccucaucaacgaccagcugaucaugaagaaccaccuccgcgacaucaugggcaucccguacugcaacuacagcaaguacugcuaccucaaccacaccgucacggggaagaccucccugccccggugcugccuggugagcaacggcuccuaccucaacgagacccacuucagcgacgacaucgagcagcaggccgacaacaugaucaccgagcugcugcagaaggaguacaucgaccgccagggcaagacgccccucgggcugguggaccuguucgucuucuccaccagcuucuaccugaucuccaucuuccuccaccuggugaagaucccgacccaccggcacaucaccggcaagcccugccccaagccccaccgccugaaccacauggggaucugcagcugcggccucuacaaccacccgggggugcccgucaaguggaagcggugaggacuagucccuguucccagagcccacuuuuuuuucuuuuuuugaaauaaaauagccugucuuucagaucuaaaaaaaaaaaaaaaaaaaaaaaaaaaaaaaaaaaaaaaaaaaaaaaaaaaaaaaaaaaaaaaaaaaaaaaaaaaaaaaaaaaaaaaaaaaaaaaaaaaa

SEQ ID NO: 33553 - RNA, 1721 nt, Artificial Sequence
  mRNA product Design a-1 (A100) comprising derived and/or modified sequence from LASV(Lassa virus/H.sapiens-wt/NGA/2016/ISTH_0017;Clade II)__AVO03567__GPCmut8 (opt1)
aggagagucccgcagucggcguccagcggcucugcuuguucgugugugugucguugcaggccuuauucaagcuuaccaugggccagaucaucaccuucuuccaggaggugccccacgucaucgaggaggugaugaacaucgugcugaucgcccucagccugcuggccauccucaaggggaucuacaacgucgcgaccugcggccuguucgggcugguguccuuccuccugcugugcggccgcagcugcuccacgaccuacaaggggguguacgagcuccagacccuggagcuggacauggccagccucaacaugugcaugccgcuguccugcacgaagaacaacagccaccacuacaucauggucggcaacgagaccggccuggagcucacccugaccaacacguccaucaucaaccacaaguucugcaaccugagcgacgcccacaagaagaaccucuacgaccacgcccugauguccaucaucagcaccuuccaccuguccauccccaacuucaaccaguacgaggccaugagcugcgacuucaacgggggcaagaucuccgugcaguacaaccucagccacaccuacgcgaucgacgccgccaaccacugcgggaccaucgccaacggcgugcugcagacguucaugcggauggcguggggcggguccuacaucgcccuggacagcggcaagggguccugggacugcaucaugaccagcuaccaguaccucaucauccagaacaccaccugggaggaccacugccaguucucccgccccagccccaucggcuaccuggggcugcucagccagcggacgcgcgacaucuacaucucccggcgccugcugggcaccuucaccuggacccucagcgacuccgagggcaacgagacgcccgggggcuacugccugacccgguggaugcugaucgaggccgagcucaagugcuucgggaacaccgccgucgccaagugcaacgagaagcacgacgaggaguucugcgacaugcugcgccuguucgacuucugcaagcaggcgauccggcgccucaagacccccgcccagaugagcauccagcugaucaacaaggccgugaacgcccugaucaacgaccagcucaucaugaagaaccaccuccgggacaucaugggcauccccuacugcaacuacuccaaguacugcuaccugaaccacacggugaccgggaagaccagccugccccgcugcugccuggucuccaacggcagcuaccugaacgagacccacuucuccgacgacaucgagcagcaggccgacaacaugaucacggagcuccugcagaaggaguacauggaccggcagggcaagaccccgcuggggcucguggaccuguucguguucagcaccuccuucuaccugaucagcaucuuccugcaccucguccgcaucccgacccaccggcacgugaucggcaagcccugccccaagccccaccgccugaaccacauggggaucugcuccugcggccuguacaagcacccgggggugcccgucaaguggaagcggugaggacuagucccuguucccagagcccacuuuuuuuucuuuuuuugaaauaaaauagccugucuuucagaucuaaaaaaaaaaaaaaaaaaaaaaaaaaaaaaaaaaaaaaaaaaaaaaaaaaaaaaaaaaaaaaaaaaaaaaaaaaaaaaaaaaaaaaaaaaaaaaaaaaaa

SEQ ID NO: 33554 - RNA, 1721 nt, Artificial Sequence
  mRNA product Design a-1 (A100) comprising derived and/or modified sequence from LASV(Lassa virus/H.sapiens-wt/NGA/2018/ISTH_0959;Clade II)__AVV65099__GPCmut8 (opt1)
aggagagucccgcagucggcguccagcggcucugcuuguucgugugugugucguugcaggccuuauucaagcuuaccaugggccagaucaucaccuucuuccaggaggugccccacgucaucgaggaggugaugaacaucgugcugaucgcccucagccugcuggccauccucaaggggaucuacaacgucgugaccugcggccuguucgggcugguguccuuccuccugcugugcggccgcagcugcuccacgaccuacaagggggucuacgagcuccagacccuggagcuggacauggcgagccucaacaugugcaugccgcuguccugcacgaagaacaacagccaccacuacaucauggugggcaacgagaccggccuggagcucacccugaccaacacguccaucaucaaccacaaguucugcaaccugagcgacgcccacaagaagaaccucuacgaccacgcccugauguccaucaucagcaccuuccaccuguccauccccaacuucaaccaguacgaggccaugagcugcgacuucaacgggggcaagaucuccgugcaguacaaccucagccacgccuacgcgaucgacgccgccaaccacugcgggaccaucgccaacggcguccugcagaccuucaugcggauggcguggggcggguccuacaucgcccuggacagcggcaagggguccugggacugcaucaugacgagcuaccaguaccucaucauccagaacaccaccugggaggaccacugccaguucucccgccccagccccaucggcuaccuggggcugcucagccagcggacccgcgacaucuacaucucccggcgccugcugggcacguucaccuggacccucagcgacuccgagggcaacgagacccccgggggcuacugccugacgcgguggaugcugaucgaggccgagcucaagugcuucgggaacaccgccguggccaagugcaacgagaagcacgacgaggaguucugcgacaugcugcgccuguucgacuucugcaagcaggcgauccggcgccucaagacccccgcccagaugagcauccagcugaucaacaaggccgugaacgcccugaucaacgaccagcucaucaugaagaaccaccuccgggacaucaugggcaucccguacugcaacuacuccaaguacugcuaccugaaccacaccgucacggggaagaccagccugccccgcugcugccugguguccaacggcagcuaccugaacgagacccacuucuccgacgacaucgagcagcaggccgacaacaugaucaccgagcuccugcagaaggaguacaucgaccggcagggcaagacgccccuggggcucguggaccuguucgucuucagcaccuccuucuaccugaucagcaucuuccugcaccucgugaagaucccgacccaccgccacgugaucggcaagcccugccccaagccccaccggcugaaccacauggggaucugcuccugcggccuguacaagcacccggggguccccgugaaguggaagcgcugaggacuagucccuguucccagagcccacuuuuuuuucuuuuuuugaaauaaaauagccugucuuucagaucuaaaaaaaaaaaaaaaaaaaaaaaaaaaaaaaaaaaaaaaaaaaaaaaaaaaaaaaaaaaaaaaaaaaaaaaaaaaaaaaaaaaaaaaaaaaaaaaaaaaa

SEQ ID NO: 33555 - RNA, 1721 nt, Artificial Sequence
  mRNA product Design a-1 (A100) comprising derived and/or modified sequence from LASV(LASV003-NIG-2008;Clade II)__AIT17580__GPCmut8 (opt1)
aggagagucccgcagucggcguccagcggcucugcuuguucgugugugugucguugcaggccuuauucaagcuuaccaugggccagaucaucaccuucuuccaggaggugccccacgucaucgaggaggugaugaacaucgugcugaucgcccucagccugcuggccauccucaaggggaucuacaacgucgcgaccugcggccuguucgggcugguguccuuccuccugcugugcggccgcagcugcuccacgaccuacaaggggguguacgagcuccagacccuggagcuggacauggccagccucaacaugugcaugccgcuguccugcacgaagaacaacagccaccacuacaucauggucggcaacgagaccggccuggagcucacccugaccaacacguccaucaucaaccacaaguucugcaaccugagcgacgcccacaagaagaaccucuacgaccacgcccugauguccaucaucagcaccuuccaccuguccauccccaacuucaaccaguacgaggccaugagcugcgacuucaacgggggcaagaucuccgugcaguacaaccucagccacaccuacgcgguggacgccgccaaccacugcgggaccaucgccaacggcguccugcagacguucaugcggauggcguggggcggguccuacaucgcccuggacagcggcaagggguccugggacugcaucaugaccagcuaccaguaccucaucauccagaacaccaccugggaggaccacugccaguucucccgccccagccccaucggcuaccuggggcugcucagccagcggacgcgcgacaucuacaucucccggcgccugcugggcaccuucaccuggacccucagcgacuccgagagcaacgagacgccgggcggguacugccugacccgguggaugcugaucgaggccgagcucaagugcuucggcaacaccgccguggccaagugcaacgagaagcacgacgaggaguucugcgacaugcugcgccuguucgacuucugcaagcaggcgauccggcgccucaaggcccccgcccagauguccauccagcugaucaacaaggccgugaacgcccugaucaacgaccagcucaucaugaagaaccaccuccgggacaucauggggauccccuacugcaacuacagcaaguacugcuaccugaaccacaccgucacgggccgcaccucccugccccggugcugccuggugagcaacggguccuaccugaacgagacccacuucagcgacgacaucgagcagcaggcggacaacaugaucaccgagcuccugcagaaggaguacauggaccgccagggcaagacgccccugggccucguggaccuguucgucuucuccaccagcuucuaccugaucuccaucuuccugcaccucgugaagaucccgacccaccggcacgugaucgggaagcccugccccaagccccaccgccugaaccacaugggcaucugcagcugcgggcuguacaagcacccgggcguccccgugaaguggaagcggugaggacuagucccuguucccagagcccacuuuuuuuucuuuuuuugaaauaaaauagccugucuuucagaucuaaaaaaaaaaaaaaaaaaaaaaaaaaaaaaaaaaaaaaaaaaaaaaaaaaaaaaaaaaaaaaaaaaaaaaaaaaaaaaaaaaaaaaaaaaaaaaaaaaaa

SEQ ID NO: 33556 - RNA, 1721 nt, Artificial Sequence
  mRNA product Design a-1 (A100) comprising derived and/or modified sequence from LASV(LASV035-NIG-2009;Clade II)__AIT17588__GPCmut8 (opt1)
aggagagucccgcagucggcguccagcggcucugcuuguucgugugugugucguugcaggccuuauucaagcuuaccaugggccagaucaucaccuucuuccaggaggugccccacgucaucgaggaggugaugaacaucgugcugaucgcccucagccugcuggccauccucaaggggaucuacaacgucgcgaccugcggccuguucgggcugguguccuuccuccugcugugcggccgcagcugcuccacgaccuacaaggggguguacgagcuccagacccuggagcuggacauggccagccucaacaugugcaugccgcuguccugcacgaagaacaacagccaccacuacaucauggucggcaacgagaccggccuggagcucacccugaccaacacguccaucaucaaccacaaguucugcaaccugagcgacgcccacaagaagaaccucuacgaccacgcccugauguccaucaucagcaccuuccaccuguccauccccaacuucaaccaguacgaggccaugagcugcgacuucaacgggggcaagaucuccgugcaguacaaccucagccacgcguacgccguggacgccgccaaccacugcgggaccaucgcgaacggcguccugcagaccuucaugcggauggccuggggcggguccuacaucgcccuggacagcggcaagggguccugggacugcaucaugacgagcuaccaguaccucaucauccagaacaccaccugggaggaccacugccaguucucccgccccagccccaucggcuaccuggggcugcucagccagcggacccgcgacaucuacaucucccggcgccugcugggcacguucaccuggacccucagcgacuccgagggcaacgagacccccgggggcuacugccugacgcgguggaugcugaucgaggccgagcucaagugcuucgggaacaccgccguggcgaagugcaacgagaagcacgacgaggaguucugcgacaugcugcgccuguucgacuucugcaagcaggccauccggcgccucaaggcccccgcccagaugagcauccagcugaucaacaaggccgugaacgcgcugaucaacgaccagcucaucaugaagaaccaccuccgggacaucaugggcauccccuacugcaacuacuccaaguacugcuaccugaaccacaccgucaccgggaagacgagccugccccgcugcugccugguguccaacggcagcuaccugaacgagacccacuucuccgacgacaucgagcagcaggccgacaacaugaucaccgagcuccugcagaaggaguacaucgaccggcagggcaagaccccgcuggggcucguggaccuguucgucuucagcacguccuucuaccugaucagcaucuuccugcaccucgugaagaucccgacccaccgccacgugaucggcaagcccugccccaagccccaccggcugaaccacauggggaucugcuccugcggccuguacaagcacccggggguccccgugaaguggaagcgcugaggacuagucccuguucccagagcccacuuuuuuuucuuuuuuugaaauaaaauagccugucuuucagaucuaaaaaaaaaaaaaaaaaaaaaaaaaaaaaaaaaaaaaaaaaaaaaaaaaaaaaaaaaaaaaaaaaaaaaaaaaaaaaaaaaaaaaaaaaaaaaaaaaaaa

SEQ ID NO: 33557 - RNA, 1721 nt, Artificial Sequence
  mRNA product Design a-1 (A100) comprising derived and/or modified sequence from LASV(LASV1000-NIG-2009;Clade II)__AIT17782__GPCmut8 (opt1)
aggagagucccgcagucggcguccagcggcucugcuuguucgugugugugucguugcaggccuuauucaagcuuaccaugggccagaucaucaccuucuuccaggaggugccccacgucaucgaggaggugaugaacaucgugcugaucgcccucagccugcuggccauccucaaggggaucuacaacgucgcgaccugcggccuguucgggcugguguccuuccuccugcugugcggccgcagcugcuccacgaccuacaaggggguguacgagcuccagacccuggagcuggacauggccagccucaacaugugcaugccgcuguccugcacgaagaacaacagccaccacuacaucauggucggcaacgagaccggccuggagcucacccugaccaacacguccaucaucaaccacaaguucugcaaccugagcgacgcccacaagaagaaccucuacgaccacgcccugauguccaucaucagcaccuuccaccuguccauccccaacuucaaccaguacgaggccaugagcugcgacuucaacgggggcaagaucuccgugcaguacaaccucagccacaccuacgcgguggacgccgccaaccacugcgggaccaucgccaacggcguccugcagacguucaugcggauggcguggggcggguccuacaucgcccuggacagcggcaagggguccugggacugcaucaugaccagcuaccaguaccucaucauccagaacaccaccugggaggaccacugccaguucucccgccccagccccaucggcuaccuggggcugcucagccagcggacgcgcgacaucuacaucucccggcgccugcugggcaccuucaccuggacccucagcgacuccgagggcaacgagacgcccgggggcuacugccugacccgguggaugcugaucgaggccgagcucaagugcuucgggaacaccgccguggccaagugcaacgagaagcacgacgaggaguucugcgacaugcugcgccuguucgacuucugcaagcaggcgaucaagcggcucaagacccccgcccagaugagcauccagcugaucaacaaggccgugaacgcccugaucaacgaccagcucaucaugaagaaccaccuccgcgacaucaugggcauccccuacugcaacuacuccaaguacugcuaccugaaccacacggucaccgggaagaccagccugccccggugcugccugguguccaacggcagcuaccugaacgagacccacuucuccgacgacaucgagcagcaggccgacaacaugaucacggagcuccugcagaaggaguacaucgaccgccagggcaagaccccgcuggggcucguggaccuguucgucuucagcaccuccuucuaccugaucagcaucuuccugcaccucgugaagaucccgacccaccggcacguggucggcaagcccugccccaagccccaccgccugaaccacauggggaucugcuccugcggccuguacaagcacccgggggugcccgugaaguggaagcggugaggacuagucccuguucccagagcccacuuuuuuuucuuuuuuugaaauaaaauagccugucuuucagaucuaaaaaaaaaaaaaaaaaaaaaaaaaaaaaaaaaaaaaaaaaaaaaaaaaaaaaaaaaaaaaaaaaaaaaaaaaaaaaaaaaaaaaaaaaaaaaaaaaaaa

SEQ ID NO: 33558 - RNA, 1721 nt, Artificial Sequence
  mRNA product Design a-1 (A100) comprising derived and/or modified sequence from LASV(LASV221-NIG-2010;Clade II)__AIT17624__GPCmut8 (opt1)
aggagagucccgcagucggcguccagcggcucugcuuguucgugugugugucguugcaggccuuauucaagcuuaccaugggccagaucaucaccuucuuccaggaggugccccacgucaucgaggaggugaugaacaucgugcugaucgcccucagccugcuggccauccucaaggggaucuacaacgucgcgaccugcggccuguucgggcugguguccuuccuccugcugugcggccgcagcugcuccacgaccuacaaggggguguacgagcuccagacccuggagcuggacauggccagccucaacaugugcaugccgcuguccugcacgaagaacaacagccaccacuacaucauggucggcaacgagaccggccuggagcucacccugaccaacacguccaucaucaaccacaaguucugcaaccugagcgacgcccacaagaagaaccucuacgaccacgcccugauguccaucaucagcaccuuccaccuguccauccccaacuucaaccaguacgaggccaugagcugcgacuucaacgggggcaagaucuccgugcaguacaaccucagccacaccuacgcgaucgacgccgccaaccacugcgggaccaucgccaacggcgugcugcagacguucaugcggauggcguggggcggguccuacaucgcccuggacagcggcaagggguccugggacugcaucaugaccagcuaccaguaccucaucauccagaacaccaccugggaggaccacugccaguucucccgccccagccccaucggcuaccuggggcugcucagccagcggacgcgcgacaucuacaucucccggcgccugcugggcaccuucaccuggacccucagcgacuccgagggcaacgagacgcccgggggcuacugccugacccgguggaugcugaucgaggccgagcucaagugcuucgggaacaccgccgucgccaagugcaacgagaagcacgacgaggaguucugcgacaugcugcgccuguucgacuucugcaagcaggcgauccggcgccucaagacccccgcccagaugagcauccagcugaucaacaaggccgugaacgcccugaucaacgaccagcucaucaugaagaaccaccuccgggacaucaugggcauccccuacugcaacuacuccaaguacugcuaccugaaccacacggugaccgggaagaccagccugccccgcugcugccuggucuccaacggcagcuaccugaacgagacccacuucuccgacgacaucgagcagcaggccgacaacaugaucacggagaugcuccagaaggaguacauggaccggcagggcaagaccccgcuggggcugguggaccucuucguguucagcaccuccuucuaccugaucagcaucuuccugcaccuggucaagaucccgacccaccgccacgugaucggcaagcccugccccaagccccaccggcucaaccacauggggaucugcuccugcggccuguacaagcacccgggggugcccgucaaguggaagcgcugaggacuagucccuguucccagagcccacuuuuuuuucuuuuuuugaaauaaaauagccugucuuucagaucuaaaaaaaaaaaaaaaaaaaaaaaaaaaaaaaaaaaaaaaaaaaaaaaaaaaaaaaaaaaaaaaaaaaaaaaaaaaaaaaaaaaaaaaaaaaaaaaaaaaa

SEQ ID NO: 33559 - RNA, 1721 nt, Artificial Sequence
  mRNA product Design a-1 (A100) comprising derived and/or modified sequence from LASV(LASV237-NIG-2010;Clade II)__AIT17638__GPCmut8 (opt1)
aggagagucccgcagucggcguccagcggcucugcuuguucgugugugugucguugcaggccuuauucaagcuuaccaugggccagaucaucaccuucuuccaggaggugccccacgucaucgaggaggugaugaacaucgugcugaucgcccucagccugcuggccauccucaaggggaucuacaacgucgcgaccugcggccuguucgggcugguguccuuccuccugcugugcggccgcagcugcuccacgaccuacaaggggguguacgagcuccagacccuggagcuggacauggccagccucaacaugugcaugccgcuguccugcacgaagaacaacagccaccacuacaucauggucggcaacgagaccggccuggagcucacccugaccaacacguccaucaucaaccacaaguucugcaaccugagcgacgcccacaagaaggaccucuacgaccacgcccugauguccaucaucagcaccuuccaccuguccauccccaacuucaaccaguacgaggccaugagcugcgacuucaacgggggcaagaucuccgugcaguacaaccucagccacaccuacgcgguggacgccgccaaccacugcgggaccaucgccaacggcguccugcagacguucaugcggauggcguggggcggguccuacaucgcccuggacagcggcaagggguccugggacugcaucaugaccagcuaccaguaccucaucauccagaacaccaccugggaggaccacugccaguucucccgccccagccccaucggcuaccuggggcugcucagccagcggacgcgcgacaucuacaucucccggcgccugcugggcaccuucaccuggacccucagcgacuccgagggcaacgagacgcccgggggcuacugccugacccgguggaugcugaucgaggccgagcucaagugcuucgggaacaccgccguggccaagugcaacgagaagcacgacgaggaguucugcgacaugcugcgccuguucgacuucugcaagcaggcgauccggcgccucaagacccccgcccagaugagcauccagcugaucaacaaggccgugaacgcccugaucaacgaccagcucaucaugaagaaccaccuccgggacaucaugggcauccccuacugcaacuacuccaaguacugcuaccugaaccacacggucaccgggaagaccagccugccccgcugcugccugguguccaacggcagcuaccugaacgagacccacuucuccgacgacaucgagcagcaggccgacaacaugaucacggagcuccugcagaaggaguacauggaccggcagggcaagaccccgcuggggcucguggaccuguucgucuucagcaccuccuucuaccugaucagcaucuuccugcaccucaucaagaucccgacccaccgccacaucacgggcaagcccugccccaagccccaccggcugaaccacauggggaucugcuccugcggccuguacaagcacccgggggugcccgugaaguggaagcgcugaggacuagucccuguucccagagcccacuuuuuuuucuuuuuuugaaauaaaauagccugucuuucagaucuaaaaaaaaaaaaaaaaaaaaaaaaaaaaaaaaaaaaaaaaaaaaaaaaaaaaaaaaaaaaaaaaaaaaaaaaaaaaaaaaaaaaaaaaaaaaaaaaaaaa

SEQ ID NO: 33560 - RNA, 1721 nt, Artificial Sequence
  mRNA product Design a-1 (A100) comprising derived and/or modified sequence from LASV(LASV253-NIG-2011;Clade II)__AIT17670__GPCmut8 (opt1)
aggagagucccgcagucggcguccagcggcucugcuuguucgugugugugucguugcaggccuuauucaagcuuaccaugggccagaucaucaccuucuuccaggaggugccccacgucaucgaggaggugaugaacaucgugcugaucgcccucagccugcuggccauccucaaggggaucuacaacgucgcgaccugcggccuguucgggcugguguccuuccuccugcugugcggccgcagcugcuccacgaccuacaaggggguguacgagcuccagacccuggagcuggacauggccagccucaacaugugcaugccgcuguccugcacgaagaacaacagccaccacuacaucauggucggcaacgagaccggccuggagcucacccugaccaacacguccaucaucaaccacaaguucugcaaccugagcgacgcccacaagaagaaccucuacgaccacgcccugauguccaucaucagcaccuuccaccuguccauccccaacuucaaccaguacgaggccaugagcugcgacuucaacgggggcaagaucuccgugcaguacaaccucagccacaccuacgcgguggacgccgccaaccacugcgggaccaucgccaacggcguccugcagacguucaugcggauggcguggggcggguccuacaucgcccuggacagcggcaagggguccugggacugcaucaugaccagcuaccaguaccucaucauccagaacaccaccugggaggaccacugccaguucucccgccccagccccaucggcuaccuggggcugcucagccagcggacgcgcgacaucuacaucucccggcgccugcugggcaccuucaccuggacccucagcgacuccgagggcaacgagacgcccgggggcuacugccugacccgguggaugcugaucgaggccgagcucaagugcuucgggaacaccgccguggccaagugcaacgagaagcacgacgaggaguucugcgacaugcugcgccuguucgacuucugcaagcaggcgauccggcgccucaaggcccccgcccagaugagcauccagcugaucaacaaggccgugaacgcccugaucaacgaccagcucaucaugaagaaccaccuccgggacaucaugggcaucccguacugcaacuacuccaaguacugcuaccugaaccacaccgucacggggcgcaccagccugccccggugcugccugguguccaacggcagcuaccugaacgagacccacuucuccgacgacaucgagcagcaggcggacaacaugaucaccgagcuccugcagaaggaguacaucgaccgccagggcaagacgccccuggggcucguggaccuguucgucuucagcaccuccuucuaccugaucagcaucuuccugcaccucgugaagaucccgacccaccggcacaucaucggcaagcccugccccaagccccaccgccugaaccacauggggaucugcuccugcggccuguacaagcacccgggggugcccgucaaguggaagcggugaggacuagucccuguucccagagcccacuuuuuuuucuuuuuuugaaauaaaauagccugucuuucagaucuaaaaaaaaaaaaaaaaaaaaaaaaaaaaaaaaaaaaaaaaaaaaaaaaaaaaaaaaaaaaaaaaaaaaaaaaaaaaaaaaaaaaaaaaaaaaaaaaaaaa

SEQ ID NO: 33561 - RNA, 1721 nt, Artificial Sequence
  mRNA product Design a-1 (A100) comprising derived and/or modified sequence from LASV(LASV254-NIG-2011;Clade II)__AIT17674__GPCmut8 (opt1)
aggagagucccgcagucggcguccagcggcucugcuuguucgugugugugucguugcaggccuuauucaagcuuaccaugggccagaucaucaccuucuuccaggaggugccccacgucaucgaggaggugaugaacaucgugcugaucgcccucagccugcuggccauccucaaggggaucuacaacgucgcgaccugcggccuguucgggcugguguccuuccuccugcugugcggccgcagcugcuccacgaccuacaaggggguguacgagcuccagacccuggagcuggacaugaccaaccucaacaugugcaugccgcugagcugcaccaagaacaacucccaccacuacaucauggucggcaacgagaccggccuggagcucacccugacgaacaccagcaucaucaaccacaaguucugcaaccuguccgacgcccacaagaagaaccucuacaaccacgcccugaugagcaucaucuccaccuuccaccugagcauccccaacuucaaccaguacgaggccauguccugcgacuucaacgggggcaagaucagcgugcaguacaaccucucccacagcuacgccguggacgcggccaaccacugcgggaccaucgccaacggcguccugcagacguucaugcggauggccuggggcggguccuacaucgcgcuggacagcggcaaggggaacugggacugcaucaugaccuccuaccaguaccucaucauccagaacaccaccugggaggaccacugccaguucagccgccccucccccaucggcuaccuggggcugcucagccagcggacgcgcgacaucuacaucagccggcgccugcugggcaccuucaccuggacccucuccgacagcgagggcaacgagacgcccgggggcuacugccugacccgguggaugcugaucgaggccgagcucaagugcuucgggaacaccgccguggccaagugcaacgagaagcacgacgaggaguucugcgacaugcugcgccuguucgacuucugcaagcaggccauccggcgccucaagacccccgcgcaggccaacauccagcugaucaacaaggccgugaacgcccugaucaacgaccagcucaucaugaagaaccaccuccgggacaucaugggcauccccuacugcaacuacuccaaguacugcuaccugaaccacacggucaccgggaagaccagccugccccgcugcugccugguguccaacggcagcuaccugaacgagacccacuucuccgacgacaucgagcagcaggccgacaacaugaucacggagcuccugcagaaggaguacauggaccggcagggcaagaccccgcuggggcucguggaccuguucgucuucagcaccuccuucuaccugaucagcaucuuccugcaccucgugaagaucccgacccaccgccacgugaucggcaagcccugccccaagccccaccggcugaaccacauggggaucugcuccugcggccuguacaagcacccggggguccccgugaaguggaagcgcugaggacuagucccuguucccagagcccacuuuuuuuucuuuuuuugaaauaaaauagccugucuuucagaucuaaaaaaaaaaaaaaaaaaaaaaaaaaaaaaaaaaaaaaaaaaaaaaaaaaaaaaaaaaaaaaaaaaaaaaaaaaaaaaaaaaaaaaaaaaaaaaaaaaaa

SEQ ID NO: 33562 - RNA, 1721 nt, Artificial Sequence
  mRNA product Design a-1 (A100) comprising derived and/or modified sequence from LASV(Nig08-A19;Clade III)__ADU56618__GPCmut8 (opt1)
aggagagucccgcagucggcguccagcggcucugcuuguucgugugugugucguugcaggccuuauucaagcuuaccaugggccagaucgugaccuucuuccaggaggucccccacgugaucgaggaggugaugaacaucguccugaucgcccucagcauccuggccauccugaaggggcucuacaacaucgcgaccugcggccugaucgggcuggugacguuccuccugcuguccggccgcagcugcuccaugaccuacaaggggguguacgagcuccagacccuggagcugaacaugaacacccucaacaugugcaugccgcugagcugcaccaagaacaacucccaccacuacaucauggucggcaacgagaccggccuggagcucacccugacgaacaccagccugcuccaccacaaguucugcaaccuguccgacgcccacaagaagaaccuguacgaccacacccucaugagcaucaucuccaccuuccaccugagcauccccaacuucaaccaguacgaggccauguccugcgacuucaacgggggcaagaucacggugcaguacaaccugagccacuccuacgccaucgacgccgcgaaccacugcgggaccguggccaacggcguccuccagaccuucaugcggauggccuggggcgggagcuacaucgcccuggacuccggccgcgggaagugggacugcaucaugaccagcuaccaguaccugaucauccagaacacgaccugggaggaccacugccaguucucccggcccagccccaucggcuaccucgggcugcugucccagcgcacccgggacaucuacaucagccgccggcuccugggcaccuucacguggacccugagcgacuccgagggcaacgagacccccgggggcuacugccucacccgcuggaugcugaucgaggcggagcugaagugcuucgggaacacggccguggccaagugcaacgagaagcacgacgaggaguucugcgacaugcuccggcuguucgacuucugcaagcaggccauccgccggcugaaggcccccgcgcagaugagcauccagcucaucaacaaggccgugaacgcccugaucaacgaccagcugaucaugaagaaccaccuccgcgacaucaugggcauccccuacugcaacuacuccaaguacugcuaccugaaccacaccagcaccgggcggaccucccugccccgcugcugccucgucagcaacggcuccuaccugaacgagacgcacuucagcgacgacaucgagcagcaggccgacaacaugaucaccgagaugcugcagaaggaguaccucgaccggcagggcaagaccccgcuggggcugguggaccuguucguguucuccaccagcuucuaccucaucuccaucuuccugcaccuggucaagaucccgacgcaccgccacaucgugggcaagcccugccccaagccccaccggcucaaccacauggggaucugcagcugcggccuguacaagcagccgggggugcccguccgcuggaagcggugaggacuagucccuguucccagagcccacuuuuuuuucuuuuuuugaaauaaaauagccugucuuucagaucuaaaaaaaaaaaaaaaaaaaaaaaaaaaaaaaaaaaaaaaaaaaaaaaaaaaaaaaaaaaaaaaaaaaaaaaaaaaaaaaaaaaaaaaaaaaaaaaaaaaa

SEQ ID NO: 33563 - RNA, 1724 nt, Artificial Sequence
  mRNA product Design a-1 (A100) comprising derived and/or modified sequence from LASV(G1180-SLE-2010;Clade IV)__AIT17168__GPCmut8 (opt1)
aggagagucccgcagucggcguccagcggcucugcuuguucgugugugugucguugcaggccuuauucaagcuuaccaugggccagaucgugaccuucuuccaggaggucccccacgugaucgaggaggugaugaacaucguccugaucgcccucagcauccuggccgugcugaaggggcucuacaacuucgcgaccugcggccugguggggcugcucaccuuccugcugcucugcggccgcuccugcaccgccagccgguacaagggggucuacgagcugcagacccuggagcucaacauggagacccugaacaugugcaugccgcuguccugcaccaagaacaacagccaccacuacaucauggugggcaacgagaccggccucgagcugacccugacgaacaccuccaucaucaaccacaaguucugcaaccucagcgacgcccacaagaagaaccuguacgaccacgcccugauguccaucaucagcaccuuccaccucuccauccccaacuucaaccaguacgaggccaugagcugcgacuucaacgggggcaagaucuccgugcaguacaaccugagccacuccuacgcgggggacgccgccaaccacugcggcaccgucgccaacggggugcugcagacguucaugcgcauggcguggggcggcagcuacaucgcccucgacuccgggcacggcagcugggacugcaucaugaccuccuaccaguaccugaucauccagaacaccaccugggaggaccacugccaguucagccggcccucccccaucggguaccugggccuccugagccagcgcacgcgggacaucuacaucagccgccggcugcucggcaccuucaccuggacccuguccgacagcgaggggaaggacacgccgggcggguacugccugacccgcuggaugcucaucgaggccgagcugaagugcuucggcaacaccgccguggccaagugcaacgagaagcacgacgaggaguucugcgacaugcugcggcuguucgacuucugcaagcaggcgauccagcgccugaaggcccccgcccagauguccauccagcugaucaacaaggccgucaacgcccucaucaacgaccagcugaucaugaagaaccaccuccgggacaucauggggauccccuacugcaacuacagcaaguacugcuaccucaaccacaccacgaccggcaagaccucccugcccaagugcugccuggugagcaacggcuccuaccucaacgagacccacuucagcgacgacaucgagcagcaggcggacaacaugaucacggagaugcugcagaaggaguacauggagcgccaggggaagacgccccugggccucguggaccuguucgucuucuccaccagcuucuaccugaucuccaucuuccugcaccucgugaagaucccgacccaccggcacaucgugggcaagagcugccccaagccccaccgccugaaccacauggggaucugcuccugcgggcuguacaagcagcccggcgucccggugaaguggaagcggugaggacuagucccuguucccagagcccacuuuuuuuucuuuuuuugaaauaaaauagccugucuuucagaucuaaaaaaaaaaaaaaaaaaaaaaaaaaaaaaaaaaaaaaaaaaaaaaaaaaaaaaaaaaaaaaaaaaaaaaaaaaaaaaaaaaaaaaaaaaaaaaaaaaaa

SEQ ID NO: 33564 - RNA, 1724 nt, Artificial Sequence
  mRNA product Design a-1 (A100) comprising derived and/or modified sequence from LASV(G1442-SLE-2011;Clade IV)__AIT17180__GPCmut8 (opt1)
aggagagucccgcagucggcguccagcggcucugcuuguucgugugugugucguugcaggccuuauucaagcuuaccaugggccagaucgugaccuucuuccaggaggucccccacgugaucgaggaggugaugaacaucguccugaucgcccucagcauccuggccgugcugaaggggcucuacaacguggcgaccugcggccugaucgggcuggucacguuccuccugcugugcggccgcuccugcaccaccacccucuacaaggggguguacgagcugcagacgcuggagcucaacauggagacccugaacaugugcaugccgcugagcugcaccaagaacaacucccaccacuacauccgggugggcaacgagacgggccucgagcugacccugaccaacaccagcaucaucaaccacaaguucugcaaccucuccgacgcccacaagaagaaccuguacgaccacgcccugaugagcaucaucuccacguuccaccucagcauccccaacuucaaccaguacgaggccauguccugcgacuucaacgggggcaagaucagcguccaguacaaccugucccacagcuacgccggggacgcggccaaccacugcggcaccguggccaacggggugcugcagaccuucaugcgcauggccuggggcggcuccuacaucgcgcucgacagcgggcggggcaacugggacugcaucaugaccuccuaccaguaccugaucauccagaacacgaccugggacgaccacugccaguucagccgccccucccccaucggguaccugggccuccugagccagcggacccgcgacgucuacaucucccggcgccugcucggcaccuucacguggacccugagcgacagcgaggggaaggacaccccgggcggguacugccugacccgguggaugcucaucgaggccgagcugaagugcuucggcaacacggccguggccaagugcaacgagaagcacgacgaggaguucugcgacaugcugcgccucuucgacuucugcaagcaggccauccagcggcugaaggcgcccgcccagauguccauccagcugaucaacaaggccgugaacgcccucaucaacgaccagcugaucaugaagaaccaccuccgcgacaucauggggauccccuacugcaacuacagcaaguacugcuaccugaacaacaccgccaccggcaagaccucccugcccaagugcugccugaucagcaacggcuccuaccucaacgagacgcacuucagcgacgacaucgagcaggaggcggacaacaugaucaccgagaugcugcagaaggaguacauggagcggcaggggaagacgccccugggccucgucgaccuguucguguucuccaccagcuucuaccugaucuccaucuuccugcaccucgugaagaucccgacccaccgccacaucgucggcaagagcugccccaagccccaccggcugaaccacauggggaucugcuccugcgggcuguacaagcagcccggcgugccggugcgcuggaagcggugaggacuagucccuguucccagagcccacuuuuuuuucuuuuuuugaaauaaaauagccugucuuucagaucuaaaaaaaaaaaaaaaaaaaaaaaaaaaaaaaaaaaaaaaaaaaaaaaaaaaaaaaaaaaaaaaaaaaaaaaaaaaaaaaaaaaaaaaaaaaaaaaaaaaa

SEQ ID NO: 33565 - RNA, 1724 nt, Artificial Sequence
  mRNA product Design a-1 (A100) comprising derived and/or modified sequence from LASV(G3010-SLE-2013;Clade IV)__AIT17344__GPCmut8 (opt1)
aggagagucccgcagucggcguccagcggcucugcuuguucgugugugugucguugcaggccuuauucaagcuuaccaugggccagaucgugaccuucuuccaggaggucccccacgugaucgaggaggugaugaacaucguccugaucgcccucagcauccuggccgugcugaaggggcucuacaacuucgcgaccugcggccugguggggcuggucacguuccuccugcugugcggccgcuccugcaccaccagccucuacaaggggguguacgagcugcagacccuggagcucaacauggagacgcugaacaugugcaugccgcuguccugcaccaagaacaacagccaccacuacaucauggugggcaacgagaccggccucgagcugacgcugaccaacaccuccaucaucaaccacaaguucugcaaccucagcgacgcccacaagaagaaccuguacaaccacgcccugauguccaucaucagcaccuuccaccucuccauccccaacuucaaccaguacgaggccaugagcugcgacuucaacgggggcaagaucuccguccaguacaaccugagccacuccuacgccggggacgcggccagccacugcggcacgguggccaacggggugcugcagaccuucaugcggauggccuggggcggcuccuacaucgcgcucgacagcggguacggcaagugggacugcaucaugaccuccuaccaguaccugaucauccagaacaccacgugggaggaccacugccaguucagccgccccucccccaucggguaccugggccuccugagccagcggacccgcgacaucuacaucagccggcgccugcucggcaccuucaccuggacgcuguccgacagcgaggggaaggacaccccgggcggguacugccugacccgguggaugcucaucgaggccgagcugaagugcuucggcaacaccgccgucgccaagugcaacgagaagcacgacgaggaguucugcgacaugcugcgccucuucgacuucugcaagcaggccauccagcggcugaagacgcccgcgcagauguccauccagcugaucaacaaggccgugaacgcccucaucaacgaccagcugaucaugaagaaccaccuccgcgacaucauggggauccccuacugcaacuacagcaaguacugcuaccugaaccacaccaccaccggcaagacgucccugcccaagugcugccuggugagcaacggcuccuaccucaacgagacccacuucagcgacgacaucgagcagcaggccgacaacaugaucaccgagaugcugcagaaggaguacauggagcggcaggggaagacgccccugggccucgucgaccuguucguguucuccaccagcuucuaccugaucuccaucuuccugcaccucgugaagaucccgacccaccgccacaucgucggcaagagcugccccaagccccaccggcugaaccacauggggaucugcuccugcgggcuguacaagcagcccggcgugccggugcgcuggaagcggugaggacuagucccuguucccagagcccacuuuuuuuucuuuuuuugaaauaaaauagccugucuuucagaucuaaaaaaaaaaaaaaaaaaaaaaaaaaaaaaaaaaaaaaaaaaaaaaaaaaaaaaaaaaaaaaaaaaaaaaaaaaaaaaaaaaaaaaaaaaaaaaaaaaaa

SEQ ID NO: 33566 - RNA, 1724 nt, Artificial Sequence
  mRNA product Design a-1 (A100) comprising derived and/or modified sequence from LASV(G502-SLE-2009;Clade IV)__AIT17126__GPCmut8 (opt1)
aggagagucccgcagucggcguccagcggcucugcuuguucgugugugugucguugcaggccuuauucaagcuuaccaugggccagaucgugaccuucuuccaggaggucccccacgugaucgaggaggugaugaacaucguccugaucgcccucagcauccuggccgugcugaaggggcucuacaacuucgcgaccugcggccugguggggcugcucacguuccugcugcucugcggccgcuccugcaccaccgggcuguacaagggcgucuacgagcugcagacccucgagcugaacauggagacgcugaacaugugcaugccgcucagcugcaccaagaacaacucccaccacuacaucauggugggcaacgagaccgggcuggagcugacgcucaccaacaccagcaucaucaaccacaaguucugcaaccuguccgacgcccacaagaagaaccuguacgaccacgcccucaugagcaucaucuccaccuuccaccugagcauccccaacuucaaccaguacgaggccauguccugcgacuucaacggcgggaagaucagcgugcaguacaaccugucccacagcuacgccggcgacgcggccgaccacugcgggacggucgccaacggcgugcuccagaccuucaugcggauggccuggggcggguccuacaucgcgcuggacagcggccgcgggcggugggacugcaucaugaccuccuaccaguaccugaucauccagaacaccacgugggaggaccacugccaguucagccgccccucccccaucggcuaccucggccugcugagccagcggacccgcgacaucuacaucucccggcgccuccuggggaccuucaccuggacgcugagcgacagcgagggcaaggacacccccgggggcuacugccucacccgguggaugcugaucgaggccgagcugaagugcuucgggaacaccgccguggccaagugcaacgagaagcacgacgaggaguucugcgacaugcuccgccuguucgacuucugcaagcaggccauccagcggcugaaggcgcccgcccagauguccauccagcucaucaacaaggccgucaacgcccugaucaacgaccagcuggugaugaagaaccaccuccgcgacaucaugggcauccccuacugcaacuacagccgguacugcuaccugaaccacacgaccaccggccgcaccucccugcccaagugcugccucgugagcaacggguccuaccugaacgagacgcacuucagcgacgacaucgagcagcaggccgacaacaugaucaccgagaugcugcagaaggaguacauggagcggcagggcaagaccccgcucgggcuggucgaccuguucguguucuccaccagcuucuaccugaucuccaucuuccuccaccuggugaagaucccgacgcaccgccacaucgucggcaagagcugccccaagccccaccggcugaaccacauggggaucugcuccugcggccucuacaagcagcccggcgugccggugaaguggaagcgcugaggacuagucccuguucccagagcccacuuuuuuuucuuuuuuugaaauaaaauagccugucuuucagaucuaaaaaaaaaaaaaaaaaaaaaaaaaaaaaaaaaaaaaaaaaaaaaaaaaaaaaaaaaaaaaaaaaaaaaaaaaaaaaaaaaaaaaaaaaaaaaaaaaaaa

SEQ ID NO: 33567 - RNA, 1724 nt, Artificial Sequence
  mRNA product Design a-1 (A100) comprising derived and/or modified sequence from LASV(G733-SLE-2010;Clade IV)__AIT17154__GPCmut8 (opt1)
aggagagucccgcagucggcguccagcggcucugcuuguucgugugugugucguugcaggccuuauucaagcuuaccaugggccagaucgugaccuucuuccaggaggucccccacgugaucgaggaggugaugaacaucguccugaucgcccucagcauccuggccgugcugaaggggcucuacaacuucgcgaccugcggcaucguggggcuggucuccuuccugcuccugugcggccgcagcugcacgaccucccuguacaaggggguguacgagcuccagacccuggagcugaacauggagacccucaacaugugcaugccgcugagcugcaccaagaacaacucccaccacuacaucauggugggcaacgagaccggccuggagcucacccugacgaacaccagcaucaucaaccacaaguucugcaaccuguccgacgcccacaagaagaaccucuacgaccacgcccugaugagcaucaucuccaccuuccaccugagcauccccaacuucaaccaguacgaggccauguccugcgacuucaacgggggcaagaucagcguccaguacaaccucucccacagcuacgccggggacgcggccaaccacugcggcaccaucgccaacggggugcugcagacguucaugcggauggccuggggcggcuccuacaucgcgcuggacagcgggcgcgaccggugggacugcaucaugaccuccuaccaguaccucaucauccagaacaccaccugggaggaccacugccaguucagccgccccucccccaucggcuaccuggggcugcucagccagcggacgcgcgacaucuacaucagccggcgccugcugggcaccuucaccuggacccucuccgacagcgagggcaaggacacgcccgggggcuacugccugacccgguggaugcugaucgaggccgagcucaagugcuucgggaacaccgccguggccaagugcaacgagaagcacgacgaggaguucugcgacaugcugcgccuguucgacuucugcaagcaggccauccagcggcucaaggcgcccgcccagauguccauccagcugaucaacaaggccgucaacgcccugaucaacgaccagcucaucaugaagaaccaccuccgcgacaucaugggcauccccuacugcaacuacagcaaguacugcuaccugaaccacaccacgaccgggaagaccucccugcccaagugcugccuggugagcaacggcuccuaccugaacgagacccacuucagcgacgacaucgagcagcaggccgacaacaugaucacggagaugcuccagaaggaguacauggagcggcagggcaagaccccgcuggggcugguggaccucuucgucuucuccaccagcuucuaccugaucuccaucuuccugcaccuggugaagaucccgacccaccgccacguggucggcaagagcugccccaagccccaccggcucaaccacauggggaucugcuccugcggccuguacgggcagcccggcgugccggugaaguggaagcgcugaggacuagucccuguucccagagcccacuuuuuuuucuuuuuuugaaauaaaauagccugucuuucagaucuaaaaaaaaaaaaaaaaaaaaaaaaaaaaaaaaaaaaaaaaaaaaaaaaaaaaaaaaaaaaaaaaaaaaaaaaaaaaaaaaaaaaaaaaaaaaaaaaaaaa

SEQ ID NO: 33568 - RNA, 1724 nt, Artificial Sequence
  mRNA product Design a-1 (A100) comprising derived and/or modified sequence from MOPV/LASV reassortant(IGS-1;Clade IV)__AFY05576__GPCmut8 (opt1)
aggagagucccgcagucggcguccagcggcucugcuuguucgugugugugucguugcaggccuuauucaagcuuaccaugggccagaucgugaccuucuuccaggaggucccccacgugaucgaggaggugaugaacaucguccugaucgcccucagcgugcuggccgugcugaaggggcucuacaacuucgcgaccugcggccuggucgggcuggugacguuccuccugcugugcggccgcuccugcaccaccagccucuacaaggggguguacgagcugcagacccuggagcucaacauggagacgcugaacaugugcaugccgcuguccugcaccaagaacaacagccaccacuacaucauggucggcaacgagaccggccucgagcugacgcugaccaacaccuccaucaucaaccacaaguucugcaaccucagcgacgcccacaagaagaaccuguacgaccacgcccugauguccaucaucagcaccuuccaccucuccauccccaacuucaaccaguacgaggccaugagcugcgacuucaacgggggcaagaucuccgugcaguacaaccugagccacuccuacgccggggacgcggccaaccacugcggcacgguggccaacgggguccugcagaccuucaugcggauggccuggggcggcagcuacaucgcgcucgacuccgggcgcggcaacugggacugcaucaugaccagcuaccaguaccugaucauccagaacaccacgugggaggaccacugccaguucucccggcccagccccaucggguaccugggccuccugucccagcgcacccgggacaucuacaucagccgccggcugcucggcaccuucaccuggacgcugagcgacuccgagggggaggacaccccgggcggguacugccugacccgcuggaugcucaucgaggccgagcugaagugcuucggcaacaccgccguggccaagugcaacgagaagcacgacgaggaguucugcgacaugcugcggcuguucgacuucugcaagcaggccauccagcgccugaaggcgcccgcccagaugagcauccagcugaucaacaaggccgugaacgcccucaucaacgaccagcugaucaugaagaaccaccuccgggacaucauggggauccccuacugcaacuacuccaaguacugcuaccucaaccacacgaccaccggccgcaccagccugcccaagugcugccuggucuccaacggcagcuaccucaacgagacgcacuucuccgacgacaucgagcagcaggccgacaacaugaucaccgagaugcugcagaaggaguacauggagcggcaggggaagacgccccugggccucguggaccuguucguguucagcaccuccuucuaccugaucagcaucuuccugcaccucgucaagaucccgacccaccgccacaucguggggaaguccugccccaagccccaccggcugaaccacaugggcaucugcagcugcgggcuguacaagcagcccggcgugccggucaaguggaagcgcugaggacuagucccuguucccagagcccacuuuuuuuucuuuuuuugaaauaaaauagccugucuuucagaucuaaaaaaaaaaaaaaaaaaaaaaaaaaaaaaaaaaaaaaaaaaaaaaaaaaaaaaaaaaaaaaaaaaaaaaaaaaaaaaaaaaaaaaaaaaaaaaaaaaaa

SEQ ID NO: 33569 - RNA, 1724 nt, Artificial Sequence
  mRNA product Design a-1 (A100) comprising derived and/or modified sequence from LASV(LM765-SLE-2012;Clade IV)__AIT17814__GPCmut8 (opt1)
aggagagucccgcagucggcguccagcggcucugcuuguucgugugugugucguugcaggccuuauucaagcuuaccaugggccagaucgugaccuucuuccaggaggucccccacgugaucgaggaggugaugaacaucguccugaucgcccucagcauccuggccgugcugaaggggcucuacaacuucgcgaccugcggccugguggggcuggucacguuccuccugcugugcggccgcuccugcaccaccagccucuacaaggggguguacgagcugcagacccuggagcucaacauggagacgcugaacaugugcaugccgcuguccugcaccaagaacaacagccaccacuacaucauggugggcaacgagaccggccucgagcugacgcugaccaacaccuccaucaucgaccacaaguucugcaaccucagcgacgcccaccggaagaaccuguacgaccacgcccugauguccaucaucagcaccuuccaccucuccauccccaacuucaaccaguacgaggccaugagcugcgacuucaacgggggcaagaucuccguccaguacaaccugagccacuccuacgccaaggacgcggccgaccacugcgggacgguggccaacggcgugcugcagaccuucaugcgcauggccuggggcgggagcuacaucgcgcucgacuccggccgggggcgcugggacugcaucaugaccagcuaccaguaccugaucauccagaacaccacgugggaggaccacugccaguucucccggcccagccccaucggcuaccuggggcuccugucccagcgcacccgggacaucuacaucagccgccggcugcucggcaccuucaccuggacgcugagcgacuccgagggcaaggacacccccgggggcuacugccugacccgcuggaugcucaucgaggccgagcugaagugcuucgggaacaccgccgucgccaagugcaacgagaagcacgacgaggaguucugcgacaugcugcggcuguucgacuucugcaagcaggccauccagcgccugaaggcgcccgcccagaugagcauccagcugaucaacaaggccgugaacgcccucaucaacgaccagcugaucaugaagaaccaccuccgggacaucaugggcauccccuacugcaacuacuccaaguacugcuaccucaaccacacgaccaccgggaagaccagccugcccaagugcugccugguguccaacggcagcuaccucaacgagacgcacuucuccgacgacaucgagcagcaggccgacaacaugaucaccgagaugcugcagaaggaguacauggagcgccagggcaagaccccgcuggggcucgucgaccuguucguguucagcaccuccuucuaccugaucagcaucuuccugcaccucgugaagaucccgacgcaccggcacaucgucggcaagcccugccccaagccccaccgccugaaccacauggggaucugcuccugcggccuguacaagcagccgggggugcccgugaaguggaagcggugaggacuagucccuguucccagagcccacuuuuuuuucuuuuuuugaaauaaaauagccugucuuucagaucuaaaaaaaaaaaaaaaaaaaaaaaaaaaaaaaaaaaaaaaaaaaaaaaaaaaaaaaaaaaaaaaaaaaaaaaaaaaaaaaaaaaaaaaaaaaaaaaaaaaa

SEQ ID NO: 33570 - RNA, 1724 nt, Artificial Sequence
  mRNA product Design a-1 (A100) comprising derived and/or modified sequence from LASV(LM776-SLE-2012;Clade IV)__AIT17824__GPCmut8 (opt1)
aggagagucccgcagucggcguccagcggcucugcuuguucgugugugugucguugcaggccuuauucaagcuuaccaugggccagaucgugaccuucuuccaggaggucccccacgugaucgaggaggugaugaacaucguccugaucgcccucagcauccuggccgugcugaaggggcucuacaacuucgcgaccugcggccugguggggcuggucacguuccuccugcugugcggccgcuccugcaccaccagcguguacaaggggguguacgagcuccagacccuggagcugaacauggagacgcucaacaugugcaugccgcuguccugcaccaagaacaacagccaccacuacaucauggucggcaacgagaccggccuggagcucacgcugaccaacaccuccaucaucaaccacaaguucugcaaccugagcgacgcccacaagaagaaccucuacgaccacgcccugauguccaucaucagcaccuuccaccuguccauccccaacuucaaccaguacgaggccaugagcugcgacuucaacgggggcaagaucuccgugcaguacaaccucagccacuccuacgccggggacgcggccaaccacugcggcacgguggccaacgggguccugcagaccuucaugcggauggccuggggcggcagcuacaucgcgcuggacuccgggcacggcaagugggacugcaucaugaccagcuaccaguaccucaucauccagaacaccacgugggaggaccacugccaguucucccgccccagccccaucggguaccugggccugcucucccagcggacccgcgacaucuacaucagccggcgccugcugggcaccuucaccuggacgcucagcgacuccgaggggaaggacaccccgggcggguacugccugacccgguggaugcugaucgaggccgagcucaagugcuucggcaacaccgccguggccaagugcaacgagaagcacgacgaggaguucugcgacaugcugcgccuguucgacuucugcaagcaggccauccagcggcucaaggcgcccgcccagaugagcauccagcugaucaacaaggccgugaacgcccugaucaacgaccagcucaucaugaagaaccaccuccgcgacaucauggggauccccuacugcaacuacuccaaguacugcuaccugaaccacacgaccaccggcaagaccagccugcccaagugcugccuggucuccaacggcagcuaccugaacgagacgcacuucuccgacgacaucgagcagcaggccgacaacaugaucaccgagaugcuccagaaggaguacauggagcggcaggggaagacgccccugggccugguggaccucuucguguucagcaccuccuucuaccugaucagcaucuuccugcaccuggucaagaucccgacccaccgccacaucguggggaaguccugccccaagccccaccggcucaaccacaugggcaucugcagcugcgggcuguacaagcagcccggcgugccgguccgcuggaagcggugaggacuagucccuguucccagagcccacuuuuuuuucuuuuuuugaaauaaaauagccugucuuucagaucuaaaaaaaaaaaaaaaaaaaaaaaaaaaaaaaaaaaaaaaaaaaaaaaaaaaaaaaaaaaaaaaaaaaaaaaaaaaaaaaaaaaaaaaaaaaaaaaaaaaa

SEQ ID NO: 33571 - RNA, 1724 nt, Artificial Sequence
  mRNA product Design a-1 (A100) comprising derived and/or modified sequence from LASV(Mad39;Clade IV)__ANH09722__GPCmut8 (opt1)
aggagagucccgcagucggcguccagcggcucugcuuguucgugugugugucguugcaggccuuauucaagcuuaccaugggccagaucgugaccuucuuccaggaggucccccacgugaucgaggaggugaugaacaucguccugaucgcccucagcauccuggccgugcugaaggggcucuacaacguggcgaccugcggccugaucgggcuggucacguuccuccugcugugcggccgcuccugcaccaccacccucuacaaggggguguacgagcugcaggcccuggagcucaacauggagacgcugaacaugugcaugccgcugagcugcaccaagaacaacucccaccacuacauccgggugggcaacgagaccggccucgagcugacgcugaccaacaccagccucaucaaccacaaguucugcaaccuguccgacgcccacaagaagaaccuguacgaccacgcccucaugagcaucaucuccaccuuccaccugagcauccccaacuucaaccaguacgaggccauguccugcgacuucaacgacgggaagaucagcguccaguacaaccugucccacacguacgcgggcgacaccgccaaccacugcgggaccguggccaacggcgugcuccagaccuucaugcgcauggccuggggcgggagcuacaucgcgcuggacuccggccgcgggggcugggacugcaucaugacgagcuaccaguaccugaucauccagaacaccaccugggaggaccacugccaguucucccggcccagccccaucggguaccucggccugcugucccagcggacccgcgacaucuacaucagccggcgccuccugggcacguucaccuggacccuguccgacagcgaggggaaggacaccccgggcggguacugccucacgcgguggaugcugaucgaggccgagcugaagugcuucggcaacaccgccgucgccaagugcaacgagaagcacgacgaggaguucugcgacaugcuccgccuguucgacuucugcaagcaggccauccagcggcugaaggcgcccgcccagaugagcauccagcucaucaacaaggccgugaacgcccugaucaacgaccagcugaucaugaagaaccaccuccgcgacaucauggggauccccuacugcaacuacuccaaguacugcuaccugaaccacaccgugaccggcaagacgagccugcccaagugcugccucgucuccaacggcagcuaccugaacgagacccacuucuccgacgacaucgagcagcaggccgacaacaugaucaccgagaugcugcagaaggaguacauggagcggcaggggaagacgccccucggccugguggaccuguucguguucagcaccuccuucuaccugaucagcaucuuccuccaccuggucaagaucccgacccaccgccacgugguggggaagcccugccccaagccccaccggcugaaccacaugggcaucugcuccugcggguucuacaagcagccgggcguccccgugcgcuggaagcggugaggacuagucccuguucccagagcccacuuuuuuuucuuuuuuugaaauaaaauagccugucuuucagaucuaaaaaaaaaaaaaaaaaaaaaaaaaaaaaaaaaaaaaaaaaaaaaaaaaaaaaaaaaaaaaaaaaaaaaaaaaaaaaaaaaaaaaaaaaaaaaaaaaaaa

SEQ ID NO: 33572 - RNA, 1724 nt, Artificial Sequence
  mRNA product Design a-1 (A100) comprising derived and/or modified sequence from LASV(Z0947-SLE-2011;Clade IV)__AIT17840__GPCmut8 (opt1)
aggagagucccgcagucggcguccagcggcucugcuuguucgugugugugucguugcaggccuuauucaagcuuaccaugggccagaucgugaccuucuuccaggaggucccccacgugaucgaggaggugaugaacaucguccugaucgcccucagcauccuggccgugcugaaggggcucuacaacuucgcgaccugcggccugguggggcuggucacguuccuccugcugugcggccgcuccugcaccaucagccucuacaaggggguguacgagcugcagacccuggagcucaacauggagacccugaacaugugcaugccgcuguccugcaccaagaacaacagccaccacuacaucauggugggcaacgagaccggccucgagcugacccugacgaacaccuccaucaucaaccacaaguucugcaaccucagcgacgcccacaagaagaaccuguacgaccacgcccugauguccaucaucagcaccuuccaccucuccauccccaacuucaaccaguacgaggccaugagcugcgacuucaacgggggcaagaucuccguccaguacaaccugagccacuccuacgccggggacgcggccaaccacugcggcaccguggccaacggggugcugcagacguucaugcggauggccuggggcggcagcuacaucgcgcucgacuccgggcgcgaccggugggacugcaucaugaccagcuaccaguaccugaucauccagaacaccaccugggaggaccacugccaguucucccgccccagccccaucggcuaccuggggcuccugucccagcggacgcgcgacaucuacaucagccggcgccugcucggcaccuucaccuggacccugagcgacuccgagggcaaggacacgcccgggggcuacugccugacccgguggaugcucaucgaggccgagcugaagugcuucgggaacaccgccgucgccaagugcaacgagaagcacgacgaggaguucugcgacaugcugcgccucuucgacuucugcaagcaggccauccagcggcugaaggcgcccgcccagaugagcauccagcugaucaacaaggccgugaacgcccucaucaacgaccagcugaucaugaagaaccaccuccgcgacaucaugggcauccccuacugcaacuacuccaaguacugcuaccugaaccacaccacgaccgggaagaccagccugcccaagugcugccugguguccaacggcagcuaccucaacgagacccacuucuccgacgacaucgagcagcaggccgacaacaugaucacggagaugcugcagaaggaguacauggagcggcagggcaagaccccgcuggggcucgucgaccuguucguguucagcaccuccuucuaccugaucagcaucuuccugcaccucgugaagaucccgacccaccgccacaucgucggcaagcccugccccaagccccaccggcugaaccacauggggaucugcuccugcggccuguacaagcagccgggggugcccgugaaguggaagcgcugaggacuagucccuguucccagagcccacuuuuuuuucuuuuuuugaaauaaaauagccugucuuucagaucuaaaaaaaaaaaaaaaaaaaaaaaaaaaaaaaaaaaaaaaaaaaaaaaaaaaaaaaaaaaaaaaaaaaaaaaaaaaaaaaaaaaaaaaaaaaaaaaaaaaa

SEQ ID NO: 33573 - RNA, 1724 nt, Artificial Sequence
  mRNA product Design a-1 (A100) comprising derived and/or modified sequence from LASV(Josiah;Clade IV)__NP_694870__GPCmut8 (opt1)
aggagagucccgcagucggcguccagcggcucugcuuguucgugugugugucguugcaggccuuauucaagcuuaccaugggccagaucgugaccuucuuccaggaggucccccacgugaucgaggaggugaugaacaucguccugaucgcccucagcgugcuggccgugcugaaggggcucuacaacuucgcgaccugcggccuggucgggcuggugacguuccuccugcugugcggccgcuccugcaccaccagccucuacaaggggguguacgagcugcagacccuggagcucaacauggagacgcugaacaugugcaugccgcuguccugcaccaagaacaacagccaccacuacaucauggucggcaacgagaccggccucgagcugacccugacgaacaccuccaucaucaaccacaaguucugcaaccucagcgacgcccacaagaagaaccuguacgaccacgcccugauguccaucaucagcaccuuccaccucuccauccccaacuucaaccaguacgaggccaugagcugcgacuucaacgggggcaagaucuccgugcaguacaaccugagccacuccuacgccggggacgcggccaaccacugcggcaccguggccaacgggguccugcagacguucaugcggauggccuggggcggcagcuacaucgcgcucgacuccgggcgcggcaacugggacugcaucaugaccagcuaccaguaccugaucauccagaacaccaccugggaggaccacugccaguucucccggcccagccccaucggguaccugggccuccugucccagcgcacgcgggacaucuacaucagccgccggcugcucggcaccuucaccuggacccugagcgacuccgaggggaaggacacgccgggcggguacugccugacccgcuggaugcucaucgaggccgagcugaagugcuucggcaacaccgccguggccaagugcaacgagaagcacgacgaggaguucugcgacaugcugcggcuguucgacuucugcaagcaggccauccagcgccugaaggcgcccgcccagaugagcauccagcugaucaacaaggccgugaacgcccucaucaacgaccagcugaucaugaagaaccaccuccgggacaucauggggauccccuacugcaacuacuccaaguacugcuaccucaaccacaccacgaccggccgcaccagccugcccaagugcugccuggucuccaacggcagcuaccucaacgagacccacuucuccgacgacaucgagcagcaggccgacaacaugaucacggagaugcugcagaaggaguacauggagcggcaggggaagaccccgcugggccugguggaccucuucguguucagcaccuccuucuaccugaucagcaucuuccugcaccucgucaagauccccacccaccgccacaucguggggaaguccugccccaagccccaccggcugaaccacaugggcaucugcagcugcgggcuguacaagcagccgggcgugcccgucaaguggaagcgcugaggacuagucccuguucccagagcccacuuuuuuuucuuuuuuugaaauaaaauagccugucuuucagaucuaaaaaaaaaaaaaaaaaaaaaaaaaaaaaaaaaaaaaaaaaaaaaaaaaaaaaaaaaaaaaaaaaaaaaaaaaaaaaaaaaaaaaaaaaaaaaaaaaaaa

SEQ ID NO: 33574 - RNA, 1721 nt, Artificial Sequence
  mRNA product Design a-1 (A100) comprising derived and/or modified sequence from LASV(LP;Clade I)__AAF86701__GPCmut8 (opt1)
aggagagucccgcagucggcguccagcggcucugcuuguucgugugugugucguugcaggccuuauucaagcuuaccaugggccagaucaucaccuucuuccaggaggugccccacgucaucgaggaggugaugaacaucgugcugaucgcccucagccugcuggccauccucaaggggcuguacaacaucgcgaccugcggcaucaucgggcuggucgccuuccucuuccugugcggcaaguccugcagccugacgcucaagggcggguacgagcugcagacccuggagcucaacauggagacccugaacaugugcaugccgcuguccugcaccaagaacagcucccaccacuacauccgcgugggcaacgagacggggcucgagcugacccugaccaacaccagcaucaucaaccacaaguucugcaaccucuccgacgcccacaagaagaaccuguacgaccacgcccugaugagcaucaucuccacguuccaccucagcauccccaacuucaaccaguacgaggccauguccugcgacuucaacggcgggaagaucagcgugcaguacaaccugucccacagcuacgcgggcgacgccgccgagcacugcgggaccgucgccaacggcgugcugcagaccuucaugcggauggcguggggcgggcgcuacaucgcccucgacuccggcaaggggaacugggacugcaucaugaccagcuaccaguaccugaucauccagaacacgaccugggaggaccacugccaguucucccggcccagccccaucggcuaccugggccuccugucccagcgcacccgggacaucuacaucagccgccggcugcucgggaccuucacguggacccugagcgacuccgagggcaacgagacccccgggggcuacugccugacccgcuggaugcucaucgaggccgagcugaagugcuucgggaacacggccguggccaagugcaacgagaagcacgacgaggaguucugcgacaugcugcggcuguucgacuucugcaagcaggcgauccgccggcugaaggccccggcccagaugagcauccagcugaucaacaaggccgucaacgcccucaucaacgaccagcugaucaugaagaaccaccuccgcgacaucaugggcauccccuacugcaacuacuccaaguacugcuaccucaaccacaccagcuccggccggaccagccugcccaagugcugccugaucuccaacgggagcuaccucaacgagacccaguucuccgacgacaucgagcagcaggcggacaacaugaucacggagaugcugcagaaggaguacaucgagcgccagggcaagaccccgcuggggcugguggacaucuucaucuucagcaccuccuucuaccucaucagcaucuuccugcaccugaucaagauccccacccaccggcacaucgugggcaagcccugccccaagccgcaccgccucaaccacaugggggucugcuccugcggccuguacaagcaccccggcgugcccacgaaguggaagcggugaggacuagucccuguucccagagcccacuuuuuuuucuuuuuuugaaauaaaauagccugucuuucagaucuaaaaaaaaaaaaaaaaaaaaaaaaaaaaaaaaaaaaaaaaaaaaaaaaaaaaaaaaaaaaaaaaaaaaaaaaaaaaaaaaaaaaaaaaaaaaaaaaaaaa

SEQ ID NO: 33575 - RNA, 1721 nt, Artificial Sequence
  mRNA product Design a-1 (A100) comprising derived and/or modified sequence from LASV(803213;Clade II)__AAF86703__GPCmut8 (opt1)
aggagagucccgcagucggcguccagcggcucugcuuguucgugugugugucguugcaggccuuauucaagcuuaccaugggccagaucaucaccuucuuccaggaggugccccacgucaucgaggaggugaugaacaucgugcugaucgcccucagccugcuggccauccucaaggggaucuacaacgucgcgaccugcggccuguucgggcugaucuccuuccuccugcugugcggccgcagcugcuccgugacguacaaggggguguacgagcuccagacccuggagcugaacauggccaaccucaacaugugcaugccgcugagcugcaccaagaacaacucccaccacuacaucauggucggcaacgagaccggccuggagcucacgcugaccaacaccagcaucaucaaccacaaguucugcaaccuguccgacgcccacaagaagaaccucuacgaccacgcccugaugagcaucaucuccaccuuccaccugagcauccccaacuucaaccaguacgaggccauguccugcgacuucaacgggggcaagaucagcgugcaguacaaccucucccacagcuucgcgguggacgccgccaaccacugcgggacgaucgccaacggcguccugcagaccuucaugcggauggcguggggcggguccuacaucgcccuggacagcggcaaggggaacugggacugcaucaugaccuccuaccaguaccucaucauccagaacaccacgugggaggaccacugccaguucagccgccccucccccaucggcuaccuggggcugcucagccagcggacccgcgacaucuacaucagccggcgccugcugggcaccuucaccuggacgcucuccgacagcgagggcaacgaggcccccgggggcuacugccugacccgguggaugcugaucgaggccgagcucaagugcuucgggaacaccgccguggcgaagugcaacgagaagcacgacgaggaguucugcgacaugcugcgccuguucgacuucugcaagcaggccaucaagcggcucaagaccccggcccagauguccauccagcugaucaacaaggccgugaacgcccugaucaacgaccagcucaucaugaagaaccaccuccgcgacaucaugggcauccccuacugcaacuacagccgguacugcuaccugaaccacacggucaccgggaagaccucccugccccgcugcugccuggugagcaacggcuccuaccugaacgagacccacuucagcgacgacaucgagcagcaggcggacaacaugaucacggagaugcuccagaaggaguacauggaccggcagggcaagaccccgcuggggcugguggaccuguucgucuucuccaccagcuucuaccucaucuccaucuuccugcaccuggugaagauccccacccaccgccacaucgugggcaagcccugccccaagccgcaccggcucaaccacauggggaucugcagcugcggccuguacaagcaccccgggguccccgugaaguggaagcgcugaggacuagucccuguucccagagcccacuuuuuuuucuuuuuuugaaauaaaauagccugucuuucagaucuaaaaaaaaaaaaaaaaaaaaaaaaaaaaaaaaaaaaaaaaaaaaaaaaaaaaaaaaaaaaaaaaaaaaaaaaaaaaaaaaaaaaaaaaaaaaaaaaaaaa

SEQ ID NO: 33576 - RNA, 1721 nt, Artificial Sequence
  mRNA product Design a-1 (A100) comprising derived and/or modified sequence from LASV(GA391;Clade III)__CAA36645__GPCmut8 (opt1)
aggagagucccgcagucggcguccagcggcucugcuuguucgugugugugucguugcaggccuuauucaagcuuaccaugggccagaucgugaccuucuuccaggaggucccccacgugaucgaggaggugaugaacaucguccugaucgcccucagcauccuggccauccugaaggggcucuacaacguggcgaccugcggccugaucgggcuggugacguuccuccugcuguccggccgcagcugcucccucaucuacaaggggaccuacgagcugcagacccuggagcucaacauggagacccugaacaugugcaugccgcugagcugcacgaagaacaacucccaccacuacauccgggucggcaacgagaccggccucgagcugacccugaccaacacgagcauccucaaccacaaguucugcaaccuguccgacgcccacaagcgcaaccuguacgaccacagccucauguccaucaucagcaccuuccaccuguccauccccaacuucaaccaguacgaggccaugagcugcgacuucaacgggggcaagaucaccgugcaguacaaccugucccacagcuucgccguggacgccgcggggcacugcggcacccucgccaacgggguccugcagacguucaugcggauggccuggggcggcuccuacaucgcccuggacagcgggcgcggcaacugggacugcaucaugaccuccuaccaguaccucaucauccagaacaccaccugggacgaccacugccaguucagccggcccucccccaucggguaccugggccugcucagccagcgcacgcgggacaucuacaucagccgccggcugcugggcaccuucaccuggacccucuccgacagcgaggggaacgagacgccgggcggguacugccugacccgcuggaugcugaucgaggcggagcucaagugcuucggcaacaccgccguggccaagugcaacgagaagcacgacgaggaguucugcgacaugcugcggcuguucgacuucugcaagcaggccauccgccggcucaagacccccgcccagauguccauccagcugaucaacaaggcggugaacgcccugaucaacgaccagcucaucaugaagaaccaccuccgcgacaucauggggauccccuacugcaacuacagccgguacugcuaccugaaccacacguccaccggcaagaccagccugccccgcugcugccugaucuccaacggcagcuaccugaacgagaccaaguucuccgacgacaucgagcagcaggccgacaacaugaucacggagaugcugcagaaggaguacaucgaccggcaggggaagaccccgcucggccuggucgaccuguucguguucagcaccuccuucuaccucaucagcaucuuccugcaccuggugaagauccccacccaccgccacaucgucgggaagcccugccccaagccgcaccggcucaaccacaugggcaucugcuccugcgggcuguacaagcagcccggcgugcccgugcgcuggaagcggugaggacuagucccuguucccagagcccacuuuuuuuucuuuuuuugaaauaaaauagccugucuuucagaucuaaaaaaaaaaaaaaaaaaaaaaaaaaaaaaaaaaaaaaaaaaaaaaaaaaaaaaaaaaaaaaaaaaaaaaaaaaaaaaaaaaaaaaaaaaaaaaaaaaaa

SEQ ID NO: 33577 - RNA, 1724 nt, Artificial Sequence
  mRNA product Design a-1 (A100) comprising derived and/or modified sequence from LASV(AV;Clade V)__CCA30314__GPCmut8 (opt1)
aggagagucccgcagucggcguccagcggcucugcuuguucgugugugugucguugcaggccuuauucaagcuuaccaugggccagaucgugaccuucuuccaggaggucccccacgugaucgaggaggugaugaacaucguccugaucgcccucagcauccuggccgugcugaaggggcucuacaacaucgcgaccugcggccugaucgggcugaucacguuccuccugcugugcggccgcuccugcagcuccaaccucuacaaggggguguacgagcugcagagccuggaccucaacauggagacccugaacaugugcaugccgcuguccugcaccaagaacaacagccaccacuacauccgggucggcaacgacaccggccucgagcugacgcugaccaacaccuccauccucaaccacaaguucugcaaccugagcgacgcccacaagaaggaccuguacgaccacgcccucauguccaucaucagcaccuuccaccuguccauccccaacuucaaccaguacgaggccaugagcugcgacuucaacgggggcaagaucuccgugcaguacaaccugagccacuccuacgccaucgacgcggccaaccacugcgggacgguggccaacggcauccuccagaccuucaugcgcauggccuggggcgggagcuacaucgcgcuggacuccggccgggggaacugggacugcaucaugaccagcuaccaguaccugaucauccagaacaccacgugggagaaccacugccaguucucccgccccagccccaucggcuaccucgggcugcugagccagcggacccgcgacaucuacaucucccggcgccuccugggcaccuucaccuggacgcugagcgacuccgagggcaacgccacccccgggggcuacugccucacccgguggaugcugaucgaggccgagcugaagugcuucgggaacaccgccgucgccaagugcaacgagaagcacgacgaggaguucugcgacaugcuccgccuguucgacuucugcaagcaggcgaucagccggcugaaguccccggcccagaugagcauccagcucaucaacaaggccgugaacgcccugaucaacgaccagcugaucaugaagaaccaccuccgcgacaucaugggcauccccuacugcaacuacuccaaguacugcuaccugaaccacacgaucaccgggaagaccagccugcccaagugcugccucguguccaacggcagcuaccugaacgagacccacuucuccgacgacaucgagcagcaggccgacaacaugaucacggagaugcugcagaaggaguacauggagcggcagggcaagaccccgcuggggcucgucgaccuguucguguucagcaccuccuucuaccugaucagcaucuuccuccgccuggugaagauccccacccaccggcacaucgucggcaagcccugccccaagccgcaccgccugaaccacauggggaucugcuccugcggccucuacaagcagcccggggugcccgugcgguggaagcgcugaggacuagucccuguucccagagcccacuuuuuuuucuuuuuuugaaauaaaauagccugucuuucagaucuaaaaaaaaaaaaaaaaaaaaaaaaaaaaaaaaaaaaaaaaaaaaaaaaaaaaaaaaaaaaaaaaaaaaaaaaaaaaaaaaaaaaaaaaaaaaaaaaaaaa

SEQ ID NO: 33578 - RNA, 1721 nt, Artificial Sequence
  mRNA product Design a-1 (A100) comprising derived and/or modified sequence from LASV(Togo/2016/7082;Clade VI)__AMR44577__GPCmut8 (opt1)
aggagagucccgcagucggcguccagcggcucugcuuguucgugugugugucguugcaggccuuauucaagcuuaccaugggccagaucaucaccuucuuccaggaggugccccacgucaucgaggaggugaugaacaucgugcugaucgcccucagccugcuggccauccucaagggggucuacaacguggcgaccugcggcaucaucgggcuggugacguuccuguuccucugcggccgcuccugcagccugaucuacaagggguccuacgagcugcagacccucgagcugaacauggagacccugaacaugugcaugccgcucagcugcaccaagaacuccagccaccacuacauccgggucggcaacgagacgggccuggagcugacccucaccaacaccuccaucaucaaccacaaguucugcaaccugagcgacgcccacaagcgcaaccuguacgaccacgcccucauguccauccugagcacguuccaccuguccauccccaacuucaaccaguacgaggccaugagcugcgacuucaacgggggcaagaucuccgugcaguacaaccucagccacgccuacgcgguggacgccgccgagcacugcgggaccgucgccaacggcgugcugcagaccuucaugcggauggcguggggcggguccuacaucgcccuggacagcggccgcgggaacugggacugcaucaugaccuccuaccaguaccucaucauccagaacacgaccugggaggaccacugccaguucagccggcccucccccaucggcuaccuggggcugcucagccagcgcacccgggacaucuacaucagccgccggcugcugggcaccuucacguggacccucuccgacagcgagggcaacgagacccccgggggcuacugccugacccgcuggaugcugaucgaggccgagcucaagugcuucgggaacacggccguggccaagugcaacgagaagcacgacgaggaguucugcgacaugcugcggcuguucgacuucugcaagcaggcgauccagcgccucaaguccccggcccagaugagcauccagcugaucaacaaggccgucaacgcccugaucaacgaccagcucaucaugaagaaccaccuccgggacaugaugggcauccccuacugcaacuacuccaaguacugcuaccugaaccacaccagcuccgggcgcaccagccugcccaagugcugccugguguccaacggcagcuaccugaacgagacccacuucuccgacgacaucgagcagcaggccgacaacaugaucacggagaugcuccagaaggaguacaucgaccggcagggcaagaccccgcuggggcugguggaccuguucgucuucagcaccuccuucuaccucaucagcaucuuccugcaccugaucaagauccccacccaccgccacaucgugggcaagcccugccccaagccgcaccggcucaaccacauggggaucugcuccugcggccuguacaagcagcccggggugcccacgcgcuggaagcggugaggacuagucccuguucccagagcccacuuuuuuuucuuuuuuugaaauaaaauagccugucuuucagaucuaaaaaaaaaaaaaaaaaaaaaaaaaaaaaaaaaaaaaaaaaaaaaaaaaaaaaaaaaaaaaaaaaaaaaaaaaaaaaaaaaaaaaaaaaaaaaaaaaaaa

SEQ ID NO: 33579 - RNA, 1721 nt, Artificial Sequence
  mRNA product Design a-1 (A100) comprising derived and/or modified sequence from LASV(KAK-428;Clade n.d. (VII))__ANH09740__GPCmut8 (opt1)
aggagagucccgcagucggcguccagcggcucugcuuguucgugugugugucguugcaggccuuauucaagcuuaccaugggccagaucgugaccuucuuccaggaggucccccacgugaucgaggaggugaugaacaucguccugaucgcccucagccugcuggccauccucaaggggcuguacaacuucgcgaccugcggcgugaucgggcugaucacguuccuccugcugugcggccgcuccugcagcgccaccuacaaggggcaguacgagcuccagacccuggagcugaacauggagucccucaacaugugcaugccgcugagcugcaccaagaacaacucccaccacuacauccgggccggcaacaacacgggccuggagcucacccugaccaacaccagcaucaucucccacaaguucugcaaccugagcgacgcccacaagaagaaccucuacgaccacacgcugauguccaucaucaccaccuuccaccugagcauccccaacuucaaccaguacgaggccauguccugcgacuucaacgggggcaagaucagcauccaguacaaccucucccacagcuacgcgggggacgccgcccagcacugcggcaccguggccaacgggguccugcagacguucaugcgcauggcguggggcggcuccuaccuggcccucgacagcgggcggcgcggcugggacugcaucaucuccagcuaccaguaccugaucauccagaacaccaccugggacgaccacugccaguucucccggcccagccccaucggguaccugggcuucgugagccagaagacccgcgacaucuacaucucccggcgccuccugggcacguucaccuggacccugagcgacuccgaggggcacgacaugccgggcggguacugccucacccgguggaugcugaucgaggccgaccugaagugcuucggcaacacggccguggccaagugcaacgagaagcacgacgaggaguucugcgacauguggcgccucuucgacuucugcaagcaggcgauccagcggcugaaggcccccgcccagaugaacauccagcugaucaacaaggccgucaacgcccucaucaacgaccagcugaugaugaagaaccaccuccgcgacaucauggggauccccuacugcaacuacagcaaguucugcuaccugaacaacaccaccaccggccggacgucccugccccgcugcugccugaucagcaacggcuccuaccucaacgagacccacuucagcgacgacaucgagcagcaggcggacaacaugaucaccgagaugcugcagaaggaguacauggaccggcaggggaagaccccgcugggccucguggaccuguucguguucuccacgagcuucuaccugaucaccaucuuccugcaccucgucaagauccccacccaccgccacaucguggggaagcccugccccaagccgcaccggcugaaccacaugggcaucugcuccugcgggcuguacaagcagcccggcgugcccguccgcuggaagcggugaggacuagucccuguucccagagcccacuuuuuuuucuuuuuuugaaauaaaauagccugucuuucagaucuaaaaaaaaaaaaaaaaaaaaaaaaaaaaaaaaaaaaaaaaaaaaaaaaaaaaaaaaaaaaaaaaaaaaaaaaaaaaaaaaaaaaaaaaaaaaaaaaaaaa

SEQ ID NO: 33580 - RNA, 1721 nt, Artificial Sequence; identical to SEQ ID NO: 33574
  mRNA product Design a-1 (A100) comprising derived and/or modified sequence from LASV(Pinneo-NIG-1969;Clade I)__AIT17836__GPCmut8 (opt1)

SEQ ID NO: 33581 - RNA, 1721 nt, Artificial Sequence
  mRNA product Design a-1 (A100) comprising derived and/or modified sequence from LASV(ISTH0009-NIG-2011;Clade II)__AIT17404__GPCmut8 (opt1)
aggagagucccgcagucggcguccagcggcucugcuuguucgugugugugucguugcaggccuuauucaagcuuaccaugggccagaucaucaccuucuuccaggaggugccccacgucaucgaggaggugaugaacaucgugcugaucgcccucagccugcuggccauccucaaggggaucuacaacgucgcgaccugcggccuguucgggcugguguccuuccuccugcugugcggccgcagcugcuccacgaccuacaaggggguguacgagcuccagacccuggagcuggacauggccagccucaacaugugcaugccgcuguccugcaccaagaacaacagccaccacuacaucauggucggcaacgagacgggccuggagcucacccugaccaacaccuccaucaucaaccacaaguucugcaaccugagcgacgcccacaagaagaaccucuacgaccacgcccugauguccaucaucagcacguuccaccuguccauccccaacuucaaccaguacgaggccaugagcugcgacuucaacgggggcaagaucuccgugcaguacaaccucagccacgcguacgccguggacgccgccaaccacugcgggaccaucgcgaacggcguccugcagaccuucaugcggauggccuggggcggguccuacaucgcccuggacagcggcaagggguccugggacugcaucaugaccagcuaccaguaccucaucauccagaacacgaccugggaggaccacugccaguucucccgccccagccccaucggcuaccuggggcugcucagccagcggacccgcgacaucuacaucucccggcgccugcugggcaccuucacguggacccucagcgacuccgagggcaacgagacccccgggggcuacugccugacccgguggaugcugaucgaggccgagcucaagugcuucgggaacacggccguggcgaagugcaacgagaagcacgacgaggaguucugcgacaugcugcgccuguucgacuucugcaagcaggccauccggcgccucaagaccccggcccagaugagcauccagcugaucaacaaggccgugaacgcccugaucaacgaccagcucaucaugaagaaccaccuccgggacaucaugggcauccccuacugcaacuacuccaaguacugcuaccugaaccacaccgucaccgggaagacgagccugccccgcugcugccugguguccaacggcagcuaccugaacgagacccacuucuccgacgacaucgagcagcaggcggacaacaugaucaccgagcuccugcagaaggaguacauggaccggcagggcaagaccccgcuggggcugguggaccucuucgucuucagcacguccuucuaccugaucagcaucuuccugcaccucaucaagauccccacccaccgccacaucaccggcaagcccugccccaagccgcaccggcugaaccacauggggaucugcuccugcggccuguacaagcaccccggggugcccgugaaguggaagcgcugaggacuagucccuguucccagagcccacuuuuuuuucuuuuuuugaaauaaaauagccugucuuucagaucuaaaaaaaaaaaaaaaaaaaaaaaaaaaaaaaaaaaaaaaaaaaaaaaaaaaaaaaaaaaaaaaaaaaaaaaaaaaaaaaaaaaaaaaaaaaaaaaaaaaa

SEQ ID NO: 33582 - RNA, 1721 nt, Artificial Sequence
  mRNA product Design a-1 (A100) comprising derived and/or modified sequence from LASV(ISTH2010-NIG-2012;Clade II)__AIT17482__GPCmut8 (opt1)
aggagagucccgcagucggcguccagcggcucugcuuguucgugugugugucguugcaggccuuauucaagcuuaccaugggccagaucaucaccuucuuccaggaggugccccacgucaucgaggaggugaugaacaucgugcugaucgcccucagccugcuggccauccucaaggggaucuacaacgucgcgaccugcggccuguucgggcugguguccuuccuccugcugugcggccgcagcugcuccacgaccuacaaggggguguacgagcuccagacccuggagcuggacauggccagccucaacaugugcaugccgcuguccugcaccaagaacaacagccaccacuacaucauggucggcaacgagacgggccuggagcucacccugaccaacaccuccaucaucaaccacaaguucugcaaccugagcgacgcccacaagaagaaccucuacgaccacgcccugauguccaucaucagcacguuccaccuguccauccccaacuucaaccaguacgaggccaugagcugcgacuucaacgggggcaagaucuccgugcaguacaaccucagccacgcguacgccguggacgccgccaaccacugcgggaccaucgcgaacggcguccugcagaccuucaugcggauggccuggggcggguccuacaucgcccuggacagcggcaagggguccugggacugcaucaugaccagcuaccaguaccucaucauccagaacaucacgugggaggaccacugccaguucucccgccccagccccaucggcuaccuggggcugcucagccagcggacccgcgacaucuacaucucccggcgccugcugggcaccuucaccuggacgcucagcgacuccgagggcaacgagacccccgggggcuacugccugacccgguggaugcugaucgaggccgagcucaagugcuucgggaacaccgccguggcgaagugcaacgagaagcacgacgaggaguucugcgacaugcugcgccuguucgacuucugcaagcaggccauccggcgccucaagacgccggcccagaugagcauccagcugaucaacaaggccgugaacgcccugaucaacgaccagcucaucaugaagaaccaccuccgggacaucaugggcauccccuacugcaacuacuccaaguacugcuaccugaaccacaccgucaccgggaagaccagccugccccgcugcugccugguguccaacggcagcuaccugaacgagacgcacuucuccgacgacaucgagcagcaggcggacaacaugaucaccgagcuccugcagaaggaguacaucgaccggcagggcaagaccccgcuggggcugguggaccucuucgucuucagcaccuccuucuaccugaucagcaucuuccugcaccucgugaagauccccacgcaccgccacguggucggcaagcccugccccaagccgcaccggcugaaccacauggggaucugcuccugcggccuguacaagcaccccggggugcccgugaaguggaagcgcugaggacuagucccuguucccagagcccacuuuuuuuucuuuuuuugaaauaaaauagccugucuuucagaucuaaaaaaaaaaaaaaaaaaaaaaaaaaaaaaaaaaaaaaaaaaaaaaaaaaaaaaaaaaaaaaaaaaaaaaaaaaaaaaaaaaaaaaaaaaaaaaaaaaaa

SEQ ID NO: 33583 - RNA, 1721 nt, Artificial Sequence
  mRNA product Design a-1 (A100) comprising derived and/or modified sequence from LASV(Lassa virus/H.sapiens-wt/NGA/2015/ISTH_0543;Clade II)__AVO03639__GPCmut8 (opt1)
aggagagucccgcagucggcguccagcggcucugcuuguucgugugugugucguugcaggccuuauucaagcuuaccaugggccagaucaucaccuucuuccaggaggugccccacgucaucgaggaggugaugaacaucgugcugaucgcccucagccugcuggccauccucaaggggaucuacaacgucgcgaccugcggccuguucgggcugguguccuuccuccugcugugcggccgcagcugcuccacgaccuacaaggggguguacgagcuccagacccuggagcuggacauggccaaccucaacaugugcaugccgcugagcugcaccaagaacaacucccaccacuacaucauggucggcaacgagacgggccuggagcucacccugaccaacaccagcaucaucaaccacaaguucugcaaccuguccgacgcccacaagaagaaccucuacgaccacgcccugaugagcaucaucuccacguuccaccugagcauccccaacuucaaccaguacgaggccauguccugcgacuucaacgggggcaagaucagcgugcaguacaaccucucccacaccuacgcgguggacgccgccaaccacugcgggaccaucgccaacggcguccugcagaccuucaugcggauggcguggggcgggagcuacaucgcccuggacuccggcaaggggagcugggacugcaucaugacguccuaccaguaccucgugauccagaacaccaccugggaggaccacugccaguucagccgccccucccccaucggcuaccuggggcugcucagccagcggacccgcgacaucuacaucagccggcgccugcugggcacguucaccuggacccucuccgacagcgagggcaacgagacccccgggggcuacugccugacgcgguggaugcugaucgaggccgagcucaagugcuucgggaacaccgccguggccaagugcaacgagaagcacgacgaggaguucugcgacaugcugcgccuguucgacuucugcaagcaggcgauccggcgccucaagaccccggcccagauguccauccagcugaucaacaaggccgucaacgcccugaucaacgaccagcucaucaugaagaaccaccuccgggacaucaugggcauccccuacugcaacuacagcaaguacugcuaccugaaccacaccgugacggggaagaccucccugccccgcugcugccuggugagcaacggcuccuaccugaacgagacccacuucagcgacgacaucgagcagcaggccgacaacaugaucaccgagcuccugcagaaggaguacaucgaccggcagggcaagacgccgcuggggcuggucgaccucuucguguucuccaccagcuucuaccugaucuccaucuuccugcaccucgugaagauccccacccaccgccacaucaccggcaagcccugccccaagccgcaccggcugaaccacauggggaucugcagcugcggccuguacaagcaccccgggguccccgugaaguggaagcgcugaggacuagucccuguucccagagcccacuuuuuuuucuuuuuuugaaauaaaauagccugucuuucagaucuaaaaaaaaaaaaaaaaaaaaaaaaaaaaaaaaaaaaaaaaaaaaaaaaaaaaaaaaaaaaaaaaaaaaaaaaaaaaaaaaaaaaaaaaaaaaaaaaaaaa

SEQ ID NO: 33584 - RNA, 1721 nt, Artificial Sequence
  mRNA product Design a-1 (A100) comprising derived and/or modified sequence from LASV(Lassa virus/H.sapiens-wt/NGA/2016/ISTH_0009;Clade II)__AVO03571__GPCmut8 (opt1)
aggagagucccgcagucggcguccagcggcucugcuuguucgugugugugucguugcaggccuuauucaagcuuaccaugggccagaucaucaccuucuuccaggaggugccccacgucaucgaggaggugaugaacaucgugcugaucgcccucagccugcuggccauccucaaggggaucuacaacgucgcgaccugcggccugcuggggcucguguccuuccugcugcucugcggccgcagcugcuccacgaccuacaaggggguguacgagcugcagacccuggagcucgacauggccagccugaacaugugcaugccgcuguccugcaccaagaacaacagccaccacuacaucauggucggcaacgagacgggccucgagcugacccugaccaacaccuccaucaucaaccacaaguucugcaaccucagcgacgcccacaagaagaaccuguacgaccacgcccugauguccaucaucagcacguuccaccucuccauccccaacuucaaccaguacgaggccaugagcugcgacuucaacgggggccggaucuccgugcaguacaaccugagccacuccuacgcgguggacgccgccaaccacugcgggaccaucgccaacggcguccugcagaccuucaugcgcauggcguggggcgggagcuacaucgcccucgacuccggcaaggggagcugggacugcaucaugaccuccuaccaguaccugaucauccagaacacgaccugggaggaccacugccaguucagccggcccagccccaucggcuaccuggggcuccugucccagcgcacccgggacaucuacaucagccgccggcugcucggcaccuucacguggacccuguccgacagcgagggcaacgagacccccgggggcuacugccugacccgcuggaugcucaucgaggccgagcugaagugcuucgggaacacggccguggccaagugcaacgagaagcacgacgaggaguucugcgacaugcugcggcuguucgacuucugcaagcaggcgauccgccggcugaagaccccggcccagauguccauccagcugaucaacaaggccgugaacgcccucaucaacgaccagcugaucaugaagaaccaccuccgcgacaucaugggcauccccuacugcaacuacagcaaguacugcuaccucaaccacaccgucaccgggaagacgucccugccccggugcugccuggugagcaacggcuccuaccucaacgagacccacuucagcgacgacaucgagcagcaggccgacaacaugaucaccgagcugcugcagaaggaguacaucgaccgccagggcaagaccccgcuggggcucguggaccuguucgucuucuccacgagcuucuaccugaucuccaucuuccuccaccuggugaagauccccacccaccggcacaucaccggcaagcccugccccaagccgcaccgccugaaccacauggggaucugcagcugcggccucuacaaccaccccggggugcccgucaaguggaagcggugaggacuagucccuguucccagagcccacuuuuuuuucuuuuuuugaaauaaaauagccugucuuucagaucuaaaaaaaaaaaaaaaaaaaaaaaaaaaaaaaaaaaaaaaaaaaaaaaaaaaaaaaaaaaaaaaaaaaaaaaaaaaaaaaaaaaaaaaaaaaaaaaaaaaa

SEQ ID NO: 33585 - RNA, 1721 nt, Artificial Sequence
  mRNA product Design a-1 (A100) comprising derived and/or modified sequence from LASV(Lassa virus/H.sapiens-wt/NGA/2016/ISTH_0017;Clade II)__AVO03567__GPCmut8 (opt1)
aggagagucccgcagucggcguccagcggcucugcuuguucgugugugugucguugcaggccuuauucaagcuuaccaugggccagaucaucaccuucuuccaggaggugccccacgucaucgaggaggugaugaacaucgugcugaucgcccucagccugcuggccauccucaaggggaucuacaacgucgcgaccugcggccuguucgggcugguguccuuccuccugcugugcggccgcagcugcuccacgaccuacaaggggguguacgagcuccagacccuggagcuggacauggccagccucaacaugugcaugccgcuguccugcaccaagaacaacagccaccacuacaucauggucggcaacgagacgggccuggagcucacccugaccaacaccuccaucaucaaccacaaguucugcaaccugagcgacgcccacaagaagaaccucuacgaccacgcccugauguccaucaucagcacguuccaccuguccauccccaacuucaaccaguacgaggccaugagcugcgacuucaacgggggcaagaucuccgugcaguacaaccucagccacaccuacgcgaucgacgccgccaaccacugcgggaccaucgccaacggcgugcugcagaccuucaugcggauggcguggggcggguccuacaucgcccuggacagcggcaagggguccugggacugcaucaugacgagcuaccaguaccucaucauccagaacaccaccugggaggaccacugccaguucucccgccccagccccaucggcuaccuggggcugcucagccagcggacccgcgacaucuacaucucccggcgccugcugggcacguucaccuggacccucagcgacuccgagggcaacgagacccccgggggcuacugccugacgcgguggaugcugaucgaggccgagcucaagugcuucgggaacaccgccgucgccaagugcaacgagaagcacgacgaggaguucugcgacaugcugcgccuguucgacuucugcaagcaggcgauccggcgccucaagaccccggcccagaugagcauccagcugaucaacaaggccgugaacgcccugaucaacgaccagcucaucaugaagaaccaccuccgggacaucaugggcauccccuacugcaacuacuccaaguacugcuaccugaaccacaccgugacggggaagaccagccugccccgcugcugccuggucuccaacggcagcuaccugaacgagacccacuucuccgacgacaucgagcagcaggccgacaacaugaucaccgagcuccugcagaaggaguacauggaccggcagggcaagacgccgcuggggcugguggaccucuucguguucagcaccuccuucuaccugaucagcaucuuccugcaccucguccgcauccccacccaccggcacgugaucggcaagcccugccccaagccgcaccgccugaaccacauggggaucugcuccugcggccuguacaagcaccccggggugcccgucaaguggaagcggugaggacuagucccuguucccagagcccacuuuuuuuucuuuuuuugaaauaaaauagccugucuuucagaucuaaaaaaaaaaaaaaaaaaaaaaaaaaaaaaaaaaaaaaaaaaaaaaaaaaaaaaaaaaaaaaaaaaaaaaaaaaaaaaaaaaaaaaaaaaaaaaaaaaaa

SEQ ID NO: 33586 - RNA, 1721 nt, Artificial Sequence
  mRNA product Design a-1 (A100) comprising derived and/or modified sequence from LASV(Lassa virus/H.sapiens-wt/NGA/2018/ISTH_0959;Clade II)__AVV65099__GPCmut8 (opt1)
aggagagucccgcagucggcguccagcggcucugcuuguucgugugugugucguugcaggccuuauucaagcuuaccaugggccagaucaucaccuucuuccaggaggugccccacgucaucgaggaggugaugaacaucgugcugaucgcccucagccugcuggccauccucaaggggaucuacaacgucgugaccugcggccuguucgggcugguguccuuccuccugcugugcggccgcagcugcuccacgaccuacaagggggucuacgagcuccagacccuggagcuggacauggcgagccucaacaugugcaugccgcuguccugcaccaagaacaacagccaccacuacaucauggugggcaacgagacgggccuggagcucacccugaccaacaccuccaucaucaaccacaaguucugcaaccugagcgacgcccacaagaagaaccucuacgaccacgcccugauguccaucaucagcacguuccaccuguccauccccaacuucaaccaguacgaggccaugagcugcgacuucaacgggggcaagaucuccgugcaguacaaccucagccacgccuacgcgaucgacgccgccaaccacugcgggaccaucgccaacggcguccugcagaccuucaugcggauggcguggggcggguccuacaucgcccuggacagcggcaagggguccugggacugcaucaugaccagcuaccaguaccucaucauccagaacacgaccugggaggaccacugccaguucucccgccccagccccaucggcuaccuggggcugcucagccagcggacccgcgacaucuacaucucccggcgccugcugggcaccuucacguggacccucagcgacuccgagggcaacgagacccccgggggcuacugccugacccgguggaugcugaucgaggccgagcucaagugcuucgggaacacggccguggccaagugcaacgagaagcacgacgaggaguucugcgacaugcugcgccuguucgacuucugcaagcaggcgauccggcgccucaagaccccggcccagaugagcauccagcugaucaacaaggccgugaacgcccugaucaacgaccagcucaucaugaagaaccaccuccgggacaucaugggcauccccuacugcaacuacuccaaguacugcuaccugaaccacaccgucaccgggaagacgagccugccccgcugcugccugguguccaacggcagcuaccugaacgagacccacuucuccgacgacaucgagcagcaggccgacaacaugaucaccgagcuccugcagaaggaguacaucgaccggcagggcaagaccccgcuggggcugguggaccucuucgucuucagcacguccuucuaccugaucagcaucuuccugcaccucgugaagauccccacccaccgccacgugaucggcaagcccugccccaagccgcaccggcugaaccacauggggaucugcuccugcggccuguacaagcaccccgggguccccgugaaguggaagcgcugaggacuagucccuguucccagagcccacuuuuuuuucuuuuuuugaaauaaaauagccugucuuucagaucuaaaaaaaaaaaaaaaaaaaaaaaaaaaaaaaaaaaaaaaaaaaaaaaaaaaaaaaaaaaaaaaaaaaaaaaaaaaaaaaaaaaaaaaaaaaaaaaaaaaa

SEQ ID NO: 33587 - RNA, 1721 nt, Artificial Sequence
  mRNA product Design a-1 (A100) comprising derived and/or modified sequence from LASV(LASV003-NIG-2008;Clade II)__AIT17580__GPCmut8 (opt1)
aggagagucccgcagucggcguccagcggcucugcuuguucgugugugugucguugcaggccuuauucaagcuuaccaugggccagaucaucaccuucuuccaggaggugccccacgucaucgaggaggugaugaacaucgugcugaucgcccucagccugcuggccauccucaaggggaucuacaacgucgcgaccugcggccuguucgggcugguguccuuccuccugcugugcggccgcagcugcuccacgaccuacaaggggguguacgagcuccagacccuggagcuggacauggccagccucaacaugugcaugccgcuguccugcaccaagaacaacagccaccacuacaucauggucggcaacgagacgggccuggagcucacccugaccaacaccuccaucaucaaccacaaguucugcaaccugagcgacgcccacaagaagaaccucuacgaccacgcccugauguccaucaucagcacguuccaccuguccauccccaacuucaaccaguacgaggccaugagcugcgacuucaacgggggcaagaucuccgugcaguacaaccucagccacaccuacgcgguggacgccgccaaccacugcgggaccaucgccaacggcguccugcagaccuucaugcggauggcguggggcggguccuacaucgcccuggacagcggcaagggguccugggacugcaucaugacgagcuaccaguaccucaucauccagaacaccaccugggaggaccacugccaguucucccgccccagccccaucggcuaccuggggcugcucagccagcggacccgcgacaucuacaucucccggcgccugcugggcacguucaccuggacccucagcgacuccgagagcaacgagaccccgggcggguacugccugacgcgguggaugcugaucgaggccgagcucaagugcuucggcaacaccgccguggccaagugcaacgagaagcacgacgaggaguucugcgacaugcugcgccuguucgacuucugcaagcaggcgauccggcgccucaaggcccccgcccagauguccauccagcugaucaacaaggccgugaacgcccugaucaacgaccagcucaucaugaagaaccaccuccgggacaucauggggauccccuacugcaacuacagcaaguacugcuaccugaaccacaccgucaccggccgcacgucccugccccggugcugccuggugagcaacggguccuaccugaacgagacccacuucagcgacgacaucgagcagcaggcggacaacaugaucaccgagcuccugcagaaggaguacauggaccgccagggcaagaccccgcugggccugguggaccucuucgucuucuccacgagcuucuaccugaucuccaucuuccugcaccucgugaagauccccacccaccggcacgugaucgggaagcccugccccaagccgcaccgccugaaccacaugggcaucugcagcugcgggcuguacaagcaccccggcguccccgugaaguggaagcggugaggacuagucccuguucccagagcccacuuuuuuuucuuuuuuugaaauaaaauagccugucuuucagaucuaaaaaaaaaaaaaaaaaaaaaaaaaaaaaaaaaaaaaaaaaaaaaaaaaaaaaaaaaaaaaaaaaaaaaaaaaaaaaaaaaaaaaaaaaaaaaaaaaaaa

SEQ ID NO: 33588 - RNA, 1721 nt, Artificial Sequence
  mRNA product Design a-1 (A100) comprising derived and/or modified sequence from LASV(LASV035-NIG-2009;Clade II)__AIT17588__GPCmut8 (opt1)
aggagagucccgcagucggcguccagcggcucugcuuguucgugugugugucguugcaggccuuauucaagcuuaccaugggccagaucaucaccuucuuccaggaggugccccacgucaucgaggaggugaugaacaucgugcugaucgcccucagccugcuggccauccucaaggggaucuacaacgucgcgaccugcggccuguucgggcugguguccuuccuccugcugugcggccgcagcugcuccacgaccuacaaggggguguacgagcuccagacccuggagcuggacauggccagccucaacaugugcaugccgcuguccugcaccaagaacaacagccaccacuacaucauggucggcaacgagacgggccuggagcucacccugaccaacaccuccaucaucaaccacaaguucugcaaccugagcgacgcccacaagaagaaccucuacgaccacgcccugauguccaucaucagcacguuccaccuguccauccccaacuucaaccaguacgaggccaugagcugcgacuucaacgggggcaagaucuccgugcaguacaaccucagccacgcguacgccguggacgccgccaaccacugcgggaccaucgcgaacggcguccugcagaccuucaugcggauggccuggggcggguccuacaucgcccuggacagcggcaagggguccugggacugcaucaugaccagcuaccaguaccucaucauccagaacacgaccugggaggaccacugccaguucucccgccccagccccaucggcuaccuggggcugcucagccagcggacccgcgacaucuacaucucccggcgccugcugggcaccuucacguggacccucagcgacuccgagggcaacgagacccccgggggcuacugccugacccgguggaugcugaucgaggccgagcucaagugcuucgggaacacggccguggcgaagugcaacgagaagcacgacgaggaguucugcgacaugcugcgccuguucgacuucugcaagcaggccauccggcgccucaaggccccggcccagaugagcauccagcugaucaacaaggccgugaacgcgcugaucaacgaccagcucaucaugaagaaccaccuccgggacaucaugggcauccccuacugcaacuacuccaaguacugcuaccugaaccacaccgucaccgggaagaccagccugccccgcugcugccugguguccaacggcagcuaccugaacgagacgcacuucuccgacgacaucgagcagcaggccgacaacaugaucaccgagcuccugcagaaggaguacaucgaccggcagggcaagaccccgcuggggcugguggaccucuucgucuucagcaccuccuucuaccugaucagcaucuuccugcaccucgugaagauccccacgcaccgccacgugaucggcaagcccugccccaagccgcaccggcugaaccacauggggaucugcuccugcggccuguacaagcaccccgggguccccgugaaguggaagcgcugaggacuagucccuguucccagagcccacuuuuuuuucuuuuuuugaaauaaaauagccugucuuucagaucuaaaaaaaaaaaaaaaaaaaaaaaaaaaaaaaaaaaaaaaaaaaaaaaaaaaaaaaaaaaaaaaaaaaaaaaaaaaaaaaaaaaaaaaaaaaaaaaaaaaa

SEQ ID NO: 33589 - RNA, 1721 nt, Artificial Sequence
  mRNA product Design a-1 (A100) comprising derived and/or modified sequence from LASV(LASV1000-NIG-2009;Clade II)__AIT17782__GPCmut8 (opt1)
aggagagucccgcagucggcguccagcggcucugcuuguucgugugugugucguugcaggccuuauucaagcuuaccaugggccagaucaucaccuucuuccaggaggugccccacgucaucgaggaggugaugaacaucgugcugaucgcccucagccugcuggccauccucaaggggaucuacaacgucgcgaccugcggccuguucgggcugguguccuuccuccugcugugcggccgcagcugcuccacgaccuacaaggggguguacgagcuccagacccuggagcuggacauggccagccucaacaugugcaugccgcuguccugcaccaagaacaacagccaccacuacaucauggucggcaacgagacgggccuggagcucacccugaccaacaccuccaucaucaaccacaaguucugcaaccugagcgacgcccacaagaagaaccucuacgaccacgcccugauguccaucaucagcacguuccaccuguccauccccaacuucaaccaguacgaggccaugagcugcgacuucaacgggggcaagaucuccgugcaguacaaccucagccacaccuacgcgguggacgccgccaaccacugcgggaccaucgccaacggcguccugcagaccuucaugcggauggcguggggcggguccuacaucgcccuggacagcggcaagggguccugggacugcaucaugacgagcuaccaguaccucaucauccagaacaccaccugggaggaccacugccaguucucccgccccagccccaucggcuaccuggggcugcucagccagcggacccgcgacaucuacaucucccggcgccugcugggcacguucaccuggacccucagcgacuccgagggcaacgagacccccgggggcuacugccugacgcgguggaugcugaucgaggccgagcucaagugcuucgggaacaccgccguggccaagugcaacgagaagcacgacgaggaguucugcgacaugcugcgccuguucgacuucugcaagcaggcgaucaagcggcucaagaccccggcccagaugagcauccagcugaucaacaaggccgugaacgcccugaucaacgaccagcucaucaugaagaaccaccuccgcgacaucaugggcauccccuacugcaacuacuccaaguacugcuaccugaaccacaccgucacggggaagaccagccugccccggugcugccugguguccaacggcagcuaccugaacgagacccacuucuccgacgacaucgagcagcaggccgacaacaugaucaccgagcuccugcagaaggaguacaucgaccgccagggcaagacgccgcuggggcugguggaccucuucgucuucagcaccuccuucuaccugaucagcaucuuccugcaccucgugaagauccccacccaccggcacguggucggcaagcccugccccaagccgcaccgccugaaccacauggggaucugcuccugcggccuguacaagcaccccggggugcccgugaaguggaagcggugaggacuagucccuguucccagagcccacuuuuuuuucuuuuuuugaaauaaaauagccugucuuucagaucuaaaaaaaaaaaaaaaaaaaaaaaaaaaaaaaaaaaaaaaaaaaaaaaaaaaaaaaaaaaaaaaaaaaaaaaaaaaaaaaaaaaaaaaaaaaaaaaaaaaa

SEQ ID NO: 33590 - RNA, 1721 nt, Artificial Sequence
  mRNA product Design a-1 (A100) comprising derived and/or modified sequence from LASV(LASV221-NIG-2010;Clade II)__AIT17624__GPCmut8 (opt1)
aggagagucccgcagucggcguccagcggcucugcuuguucgugugugugucguugcaggccuuauucaagcuuaccaugggccagaucaucaccuucuuccaggaggugccccacgucaucgaggaggugaugaacaucgugcugaucgcccucagccugcuggccauccucaaggggaucuacaacgucgcgaccugcggccuguucgggcugguguccuuccuccugcugugcggccgcagcugcuccacgaccuacaaggggguguacgagcuccagacccuggagcuggacauggccagccucaacaugugcaugccgcuguccugcaccaagaacaacagccaccacuacaucauggucggcaacgagacgggccuggagcucacccugaccaacaccuccaucaucaaccacaaguucugcaaccugagcgacgcccacaagaagaaccucuacgaccacgcccugauguccaucaucagcacguuccaccuguccauccccaacuucaaccaguacgaggccaugagcugcgacuucaacgggggcaagaucuccgugcaguacaaccucagccacaccuacgcgaucgacgccgccaaccacugcgggaccaucgccaacggcgugcugcagaccuucaugcggauggcguggggcggguccuacaucgcccuggacagcggcaagggguccugggacugcaucaugacgagcuaccaguaccucaucauccagaacaccaccugggaggaccacugccaguucucccgccccagccccaucggcuaccuggggcugcucagccagcggacccgcgacaucuacaucucccggcgccugcugggcacguucaccuggacccucagcgacuccgagggcaacgagacccccgggggcuacugccugacgcgguggaugcugaucgaggccgagcucaagugcuucgggaacaccgccgucgccaagugcaacgagaagcacgacgaggaguucugcgacaugcugcgccuguucgacuucugcaagcaggcgauccggcgccucaagaccccggcccagaugagcauccagcugaucaacaaggccgugaacgcccugaucaacgaccagcucaucaugaagaaccaccuccgggacaucaugggcauccccuacugcaacuacuccaaguacugcuaccugaaccacaccgugacggggaagaccagccugccccgcugcugccuggucuccaacggcagcuaccugaacgagacccacuucuccgacgacaucgagcagcaggccgacaacaugaucaccgagaugcuccagaaggaguacauggaccggcagggcaagacgccgcuggggcugguggaccuguucguguucagcaccuccuucuaccucaucagcaucuuccugcaccuggucaagauccccacccaccgccacgugaucggcaagcccugccccaagccgcaccggcucaaccacauggggaucugcuccugcggccuguacaagcaccccggggugcccgucaaguggaagcgcugaggacuagucccuguucccagagcccacuuuuuuuucuuuuuuugaaauaaaauagccugucuuucagaucuaaaaaaaaaaaaaaaaaaaaaaaaaaaaaaaaaaaaaaaaaaaaaaaaaaaaaaaaaaaaaaaaaaaaaaaaaaaaaaaaaaaaaaaaaaaaaaaaaaaa

SEQ ID NO: 33591 - RNA, 1721 nt, Artificial Sequence
  mRNA product Design a-1 (A100) comprising derived and/or modified sequence from LASV(LASV237-NIG-2010;Clade II)__AIT17638__GPCmut8 (opt1)
aggagagucccgcagucggcguccagcggcucugcuuguucgugugugugucguugcaggccuuauucaagcuuaccaugggccagaucaucaccuucuuccaggaggugccccacgucaucgaggaggugaugaacaucgugcugaucgcccucagccugcuggccauccucaaggggaucuacaacgucgcgaccugcggccuguucgggcugguguccuuccuccugcugugcggccgcagcugcuccacgaccuacaaggggguguacgagcuccagacccuggagcuggacauggccagccucaacaugugcaugccgcuguccugcaccaagaacaacagccaccacuacaucauggucggcaacgagacgggccuggagcucacccugaccaacaccuccaucaucaaccacaaguucugcaaccugagcgacgcccacaagaaggaccucuacgaccacgcccugauguccaucaucagcacguuccaccuguccauccccaacuucaaccaguacgaggccaugagcugcgacuucaacgggggcaagaucuccgugcaguacaaccucagccacaccuacgcgguggacgccgccaaccacugcgggaccaucgccaacggcguccugcagaccuucaugcggauggcguggggcggguccuacaucgcccuggacagcggcaagggguccugggacugcaucaugacgagcuaccaguaccucaucauccagaacaccaccugggaggaccacugccaguucucccgccccagccccaucggcuaccuggggcugcucagccagcggacccgcgacaucuacaucucccggcgccugcugggcacguucaccuggacccucagcgacuccgagggcaacgagacccccgggggcuacugccugacgcgguggaugcugaucgaggccgagcucaagugcuucgggaacaccgccguggccaagugcaacgagaagcacgacgaggaguucugcgacaugcugcgccuguucgacuucugcaagcaggcgauccggcgccucaagaccccggcccagaugagcauccagcugaucaacaaggccgugaacgcccugaucaacgaccagcucaucaugaagaaccaccuccgggacaucaugggcauccccuacugcaacuacuccaaguacugcuaccugaaccacaccgucacggggaagaccagccugccccgcugcugccugguguccaacggcagcuaccugaacgagacccacuucuccgacgacaucgagcagcaggccgacaacaugaucaccgagcuccugcagaaggaguacauggaccggcagggcaagacgccgcuggggcugguggaccucuucgucuucagcaccuccuucuaccugaucagcaucuuccugcaccucaucaagauccccacccaccgccacaucaccggcaagcccugccccaagccgcaccggcugaaccacauggggaucugcuccugcggccuguacaagcaccccggggugcccgugaaguggaagcgcugaggacuagucccuguucccagagcccacuuuuuuuucuuuuuuugaaauaaaauagccugucuuucagaucuaaaaaaaaaaaaaaaaaaaaaaaaaaaaaaaaaaaaaaaaaaaaaaaaaaaaaaaaaaaaaaaaaaaaaaaaaaaaaaaaaaaaaaaaaaaaaaaaaaaa

SEQ ID NO: 33592 - RNA, 1721 nt, Artificial Sequence
  mRNA product Design a-1 (A100) comprising derived and/or modified sequence from LASV(LASV253-NIG-2011;Clade II)__AIT17670__GPCmut8 (opt1)
aggagagucccgcagucggcguccagcggcucugcuuguucgugugugugucguugcaggccuuauucaagcuuaccaugggccagaucaucaccuucuuccaggaggugccccacgucaucgaggaggugaugaacaucgugcugaucgcccucagccugcuggccauccucaaggggaucuacaacgucgcgaccugcggccuguucgggcugguguccuuccuccugcugugcggccgcagcugcuccacgaccuacaaggggguguacgagcuccagacccuggagcuggacauggccagccucaacaugugcaugccgcuguccugcaccaagaacaacagccaccacuacaucauggucggcaacgagacgggccuggagcucacccugaccaacaccuccaucaucaaccacaaguucugcaaccugagcgacgcccacaagaagaaccucuacgaccacgcccugauguccaucaucagcacguuccaccuguccauccccaacuucaaccaguacgaggccaugagcugcgacuucaacgggggcaagaucuccgugcaguacaaccucagccacaccuacgcgguggacgccgccaaccacugcgggaccaucgccaacggcguccugcagaccuucaugcggauggcguggggcggguccuacaucgcccuggacagcggcaagggguccugggacugcaucaugacgagcuaccaguaccucaucauccagaacaccaccugggaggaccacugccaguucucccgccccagccccaucggcuaccuggggcugcucagccagcggacccgcgacaucuacaucucccggcgccugcugggcacguucaccuggacccucagcgacuccgagggcaacgagacccccgggggcuacugccugacgcgguggaugcugaucgaggccgagcucaagugcuucgggaacaccgccguggccaagugcaacgagaagcacgacgaggaguucugcgacaugcugcgccuguucgacuucugcaagcaggcgauccggcgccucaaggccccggcccagaugagcauccagcugaucaacaaggccgugaacgcccugaucaacgaccagcucaucaugaagaaccaccuccgggacaucaugggcauccccuacugcaacuacuccaaguacugcuaccugaaccacaccgucaccgggcgcacgagccugccccggugcugccugguguccaacggcagcuaccugaacgagacccacuucuccgacgacaucgagcagcaggcggacaacaugaucaccgagcuccugcagaaggaguacaucgaccgccagggcaagaccccgcuggggcugguggaccucuucgucuucagcacguccuucuaccugaucagcaucuuccugcaccucgugaagauccccacccaccggcacaucaucggcaagcccugccccaagccgcaccgccugaaccacauggggaucugcuccugcggccuguacaagcaccccggggugcccgucaaguggaagcggugaggacuagucccuguucccagagcccacuuuuuuuucuuuuuuugaaauaaaauagccugucuuucagaucuaaaaaaaaaaaaaaaaaaaaaaaaaaaaaaaaaaaaaaaaaaaaaaaaaaaaaaaaaaaaaaaaaaaaaaaaaaaaaaaaaaaaaaaaaaaaaaaaaaaa

SEQ ID NO: 33593 - RNA, 1721 nt, Artificial Sequence
  mRNA product Design a-1 (A100) comprising derived and/or modified sequence from LASV(LASV254-NIG-2011;Clade II)__AIT17674__GPCmut8 (opt1)
aggagagucccgcagucggcguccagcggcucugcuuguucgugugugugucguugcaggccuuauucaagcuuaccaugggccagaucaucaccuucuuccaggaggugccccacgucaucgaggaggugaugaacaucgugcugaucgcccucagccugcuggccauccucaaggggaucuacaacgucgcgaccugcggccuguucgggcugguguccuuccuccugcugugcggccgcagcugcuccacgaccuacaaggggguguacgagcuccagacccuggagcuggacaugaccaaccucaacaugugcaugccgcugagcugcacgaagaacaacucccaccacuacaucauggucggcaacgagaccggccuggagcucacccugaccaacacgagcaucaucaaccacaaguucugcaaccuguccgacgcccacaagaagaaccucuacaaccacgcccugaugagcaucaucuccaccuuccaccugagcauccccaacuucaaccaguacgaggccauguccugcgacuucaacgggggcaagaucagcgugcaguacaaccucucccacagcuacgccguggacgcggccaaccacugcgggaccaucgccaacggcguccugcagaccuucaugcggauggccuggggcggguccuacaucgcgcuggacagcggcaaggggaacugggacugcaucaugacguccuaccaguaccucaucauccagaacaccaccugggaggaccacugccaguucagccgccccucccccaucggcuaccuggggcugcucagccagcggacccgcgacaucuacaucagccggcgccugcugggcacguucaccuggacccucuccgacagcgagggcaacgagacccccgggggcuacugccugacgcgguggaugcugaucgaggccgagcucaagugcuucgggaacaccgccguggccaagugcaacgagaagcacgacgaggaguucugcgacaugcugcgccuguucgacuucugcaagcaggccauccggcgccucaagaccccggcgcaggccaacauccagcugaucaacaaggccgugaacgcccugaucaacgaccagcucaucaugaagaaccaccuccgggacaucaugggcauccccuacugcaacuacuccaaguacugcuaccugaaccacaccgucacggggaagaccagccugccccgcugcugccugguguccaacggcagcuaccugaacgagacccacuucuccgacgacaucgagcagcaggccgacaacaugaucaccgagcuccugcagaaggaguacauggaccggcagggcaagacgccgcuggggcugguggaccucuucgucuucagcaccuccuucuaccugaucagcaucuuccugcaccucgugaagauccccacccaccgccacgugaucggcaagcccugccccaagccgcaccggcugaaccacauggggaucugcuccugcggccuguacaagcaccccgggguccccgugaaguggaagcgcugaggacuagucccuguucccagagcccacuuuuuuuucuuuuuuugaaauaaaauagccugucuuucagaucuaaaaaaaaaaaaaaaaaaaaaaaaaaaaaaaaaaaaaaaaaaaaaaaaaaaaaaaaaaaaaaaaaaaaaaaaaaaaaaaaaaaaaaaaaaaaaaaaaaaa

SEQ ID NO: 33594 - RNA, 1721 nt, Artificial Sequence
  mRNA product Design a-1 (A100) comprising derived and/or modified sequence from LASV(Nig08-A19;Clade III)__ADU56618__GPCmut8 (opt1)
aggagagucccgcagucggcguccagcggcucugcuuguucgugugugugucguugcaggccuuauucaagcuuaccaugggccagaucgugaccuucuuccaggaggucccccacgugaucgaggaggugaugaacaucguccugaucgcccucagcauccuggccauccugaaggggcucuacaacaucgcgaccugcggccugaucgggcuggugacguuccuccugcuguccggccgcagcugcuccaugaccuacaaggggguguacgagcuccagacccuggagcugaacaugaacacccucaacaugugcaugccgcugagcugcacgaagaacaacucccaccacuacaucauggucggcaacgagaccggccuggagcucacccugaccaacacgagccugcuccaccacaaguucugcaaccuguccgacgcccacaagaagaaccuguacgaccacacccucaugagcaucaucuccaccuuccaccugagcauccccaacuucaaccaguacgaggccauguccugcgacuucaacgggggcaagaucaccgugcaguacaaccugagccacuccuacgccaucgacgccgcgaaccacugcgggacgguggccaacggcguccuccagaccuucaugcggauggccuggggcgggagcuacaucgcccuggacuccggccgcgggaagugggacugcaucaugaccagcuaccaguaccugaucauccagaacaccacgugggaggaccacugccaguucucccggcccagccccaucggcuaccucgggcugcugucccagcgcacccgggacaucuacaucagccgccggcuccugggcaccuucaccuggacgcugagcgacuccgagggcaacgagacccccgggggcuacugccucacccgcuggaugcugaucgaggcggagcugaagugcuucgggaacaccgccguggccaagugcaacgagaagcacgacgaggaguucugcgacaugcuccggcuguucgacuucugcaagcaggccauccgccggcugaaggccccggcgcagaugagcauccagcucaucaacaaggccgugaacgcccugaucaacgaccagcugaucaugaagaaccaccuccgcgacaucaugggcauccccuacugcaacuacuccaaguacugcuaccugaaccacacgagcaccgggcggaccucccugccccgcugcugccucgucagcaacggcuccuaccugaacgagacccacuucagcgacgacaucgagcagcaggccgacaacaugaucacggagaugcugcagaaggaguaccuggaccggcagggcaagaccccgcucgggcugguggaccuguucguguucuccaccagcuucuaccucaucuccaucuuccugcaccuggucaagauccccacccaccgccacaucgugggcaagcccugccccaagccgcaccggcucaaccacauggggaucugcagcugcggccuguacaagcagcccggggugcccguccgcuggaagcggugaggacuagucccuguucccagagcccacuuuuuuuucuuuuuuugaaauaaaauagccugucuuucagaucuaaaaaaaaaaaaaaaaaaaaaaaaaaaaaaaaaaaaaaaaaaaaaaaaaaaaaaaaaaaaaaaaaaaaaaaaaaaaaaaaaaaaaaaaaaaaaaaaaaaa

SEQ ID NO: 33595 - RNA, 1724 nt, Artificial Sequence
  mRNA product Design a-1 (A100) comprising derived and/or modified sequence from LASV(G1180-SLE-2010;Clade IV)__AIT17168__GPCmut8 (opt1)
aggagagucccgcagucggcguccagcggcucugcuuguucgugugugugucguugcaggccuuauucaagcuuaccaugggccagaucgugaccuucuuccaggaggucccccacgugaucgaggaggugaugaacaucguccugaucgcccucagcauccuggccgugcugaaggggcucuacaacuucgcgaccugcggccugguggggcugcucacguuccugcugcucugcggccgcuccugcaccgccagccgguacaagggggucuacgagcugcagacccuggagcucaacauggagacccugaacaugugcaugccgcuguccugcacgaagaacaacagccaccacuacaucauggugggcaacgagaccggccucgagcugacccugaccaacacguccaucaucaaccacaaguucugcaaccucagcgacgcccacaagaagaaccuguacgaccacgcccugauguccaucaucagcaccuuccaccucuccauccccaacuucaaccaguacgaggccaugagcugcgacuucaacgggggcaagaucuccgugcaguacaaccugagccacuccuacgcgggggacgccgccaaccacugcggcaccgucgccaacggggugcugcagaccuucaugcgcauggcguggggcggcagcuacaucgcccucgacuccgggcacggcagcugggacugcaucaugacguccuaccaguaccugaucauccagaacaccaccugggaggaccacugccaguucagccggcccucccccaucggguaccugggccuccugagccagcgcacccgggacaucuacaucagccgccggcugcucggcacguucaccuggacccuguccgacagcgaggggaaggacaccccgggcggguacugccugacgcgcuggaugcucaucgaggccgagcugaagugcuucggcaacaccgccguggccaagugcaacgagaagcacgacgaggaguucugcgacaugcugcggcuguucgacuucugcaagcaggcgauccagcgccugaaggcccccgcccagauguccauccagcugaucaacaaggccgucaacgcccucaucaacgaccagcugaucaugaagaaccaccuccgggacaucauggggauccccuacugcaacuacagcaaguacugcuaccucaaccacaccaccacgggcaagaccucccugcccaagugcugccuggugagcaacggcuccuaccucaacgagacccacuucagcgacgacaucgagcagcaggcggacaacaugaucaccgagaugcugcagaaggaguacauggagcgccaggggaagacgccgcugggccugguggaccucuucgucuucuccaccagcuucuaccugaucuccaucuuccugcaccucgugaagauccccacccaccggcacaucgugggcaagagcugccccaagccccaccgccugaaccacauggggaucugcuccugcgggcuguacaagcagccgggcguccccgugaaguggaagcggugaggacuagucccuguucccagagcccacuuuuuuuucuuuuuuugaaauaaaauagccugucuuucagaucuaaaaaaaaaaaaaaaaaaaaaaaaaaaaaaaaaaaaaaaaaaaaaaaaaaaaaaaaaaaaaaaaaaaaaaaaaaaaaaaaaaaaaaaaaaaaaaaaaaaa

SEQ ID NO: 33596 - RNA, 1724 nt, Artificial Sequence
  mRNA product Design a-1 (A100) comprising derived and/or modified sequence from LASV(G1442-SLE-2011;Clade IV)__AIT17180__GPCmut8 (opt1)
aggagagucccgcagucggcguccagcggcucugcuuguucgugugugugucguugcaggccuuauucaagcuuaccaugggccagaucgugaccuucuuccaggaggucccccacgugaucgaggaggugaugaacaucguccugaucgcccucagcauccuggccgugcugaaggggcucuacaacguggcgaccugcggccugaucgggcuggucacguuccuccugcugugcggccgcuccugcaccaccacccucuacaaggggguguacgagcugcagacgcuggagcucaacauggagacccugaacaugugcaugccgcugagcugcaccaagaacaacucccaccacuacauccgggugggcaacgagaccggccucgagcugacgcugaccaacaccagcaucaucaaccacaaguucugcaaccucuccgacgcccacaagaagaaccuguacgaccacgcccugaugagcaucaucuccaccuuccaccucagcauccccaacuucaaccaguacgaggccauguccugcgacuucaacgggggcaagaucagcguccaguacaaccugucccacagcuacgccggggacgcggccaaccacugcggcacgguggccaacggggugcugcagaccuucaugcgcauggccuggggcggcuccuacaucgcgcucgacagcgggcggggcaacugggacugcaucaugaccuccuaccaguaccugaucauccagaacaccacgugggacgaccacugccaguucagccgccccucccccaucggguaccugggccuccugagccagcggacccgcgacgucuacaucucccggcgccugcucggcaccuucaccuggacgcugagcgacagcgaggggaaggacaccccgggcggguacugccugacccgguggaugcucaucgaggccgagcugaagugcuucggcaacaccgccguggccaagugcaacgagaagcacgacgaggaguucugcgacaugcugcgccucuucgacuucugcaagcaggccauccagcggcugaaggcgcccgcccagauguccauccagcugaucaacaaggccgugaacgcccucaucaacgaccagcugaucaugaagaaccaccuccgcgacaucauggggauccccuacugcaacuacagcaaguacugcuaccugaacaacacggccaccggcaagaccucccugcccaagugcugccugaucagcaacggcuccuaccucaacgagacccacuucagcgacgacaucgagcaggaggcggacaacaugaucacggagaugcugcagaaggaguacauggagcggcaggggaagaccccgcugggccuggucgaccucuucguguucuccaccagcuucuaccugaucuccaucuuccugcaccucgugaagauccccacccaccgccacaucgucggcaagagcugccccaagccccaccggcugaaccacauggggaucugcuccugcgggcuguacaagcagccgggcgugcccgugcgcuggaagcggugaggacuagucccuguucccagagcccacuuuuuuuucuuuuuuugaaauaaaauagccugucuuucagaucuaaaaaaaaaaaaaaaaaaaaaaaaaaaaaaaaaaaaaaaaaaaaaaaaaaaaaaaaaaaaaaaaaaaaaaaaaaaaaaaaaaaaaaaaaaaaaaaaaaaa

SEQ ID NO: 33597 - RNA, 1724 nt, Artificial Sequence
  mRNA product Design a-1 (A100) comprising derived and/or modified sequence from LASV(G3010-SLE-2013;Clade IV)__AIT17344__GPCmut8 (opt1)
aggagagucccgcagucggcguccagcggcucugcuuguucgugugugugucguugcaggccuuauucaagcuuaccaugggccagaucgugaccuucuuccaggaggucccccacgugaucgaggaggugaugaacaucguccugaucgcccucagcauccuggccgugcugaaggggcucuacaacuucgcgaccugcggccugguggggcuggucacguuccuccugcugugcggccgcuccugcaccaccagccucuacaaggggguguacgagcugcagacccuggagcucaacauggagacgcugaacaugugcaugccgcuguccugcaccaagaacaacagccaccacuacaucauggugggcaacgagaccggccucgagcugacccugacgaacaccuccaucaucaaccacaaguucugcaaccucagcgacgcccacaagaagaaccuguacaaccacgcccugauguccaucaucagcaccuuccaccucuccauccccaacuucaaccaguacgaggccaugagcugcgacuucaacgggggcaagaucuccguccaguacaaccugagccacuccuacgccggggacgcggccagccacugcggcaccguggccaacggggugcugcagacguucaugcggauggccuggggcggcuccuacaucgcgcucgacagcggguacggcaagugggacugcaucaugaccuccuaccaguaccugaucauccagaacaccaccugggaggaccacugccaguucagccgccccucccccaucggguaccugggccuccugagccagcggacgcgcgacaucuacaucagccggcgccugcucggcaccuucaccuggacccuguccgacagcgaggggaaggacacgccgggcggguacugccugacccgguggaugcucaucgaggccgagcugaagugcuucggcaacaccgccgucgccaagugcaacgagaagcacgacgaggaguucugcgacaugcugcgccucuucgacuucugcaagcaggccauccagcggcugaagacccccgcgcagauguccauccagcugaucaacaaggccgugaacgcccucaucaacgaccagcugaucaugaagaaccaccuccgcgacaucauggggauccccuacugcaacuacagcaaguacugcuaccugaaccacacgaccaccggcaagaccucccugcccaagugcugccuggugagcaacggcuccuaccucaacgagacgcacuucagcgacgacaucgagcagcaggccgacaacaugaucaccgagaugcugcagaaggaguacauggagcggcaggggaagaccccgcugggccuggucgaccucuucguguucuccaccagcuucuaccugaucuccaucuuccugcaccucgugaagauccccacgcaccgccacaucgucggcaagagcugccccaagccccaccggcugaaccacauggggaucugcuccugcgggcuguacaagcagccgggcgugcccgugcgcuggaagcggugaggacuagucccuguucccagagcccacuuuuuuuucuuuuuuugaaauaaaauagccugucuuucagaucuaaaaaaaaaaaaaaaaaaaaaaaaaaaaaaaaaaaaaaaaaaaaaaaaaaaaaaaaaaaaaaaaaaaaaaaaaaaaaaaaaaaaaaaaaaaaaaaaaaaa

SEQ ID NO: 33598 - RNA, 1724 nt, Artificial Sequence
  mRNA product Design a-1 (A100) comprising derived and/or modified sequence from LASV(G502-SLE-2009;Clade IV)__AIT17126__GPCmut8 (opt1)
aggagagucccgcagucggcguccagcggcucugcuuguucgugugugugucguugcaggccuuauucaagcuuaccaugggccagaucgugaccuucuuccaggaggucccccacgugaucgaggaggugaugaacaucguccugaucgcccucagcauccuggccgugcugaaggggcucuacaacuucgcgaccugcggccugguggggcugcucacguuccugcugcucugcggccgcuccugcaccaccgggcuguacaagggcgucuacgagcugcagacccucgagcugaacauggagacgcugaacaugugcaugccgcucagcugcaccaagaacaacucccaccacuacaucauggugggcaacgagaccgggcuggagcugacccucacgaacaccagcaucaucaaccacaaguucugcaaccuguccgacgcccacaagaagaaccuguacgaccacgcccucaugagcaucaucuccaccuuccaccugagcauccccaacuucaaccaguacgaggccauguccugcgacuucaacggcgggaagaucagcgugcaguacaaccugucccacagcuacgccggcgacgcggccgaccacugcgggaccgucgccaacggcgugcuccagacguucaugcggauggccuggggcggguccuacaucgcgcuggacagcggccgcgggcggugggacugcaucaugaccuccuaccaguaccugaucauccagaacaccaccugggaggaccacugccaguucagccgccccucccccaucggcuaccucggccugcugagccagcggacgcgcgacaucuacaucucccggcgccuccuggggaccuucaccuggacccugagcgacagcgagggcaaggacacgcccgggggcuacugccucacccgguggaugcugaucgaggccgagcugaagugcuucgggaacaccgccguggccaagugcaacgagaagcacgacgaggaguucugcgacaugcuccgccuguucgacuucugcaagcaggccauccagcggcugaaggcgccggcccagauguccauccagcucaucaacaaggccgucaacgcccugaucaacgaccagcuggugaugaagaaccaccuccgcgacaucaugggcauccccuacugcaacuacagccgguacugcuaccugaaccacaccacgaccggccgcaccucccugcccaagugcugccucgugagcaacggguccuaccugaacgagacccacuucagcgacgacaucgagcagcaggccgacaacaugaucacggagaugcugcagaaggaguacauggagcggcagggcaagaccccgcuggggcucgucgaccuguucguguucuccaccagcuucuaccugaucuccaucuuccuccaccuggugaagauccccacccaccgccacaucgucggcaagagcugccccaagccccaccggcugaaccacauggggaucugcuccugcggccucuacaagcagccgggcgugcccgugaaguggaagcgcugaggacuagucccuguucccagagcccacuuuuuuuucuuuuuuugaaauaaaauagccugucuuucagaucuaaaaaaaaaaaaaaaaaaaaaaaaaaaaaaaaaaaaaaaaaaaaaaaaaaaaaaaaaaaaaaaaaaaaaaaaaaaaaaaaaaaaaaaaaaaaaaaaaaaa

SEQ ID NO: 33599 - RNA, 1724 nt, Artificial Sequence
  mRNA product Design a-1 (A100) comprising derived and/or modified sequence from LASV(G733-SLE-2010;Clade IV)__AIT17154__GPCmut8 (opt1)
aggagagucccgcagucggcguccagcggcucugcuuguucgugugugugucguugcaggccuuauucaagcuuaccaugggccagaucgugaccuucuuccaggaggucccccacgugaucgaggaggugaugaacaucguccugaucgcccucagcauccuggccgugcugaaggggcucuacaacuucgcgaccugcggcaucguggggcuggucuccuuccugcuccugugcggccgcagcugcacgaccucccuguacaaggggguguacgagcuccagacccuggagcugaacauggagacccucaacaugugcaugccgcugagcugcacgaagaacaacucccaccacuacaucauggugggcaacgagaccggccuggagcucacccugaccaacacgagcaucaucaaccacaaguucugcaaccuguccgacgcccacaagaagaaccucuacgaccacgcccugaugagcaucaucuccaccuuccaccugagcauccccaacuucaaccaguacgaggccauguccugcgacuucaacgggggcaagaucagcguccaguacaaccucucccacagcuacgccggggacgcggccaaccacugcggcaccaucgccaacggggugcugcagaccuucaugcggauggccuggggcggcuccuacaucgcgcuggacagcgggcgcgaccggugggacugcaucaugacguccuaccaguaccucaucauccagaacaccaccugggaggaccacugccaguucagccgccccucccccaucggcuaccuggggcugcucagccagcggacccgcgacaucuacaucagccggcgccugcugggcacguucaccuggacccucuccgacagcgagggcaaggacacccccgggggcuacugccugacgcgguggaugcugaucgaggccgagcucaagugcuucgggaacaccgccguggccaagugcaacgagaagcacgacgaggaguucugcgacaugcugcgccuguucgacuucugcaagcaggccauccagcggcucaaggcgccggcccagauguccauccagcugaucaacaaggccgucaacgcccugaucaacgaccagcucaucaugaagaaccaccuccgcgacaucaugggcauccccuacugcaacuacagcaaguacugcuaccugaaccacaccaccacggggaagaccucccugcccaagugcugccuggugagcaacggcuccuaccugaacgagacccacuucagcgacgacaucgagcagcaggccgacaacaugaucaccgagaugcuccagaaggaguacauggagcggcagggcaagacgccgcuggggcugguggaccuguucgucuucuccaccagcuucuaccucaucuccaucuuccugcaccuggugaagauccccacccaccgccacguggucggcaagagcugccccaagccccaccggcucaaccacauggggaucugcuccugcggccuguacgggcagccgggcgugcccgugaaguggaagcgcugaggacuagucccuguucccagagcccacuuuuuuuucuuuuuuugaaauaaaauagccugucuuucagaucuaaaaaaaaaaaaaaaaaaaaaaaaaaaaaaaaaaaaaaaaaaaaaaaaaaaaaaaaaaaaaaaaaaaaaaaaaaaaaaaaaaaaaaaaaaaaaaaaaaaa

SEQ ID NO: 33600 - RNA, 1724 nt, Artificial Sequence
  mRNA product Design a-1 (A100) comprising derived and/or modified sequence from MOPV/LASV reassortant(IGS-1;Clade IV)__AFY05576__GPCmut8 (opt1)
aggagagucccgcagucggcguccagcggcucugcuuguucgugugugugucguugcaggccuuauucaagcuuaccaugggccagaucgugaccuucuuccaggaggucccccacgugaucgaggaggugaugaacaucguccugaucgcccucagcgugcuggccgugcugaaggggcucuacaacuucgcgaccugcggccuggucgggcuggugacguuccuccugcugugcggccgcuccugcaccaccagccucuacaaggggguguacgagcugcagacccuggagcucaacauggagacgcugaacaugugcaugccgcuguccugcaccaagaacaacagccaccacuacaucauggucggcaacgagaccggccucgagcugacccugacgaacaccuccaucaucaaccacaaguucugcaaccucagcgacgcccacaagaagaaccuguacgaccacgcccugauguccaucaucagcaccuuccaccucuccauccccaacuucaaccaguacgaggccaugagcugcgacuucaacgggggcaagaucuccgugcaguacaaccugagccacuccuacgccggggacgcggccaaccacugcggcaccguggccaacgggguccugcagacguucaugcggauggccuggggcggcagcuacaucgcgcucgacuccgggcgcggcaacugggacugcaucaugaccagcuaccaguaccugaucauccagaacaccaccugggaggaccacugccaguucucccggcccagccccaucggguaccugggccuccugucccagcgcacgcgggacaucuacaucagccgccggcugcucggcaccuucaccuggacccugagcgacuccgagggggaggacacgccgggcggguacugccugacccgcuggaugcucaucgaggccgagcugaagugcuucggcaacaccgccguggccaagugcaacgagaagcacgacgaggaguucugcgacaugcugcggcuguucgacuucugcaagcaggccauccagcgccugaaggcgcccgcccagaugagcauccagcugaucaacaaggccgugaacgcccucaucaacgaccagcugaucaugaagaaccaccuccgggacaucauggggauccccuacugcaacuacuccaaguacugcuaccucaaccacaccacgaccggccgcaccagccugcccaagugcugccuggucuccaacggcagcuaccucaacgagacccacuucuccgacgacaucgagcagcaggccgacaacaugaucacggagaugcugcagaaggaguacauggagcggcaggggaagaccccgcugggccugguggaccucuucguguucagcaccuccuucuaccugaucagcaucuuccugcaccucgucaagauccccacccaccgccacaucguggggaaguccugccccaagccccaccggcugaaccacaugggcaucugcagcugcgggcuguacaagcagccgggcgugcccgucaaguggaagcgcugaggacuagucccuguucccagagcccacuuuuuuuucuuuuuuugaaauaaaauagccugucuuucagaucuaaaaaaaaaaaaaaaaaaaaaaaaaaaaaaaaaaaaaaaaaaaaaaaaaaaaaaaaaaaaaaaaaaaaaaaaaaaaaaaaaaaaaaaaaaaaaaaaaaaa

SEQ ID NO: 33601 - RNA, 1724 nt, Artificial Sequence
  mRNA product Design a-1 (A100) comprising derived and/or modified sequence from LASV(LM765-SLE-2012;Clade IV)__AIT17814__GPCmut8 (opt1)
aggagagucccgcagucggcguccagcggcucugcuuguucgugugugugucguugcaggccuuauucaagcuuaccaugggccagaucgugaccuucuuccaggaggucccccacgugaucgaggaggugaugaacaucguccugaucgcccucagcauccuggccgugcugaaggggcucuacaacuucgcgaccugcggccugguggggcuggucacguuccuccugcugugcggccgcuccugcaccaccagccucuacaaggggguguacgagcugcagacccuggagcucaacauggagacgcugaacaugugcaugccgcuguccugcaccaagaacaacagccaccacuacaucauggugggcaacgagaccggccucgagcugacccugacgaacaccuccaucaucgaccacaaguucugcaaccucagcgacgcccaccggaagaaccuguacgaccacgcccugauguccaucaucagcaccuuccaccucuccauccccaacuucaaccaguacgaggccaugagcugcgacuucaacgggggcaagaucuccguccaguacaaccugagccacuccuacgccaaggacgcggccgaccacugcgggaccguggccaacggcgugcugcagacguucaugcgcauggccuggggcgggagcuacaucgcgcucgacuccggccgggggcgcugggacugcaucaugaccagcuaccaguaccugaucauccagaacaccaccugggaggaccacugccaguucucccggcccagccccaucggcuaccuggggcuccugucccagcgcacgcgggacaucuacaucagccgccggcugcucggcaccuucaccuggacccugagcgacuccgagggcaaggacacgcccgggggcuacugccugacccgcuggaugcucaucgaggccgagcugaagugcuucgggaacaccgccgucgccaagugcaacgagaagcacgacgaggaguucugcgacaugcugcggcuguucgacuucugcaagcaggccauccagcgccugaaggcgccggcccagaugagcauccagcugaucaacaaggccgugaacgcccucaucaacgaccagcugaucaugaagaaccaccuccgggacaucaugggcauccccuacugcaacuacuccaaguacugcuaccucaaccacaccacgaccgggaagaccagccugcccaagugcugccugguguccaacggcagcuaccucaacgagacccacuucuccgacgacaucgagcagcaggccgacaacaugaucacggagaugcugcagaaggaguacauggagcgccagggcaagaccccgcuggggcuggucgaccucuucguguucagcaccuccuucuaccugaucagcaucuuccugcaccucgugaagauccccacccaccggcacaucgucggcaagcccugccccaagccgcaccgccugaaccacauggggaucugcuccugcggccuguacaagcagcccggggugcccgugaaguggaagcggugaggacuagucccuguucccagagcccacuuuuuuuucuuuuuuugaaauaaaauagccugucuuucagaucuaaaaaaaaaaaaaaaaaaaaaaaaaaaaaaaaaaaaaaaaaaaaaaaaaaaaaaaaaaaaaaaaaaaaaaaaaaaaaaaaaaaaaaaaaaaaaaaaaaaa

SEQ ID NO: 33602 - RNA, 1724 nt, Artificial Sequence
  mRNA product Design a-1 (A100) comprising derived and/or modified sequence from LASV(LM776-SLE-2012;Clade IV)__AIT17824__GPCmut8 (opt1)
aggagagucccgcagucggcguccagcggcucugcuuguucgugugugugucguugcaggccuuauucaagcuuaccaugggccagaucgugaccuucuuccaggaggucccccacgugaucgaggaggugaugaacaucguccugaucgcccucagcauccuggccgugcugaaggggcucuacaacuucgcgaccugcggccugguggggcuggucacguuccuccugcugugcggccgcuccugcaccaccagcguguacaaggggguguacgagcuccagacccuggagcugaacauggagacgcucaacaugugcaugccgcuguccugcaccaagaacaacagccaccacuacaucauggucggcaacgagaccggccuggagcucacccugacgaacaccuccaucaucaaccacaaguucugcaaccugagcgacgcccacaagaagaaccucuacgaccacgcccugauguccaucaucagcaccuuccaccuguccauccccaacuucaaccaguacgaggccaugagcugcgacuucaacgggggcaagaucuccgugcaguacaaccucagccacuccuacgccggggacgcggccaaccacugcggcaccguggccaacgggguccugcagacguucaugcggauggccuggggcggcagcuacaucgcgcuggacuccgggcacggcaagugggacugcaucaugaccagcuaccaguaccucaucauccagaacaccaccugggaggaccacugccaguucucccgccccagccccaucggguaccugggccugcucucccagcggacgcgcgacaucuacaucagccggcgccugcugggcaccuucaccuggacccucagcgacuccgaggggaaggacacgccgggcggguacugccugacccgguggaugcugaucgaggccgagcucaagugcuucggcaacaccgccguggccaagugcaacgagaagcacgacgaggaguucugcgacaugcugcgccuguucgacuucugcaagcaggccauccagcggcucaaggcgcccgcccagaugagcauccagcugaucaacaaggccgugaacgcccugaucaacgaccagcucaucaugaagaaccaccuccgcgacaucauggggauccccuacugcaacuacuccaaguacugcuaccugaaccacaccacgaccggcaagaccagccugcccaagugcugccuggucuccaacggcagcuaccugaacgagacccacuucuccgacgacaucgagcagcaggccgacaacaugaucacggagaugcuccagaaggaguacauggagcggcaggggaagaccccgcugggccugguggaccuguucguguucagcaccuccuucuaccucaucagcaucuuccugcaccuggucaagauccccacccaccgccacaucguggggaaguccugccccaagccccaccggcucaaccacaugggcaucugcagcugcgggcuguacaagcagccgggcgugcccguccgcuggaagcggugaggacuagucccuguucccagagcccacuuuuuuuucuuuuuuugaaauaaaauagccugucuuucagaucuaaaaaaaaaaaaaaaaaaaaaaaaaaaaaaaaaaaaaaaaaaaaaaaaaaaaaaaaaaaaaaaaaaaaaaaaaaaaaaaaaaaaaaaaaaaaaaaaaaaa

SEQ ID NO: 33603 - RNA, 1724 nt, Artificial Sequence
  mRNA product Design a-1 (A100) comprising derived and/or modified sequence from LASV(Mad39;Clade IV)__ANH09722__GPCmut8 (opt1)
aggagagucccgcagucggcguccagcggcucugcuuguucgugugugugucguugcaggccuuauucaagcuuaccaugggccagaucgugaccuucuuccaggaggucccccacgugaucgaggaggugaugaacaucguccugaucgcccucagcauccuggccgugcugaaggggcucuacaacguggcgaccugcggccugaucgggcuggucacguuccuccugcugugcggccgcuccugcaccaccacccucuacaaggggguguacgagcugcaggcccuggagcucaacauggagacgcugaacaugugcaugccgcugagcugcaccaagaacaacucccaccacuacauccgggugggcaacgagaccggccucgagcugacccugacgaacaccagccucaucaaccacaaguucugcaaccuguccgacgcccacaagaagaaccuguacgaccacgcccucaugagcaucaucuccaccuuccaccugagcauccccaacuucaaccaguacgaggccauguccugcgacuucaacgacgggaagaucagcguccaguacaaccugucccacaccuacgcgggcgacacggccaaccacugcgggaccguggccaacggcgugcuccagaccuucaugcgcauggccuggggcgggagcuacaucgcgcuggacuccggccgcgggggcugggacugcaucaugaccagcuaccaguaccugaucauccagaacacgaccugggaggaccacugccaguucucccggcccagccccaucggguaccucggccugcugucccagcggacccgcgacaucuacaucagccggcgccuccugggcaccuucacguggacccuguccgacagcgaggggaaggacaccccgggcggguacugccucacccgguggaugcugaucgaggccgagcugaagugcuucggcaacacggccgucgccaagugcaacgagaagcacgacgaggaguucugcgacaugcuccgccuguucgacuucugcaagcaggccauccagcggcugaaggcgcccgcccagaugagcauccagcucaucaacaaggccgugaacgcccugaucaacgaccagcugaucaugaagaaccaccuccgcgacaucauggggauccccuacugcaacuacuccaaguacugcuaccugaaccacaccgugaccggcaagaccagccugcccaagugcugccucgucuccaacggcagcuaccugaacgagacgcacuucuccgacgacaucgagcagcaggccgacaacaugaucaccgagaugcugcagaaggaguacauggagcggcaggggaagaccccgcugggccucguggaccuguucguguucagcaccuccuucuaccugaucagcaucuuccuccaccuggucaagauccccacgcaccgccacgugguggggaagcccugccccaagccgcaccggcugaaccacaugggcaucugcuccugcggguucuacaagcagcccggcguccccgugcgcuggaagcggugaggacuagucccuguucccagagcccacuuuuuuuucuuuuuuugaaauaaaauagccugucuuucagaucuaaaaaaaaaaaaaaaaaaaaaaaaaaaaaaaaaaaaaaaaaaaaaaaaaaaaaaaaaaaaaaaaaaaaaaaaaaaaaaaaaaaaaaaaaaaaaaaaaaaa

SEQ ID NO: 33604 - RNA, 1724 nt, Artificial Sequence
  mRNA product Design a-1 (A100) comprising derived and/or modified sequence from LASV(Z0947-SLE-2011;Clade IV)__AIT17840__GPCmut8 (opt1)
aggagagucccgcagucggcguccagcggcucugcuuguucgugugugugucguugcaggccuuauucaagcuuaccaugggccagaucgugaccuucuuccaggaggucccccacgugaucgaggaggugaugaacaucguccugaucgcccucagcauccuggccgugcugaaggggcucuacaacuucgcgaccugcggccugguggggcuggucacguuccuccugcugugcggccgcuccugcaccaucagccucuacaaggggguguacgagcugcagacccuggagcucaacauggagacccugaacaugugcaugccgcuguccugcacgaagaacaacagccaccacuacaucauggugggcaacgagaccggccucgagcugacccugaccaacacguccaucaucaaccacaaguucugcaaccucagcgacgcccacaagaagaaccuguacgaccacgcccugauguccaucaucagcaccuuccaccucuccauccccaacuucaaccaguacgaggccaugagcugcgacuucaacgggggcaagaucuccguccaguacaaccugagccacuccuacgccggggacgcggccaaccacugcggcaccguggccaacggggugcugcagaccuucaugcggauggccuggggcggcagcuacaucgcgcucgacuccgggcgcgaccggugggacugcaucaugacgagcuaccaguaccugaucauccagaacaccaccugggaggaccacugccaguucucccgccccagccccaucggcuaccuggggcuccugucccagcggacccgcgacaucuacaucagccggcgccugcucggcacguucaccuggacccugagcgacuccgagggcaaggacacccccgggggcuacugccugacgcgguggaugcucaucgaggccgagcugaagugcuucgggaacaccgccgucgccaagugcaacgagaagcacgacgaggaguucugcgacaugcugcgccucuucgacuucugcaagcaggccauccagcggcugaaggcgccggcccagaugagcauccagcugaucaacaaggccgugaacgcccucaucaacgaccagcugaucaugaagaaccaccuccgcgacaucaugggcauccccuacugcaacuacuccaaguacugcuaccugaaccacaccaccacggggaagaccagccugcccaagugcugccugguguccaacggcagcuaccucaacgagacccacuucuccgacgacaucgagcagcaggccgacaacaugaucaccgagaugcugcagaaggaguacauggagcggcagggcaagacgccgcuggggcuggucgaccucuucguguucagcaccuccuucuaccugaucagcaucuuccugcaccucgugaagauccccacccaccgccacaucgucggcaagcccugccccaagccgcaccggcugaaccacauggggaucugcuccugcggccuguacaagcagcccggggugcccgugaaguggaagcgcugaggacuagucccuguucccagagcccacuuuuuuuucuuuuuuugaaauaaaauagccugucuuucagaucuaaaaaaaaaaaaaaaaaaaaaaaaaaaaaaaaaaaaaaaaaaaaaaaaaaaaaaaaaaaaaaaaaaaaaaaaaaaaaaaaaaaaaaaaaaaaaaaaaaaa

SEQ ID NO: 33605 - RNA, 1724 nt, Artificial Sequence
  mRNA product Design a-1 (A100) comprising derived and/or modified sequence from LASV(Josiah;Clade IV)__NP_694870__GPCmut8 (opt4)
aggagagucccgcagucggcguccagcggcucugcuuguucgugugugugucguugcaggccuuauucaagcuuaccaugggccagaucgugaccuucuuccaggaggugccccacgugaucgaggaggugaugaacaucgugcugaucgcccugagcgugcuggccgugcugaagggccuguacaacuucgccaccugcggccuggugggccuggugaccuuccugcugcugugcggcagaagcugcaccaccagccuguacaagggcguguacgagcugcagacccuggagcugaacauggagacccugaacaugugcaugccccugagcugcaccaagaacaacagccaccacuacaucauggugggcaacgagaccggccuggagcugacccugaccaacaccagcaucaucaaccacaaguucugcaaccugagcgacgcccacaagaagaaccuguacgaccacgcccugaugagcaucaucagcaccuuccaccugagcauccccaacuucaaccaguacgaggccaugagcugcgacuucaacggcggcaagaucagcgugcaguacaaccugagccacagcuacgccggcgacgccgccaaccacugcggcaccguggccaacggcgugcugcagaccuucaugagaauggccuggggcggcagcuacaucgcccuggacagcggcagaggcaacugggacugcaucaugaccagcuaccaguaccugaucauccagaacaccaccugggaggaccacugccaguucagcagacccagccccaucggcuaccugggccugcugagccagagaaccagagacaucuacaucagcagaagacugcugggcaccuucaccuggacccugagcgacagcgagggcaaggacacccccggcggcuacugccugaccagauggaugcugaucgaggccgagcugaagugcuucggcaacaccgccguggccaagugcaacgagaagcacgacgaggaguucugcgacaugcugagacuguucgacuucugcaagcaggccauccagagacugaaggcccccgcccagaugagcauccagcugaucaacaaggccgugaacgcccugaucaacgaccagcugaucaugaagaaccaccugagagacaucaugggcauccccuacugcaacuacagcaaguacugcuaccugaaccacaccaccaccggcagaaccagccugcccaagugcugccuggugagcaacggcagcuaccugaacgagacccacuucagcgacgacaucgagcagcaggccgacaacaugaucaccgagaugcugcagaaggaguacauggagagacagggcaagaccccccugggccugguggaccuguucguguucagcaccagcuucuaccugaucagcaucuuccugcaccuggugaagauccccacccacagacacaucgugggcaagagcugccccaagccccacagacugaaccacaugggcaucugcagcugcggccuguacaagcagcccggcgugcccgugaaguggaagagaugaggacuagucccuguucccagagcccacuuuuuuuucuuuuuuugaaauaaaauagccugucuuucagaucuaaaaaaaaaaaaaaaaaaaaaaaaaaaaaaaaaaaaaaaaaaaaaaaaaaaaaaaaaaaaaaaaaaaaaaaaaaaaaaaaaaaaaaaaaaaaaaaaaaaa

SEQ ID NO: 33606 - RNA, 1721 nt, Artificial Sequence
  mRNA product Design a-1 (A100) comprising derived and/or modified sequence from LASV(LP;Clade I)__AAF86701__GPCmut8 (opt4)
aggagagucccgcagucggcguccagcggcucugcuuguucgugugugugucguugcaggccuuauucaagcuuaccaugggccagaucaucaccuucuuccaggaggugccccacgugaucgaggaggugaugaacaucgugcugaucgcccugagccugcuggccauccugaagggccuguacaacaucgccaccugcggcaucaucggccugguggccuuccuguuccugugcggcaagagcugcagccugacccugaagggcggcuacgagcugcagacccuggagcugaacauggagacccugaacaugugcaugccccugagcugcaccaagaacagcagccaccacuacaucagagugggcaacgagaccggccuggagcugacccugaccaacaccagcaucaucaaccacaaguucugcaaccugagcgacgcccacaagaagaaccuguacgaccacgcccugaugagcaucaucagcaccuuccaccugagcauccccaacuucaaccaguacgaggccaugagcugcgacuucaacggcggcaagaucagcgugcaguacaaccugagccacagcuacgccggcgacgccgccgagcacugcggcaccguggccaacggcgugcugcagaccuucaugagaauggccuggggcggcagauacaucgcccuggacagcggcaagggcaacugggacugcaucaugaccagcuaccaguaccugaucauccagaacaccaccugggaggaccacugccaguucagcagacccagccccaucggcuaccugggccugcugagccagagaaccagagacaucuacaucagcagaagacugcugggcaccuucaccuggacccugagcgacagcgagggcaacgagacccccggcggcuacugccugaccagauggaugcugaucgaggccgagcugaagugcuucggcaacaccgccguggccaagugcaacgagaagcacgacgaggaguucugcgacaugcugagacuguucgacuucugcaagcaggccaucagaagacugaaggcccccgcccagaugagcauccagcugaucaacaaggccgugaacgcccugaucaacgaccagcugaucaugaagaaccaccugagagacaucaugggcauccccuacugcaacuacagcaaguacugcuaccugaaccacaccagcagcggcagaaccagccugcccaagugcugccugaucagcaacggcagcuaccugaacgagacccaguucagcgacgacaucgagcagcaggccgacaacaugaucaccgagaugcugcagaaggaguacaucgagagacagggcaagaccccccugggccugguggacaucuucaucuucagcaccagcuucuaccugaucagcaucuuccugcaccugaucaagauccccacccacagacacaucgugggcaagcccugccccaagccccacagacugaaccacaugggcgugugcagcugcggccuguacaagcaccccggcgugcccaccaaguggaagagaugaggacuagucccuguucccagagcccacuuuuuuuucuuuuuuugaaauaaaauagccugucuuucagaucuaaaaaaaaaaaaaaaaaaaaaaaaaaaaaaaaaaaaaaaaaaaaaaaaaaaaaaaaaaaaaaaaaaaaaaaaaaaaaaaaaaaaaaaaaaaaaaaaaaaa

SEQ ID NO: 33607 - RNA, 1721 nt, Artificial Sequence
  mRNA product Design a-1 (A100) comprising derived and/or modified sequence from LASV(803213;Clade II)__AAF86703__GPCmut8 (opt4)
aggagagucccgcagucggcguccagcggcucugcuuguucgugugugugucguugcaggccuuauucaagcuuaccaugggccagaucaucaccuucuuccaggaggugccccacgugaucgaggaggugaugaacaucgugcugaucgcccugagccugcuggccauccugaagggcaucuacaacguggccaccugcggccuguucggccugaucagcuuccugcugcugugcggcagaagcugcagcgugaccuacaagggcguguacgagcugcagacccuggagcugaacauggccaaccugaacaugugcaugccccugagcugcaccaagaacaacagccaccacuacaucauggugggcaacgagaccggccuggagcugacccugaccaacaccagcaucaucaaccacaaguucugcaaccugagcgacgcccacaagaagaaccuguacgaccacgcccugaugagcaucaucagcaccuuccaccugagcauccccaacuucaaccaguacgaggccaugagcugcgacuucaacggcggcaagaucagcgugcaguacaaccugagccacagcuucgccguggacgccgccaaccacugcggcaccaucgccaacggcgugcugcagaccuucaugagaauggccuggggcggcagcuacaucgcccuggacagcggcaagggcaacugggacugcaucaugaccagcuaccaguaccugaucauccagaacaccaccugggaggaccacugccaguucagcagacccagccccaucggcuaccugggccugcugagccagagaaccagagacaucuacaucagcagaagacugcugggcaccuucaccuggacccugagcgacagcgagggcaacgaggcccccggcggcuacugccugaccagauggaugcugaucgaggccgagcugaagugcuucggcaacaccgccguggccaagugcaacgagaagcacgacgaggaguucugcgacaugcugagacuguucgacuucugcaagcaggccaucaagagacugaagacccccgcccagaugagcauccagcugaucaacaaggccgugaacgcccugaucaacgaccagcugaucaugaagaaccaccugagagacaucaugggcauccccuacugcaacuacagcagauacugcuaccugaaccacaccgugaccggcaagaccagccugcccagaugcugccuggugagcaacggcagcuaccugaacgagacccacuucagcgacgacaucgagcagcaggccgacaacaugaucaccgagaugcugcagaaggaguacauggacagacagggcaagaccccccugggccugguggaccuguucguguucagcaccagcuucuaccugaucagcaucuuccugcaccuggugaagauccccacccacagacacaucgugggcaagcccugccccaagccccacagacugaaccacaugggcaucugcagcugcggccuguacaagcaccccggcgugcccgugaaguggaagagaugaggacuagucccuguucccagagcccacuuuuuuuucuuuuuuugaaauaaaauagccugucuuucagaucuaaaaaaaaaaaaaaaaaaaaaaaaaaaaaaaaaaaaaaaaaaaaaaaaaaaaaaaaaaaaaaaaaaaaaaaaaaaaaaaaaaaaaaaaaaaaaaaaaaaa

SEQ ID NO: 33608 - RNA, 1721 nt, Artificial Sequence
  mRNA product Design a-1 (A100) comprising derived and/or modified sequence from LASV(GA391;Clade III)__CAA36645__GPCmut8 (opt4)
aggagagucccgcagucggcguccagcggcucugcuuguucgugugugugucguugcaggccuuauucaagcuuaccaugggccagaucgugaccuucuuccaggaggugccccacgugaucgaggaggugaugaacaucgugcugaucgcccugagcauccuggccauccugaagggccuguacaacguggccaccugcggccugaucggccuggugaccuuccugcugcugagcggcagaagcugcagccugaucuacaagggcaccuacgagcugcagacccuggagcugaacauggagacccugaacaugugcaugccccugagcugcaccaagaacaacagccaccacuacaucagagugggcaacgagaccggccuggagcugacccugaccaacaccagcauccugaaccacaaguucugcaaccugagcgacgcccacaagagaaaccuguacgaccacagccugaugagcaucaucagcaccuuccaccugagcauccccaacuucaaccaguacgaggccaugagcugcgacuucaacggcggcaagaucaccgugcaguacaaccugagccacagcuucgccguggacgccgccggccacugcggcacccuggccaacggcgugcugcagaccuucaugagaauggccuggggcggcagcuacaucgcccuggacagcggcagaggcaacugggacugcaucaugaccagcuaccaguaccugaucauccagaacaccaccugggacgaccacugccaguucagcagacccagccccaucggcuaccugggccugcugagccagagaaccagagacaucuacaucagcagaagacugcugggcaccuucaccuggacccugagcgacagcgagggcaacgagacccccggcggcuacugccugaccagauggaugcugaucgaggccgagcugaagugcuucggcaacaccgccguggccaagugcaacgagaagcacgacgaggaguucugcgacaugcugagacuguucgacuucugcaagcaggccaucagaagacugaagacccccgcccagaugagcauccagcugaucaacaaggccgugaacgcccugaucaacgaccagcugaucaugaagaaccaccugagagacaucaugggcauccccuacugcaacuacagcagauacugcuaccugaaccacaccagcaccggcaagaccagccugcccagaugcugccugaucagcaacggcagcuaccugaacgagaccaaguucagcgacgacaucgagcagcaggccgacaacaugaucaccgagaugcugcagaaggaguacaucgacagacagggcaagaccccccugggccugguggaccuguucguguucagcaccagcuucuaccugaucagcaucuuccugcaccuggugaagauccccacccacagacacaucgugggcaagcccugccccaagccccacagacugaaccacaugggcaucugcagcugcggccuguacaagcagcccggcgugcccgugagauggaagagaugaggacuagucccuguucccagagcccacuuuuuuuucuuuuuuugaaauaaaauagccugucuuucagaucuaaaaaaaaaaaaaaaaaaaaaaaaaaaaaaaaaaaaaaaaaaaaaaaaaaaaaaaaaaaaaaaaaaaaaaaaaaaaaaaaaaaaaaaaaaaaaaaaaaaa

SEQ ID NO: 33609 - RNA, 1724 nt, Artificial Sequence
  mRNA product Design a-1 (A100) comprising derived and/or modified sequence from LASV(AV;Clade V)__CCA30314__GPCmut8 (opt4)
aggagagucccgcagucggcguccagcggcucugcuuguucgugugugugucguugcaggccuuauucaagcuuaccaugggccagaucgugaccuucuuccaggaggugccccacgugaucgaggaggugaugaacaucgugcugaucgcccugagcauccuggccgugcugaagggccuguacaacaucgccaccugcggccugaucggccugaucaccuuccugcugcugugcggcagaagcugcagcagcaaccuguacaagggcguguacgagcugcagagccuggaccugaacauggagacccugaacaugugcaugccccugagcugcaccaagaacaacagccaccacuacaucagagugggcaacgacaccggccuggagcugacccugaccaacaccagcauccugaaccacaaguucugcaaccugagcgacgcccacaagaaggaccuguacgaccacgcccugaugagcaucaucagcaccuuccaccugagcauccccaacuucaaccaguacgaggccaugagcugcgacuucaacggcggcaagaucagcgugcaguacaaccugagccacagcuacgccaucgacgccgccaaccacugcggcaccguggccaacggcauccugcagaccuucaugagaauggccuggggcggcagcuacaucgcccuggacagcggcagaggcaacugggacugcaucaugaccagcuaccaguaccugaucauccagaacaccaccugggagaaccacugccaguucagcagacccagccccaucggcuaccugggccugcugagccagagaaccagagacaucuacaucagcagaagacugcugggcaccuucaccuggacccugagcgacagcgagggcaacgccacccccggcggcuacugccugaccagauggaugcugaucgaggccgagcugaagugcuucggcaacaccgccguggccaagugcaacgagaagcacgacgaggaguucugcgacaugcugagacuguucgacuucugcaagcaggccaucagcagacugaagagccccgcccagaugagcauccagcugaucaacaaggccgugaacgcccugaucaacgaccagcugaucaugaagaaccaccugagagacaucaugggcauccccuacugcaacuacagcaaguacugcuaccugaaccacaccaucaccggcaagaccagccugcccaagugcugccuggugagcaacggcagcuaccugaacgagacccacuucagcgacgacaucgagcagcaggccgacaacaugaucaccgagaugcugcagaaggaguacauggagagacagggcaagaccccccugggccugguggaccuguucguguucagcaccagcuucuaccugaucagcaucuuccugagacuggugaagauccccacccacagacacaucgugggcaagcccugccccaagccccacagacugaaccacaugggcaucugcagcugcggccuguacaagcagcccggcgugcccgugagauggaagagaugaggacuagucccuguucccagagcccacuuuuuuuucuuuuuuugaaauaaaauagccugucuuucagaucuaaaaaaaaaaaaaaaaaaaaaaaaaaaaaaaaaaaaaaaaaaaaaaaaaaaaaaaaaaaaaaaaaaaaaaaaaaaaaaaaaaaaaaaaaaaaaaaaaaaa

SEQ ID NO: 33610 - RNA, 1721 nt, Artificial Sequence
  mRNA product Design a-1 (A100) comprising derived and/or modified sequence from LASV(Togo/2016/7082;Clade VI)__AMR44577__GPCmut8 (opt4)
aggagagucccgcagucggcguccagcggcucugcuuguucgugugugugucguugcaggccuuauucaagcuuaccaugggccagaucaucaccuucuuccaggaggugccccacgugaucgaggaggugaugaacaucgugcugaucgcccugagccugcuggccauccugaagggcguguacaacguggccaccugcggcaucaucggccuggugaccuuccuguuccugugcggcagaagcugcagccugaucuacaagggcagcuacgagcugcagacccuggagcugaacauggagacccugaacaugugcaugccccugagcugcaccaagaacagcagccaccacuacaucagagugggcaacgagaccggccuggagcugacccugaccaacaccagcaucaucaaccacaaguucugcaaccugagcgacgcccacaagagaaaccuguacgaccacgcccugaugagcauccugagcaccuuccaccugagcauccccaacuucaaccaguacgaggccaugagcugcgacuucaacggcggcaagaucagcgugcaguacaaccugagccacgccuacgccguggacgccgccgagcacugcggcaccguggccaacggcgugcugcagaccuucaugagaauggccuggggcggcagcuacaucgcccuggacagcggcagaggcaacugggacugcaucaugaccagcuaccaguaccugaucauccagaacaccaccugggaggaccacugccaguucagcagacccagccccaucggcuaccugggccugcugagccagagaaccagagacaucuacaucagcagaagacugcugggcaccuucaccuggacccugagcgacagcgagggcaacgagacccccggcggcuacugccugaccagauggaugcugaucgaggccgagcugaagugcuucggcaacaccgccguggccaagugcaacgagaagcacgacgaggaguucugcgacaugcugagacuguucgacuucugcaagcaggccauccagagacugaagagccccgcccagaugagcauccagcugaucaacaaggccgugaacgcccugaucaacgaccagcugaucaugaagaaccaccugagagacaugaugggcauccccuacugcaacuacagcaaguacugcuaccugaaccacaccagcagcggcagaaccagccugcccaagugcugccuggugagcaacggcagcuaccugaacgagacccacuucagcgacgacaucgagcagcaggccgacaacaugaucaccgagaugcugcagaaggaguacaucgacagacagggcaagaccccccugggccugguggaccuguucguguucagcaccagcuucuaccugaucagcaucuuccugcaccugaucaagauccccacccacagacacaucgugggcaagcccugccccaagccccacagacugaaccacaugggcaucugcagcugcggccuguacaagcagcccggcgugcccaccagauggaagagaugaggacuagucccuguucccagagcccacuuuuuuuucuuuuuuugaaauaaaauagccugucuuucagaucuaaaaaaaaaaaaaaaaaaaaaaaaaaaaaaaaaaaaaaaaaaaaaaaaaaaaaaaaaaaaaaaaaaaaaaaaaaaaaaaaaaaaaaaaaaaaaaaaaaaa

SEQ ID NO: 33611 - RNA, 1721 nt, Artificial Sequence
  mRNA product Design a-1 (A100) comprising derived and/or modified sequence from LASV(KAK-428;Clade n.d. (VII))__ANH09740__GPCmut8 (opt4)
aggagagucccgcagucggcguccagcggcucugcuuguucgugugugugucguugcaggccuuauucaagcuuaccaugggccagaucgugaccuucuuccaggaggugccccacgugaucgaggaggugaugaacaucgugcugaucgcccugagccugcuggccauccugaagggccuguacaacuucgccaccugcggcgugaucggccugaucaccuuccugcugcugugcggcagaagcugcagcgccaccuacaagggccaguacgagcugcagacccuggagcugaacauggagagccugaacaugugcaugccccugagcugcaccaagaacaacagccaccacuacaucagagccggcaacaacaccggccuggagcugacccugaccaacaccagcaucaucagccacaaguucugcaaccugagcgacgcccacaagaagaaccuguacgaccacacccugaugagcaucaucaccaccuuccaccugagcauccccaacuucaaccaguacgaggccaugagcugcgacuucaacggcggcaagaucagcauccaguacaaccugagccacagcuacgccggcgacgccgcccagcacugcggcaccguggccaacggcgugcugcagaccuucaugagaauggccuggggcggcagcuaccuggcccuggacagcggcagaagaggcugggacugcaucaucagcagcuaccaguaccugaucauccagaacaccaccugggacgaccacugccaguucagcagacccagccccaucggcuaccugggcuucgugagccagaagaccagagacaucuacaucagcagaagacugcugggcaccuucaccuggacccugagcgacagcgagggccacgacaugcccggcggcuacugccugaccagauggaugcugaucgaggccgaccugaagugcuucggcaacaccgccguggccaagugcaacgagaagcacgacgaggaguucugcgacauguggagacuguucgacuucugcaagcaggccauccagagacugaaggcccccgcccagaugaacauccagcugaucaacaaggccgugaacgcccugaucaacgaccagcugaugaugaagaaccaccugagagacaucaugggcauccccuacugcaacuacagcaaguucugcuaccugaacaacaccaccaccggcagaaccagccugcccagaugcugccugaucagcaacggcagcuaccugaacgagacccacuucagcgacgacaucgagcagcaggccgacaacaugaucaccgagaugcugcagaaggaguacauggacagacagggcaagaccccccugggccugguggaccuguucguguucagcaccagcuucuaccugaucaccaucuuccugcaccuggugaagauccccacccacagacacaucgugggcaagcccugccccaagccccacagacugaaccacaugggcaucugcagcugcggccuguacaagcagcccggcgugcccgugagauggaagagaugaggacuagucccuguucccagagcccacuuuuuuuucuuuuuuugaaauaaaauagccugucuuucagaucuaaaaaaaaaaaaaaaaaaaaaaaaaaaaaaaaaaaaaaaaaaaaaaaaaaaaaaaaaaaaaaaaaaaaaaaaaaaaaaaaaaaaaaaaaaaaaaaaaaaa

SEQ ID NO: 33612 - RNA, 1721 nt, Artificial Sequence; identical to SEQ ID NO: 33606
  mRNA product Design a-1 (A100) comprising derived and/or modified sequence from LASV(Pinneo-NIG-1969;Clade I)__AIT17836__GPCmut8 (opt4)

SEQ ID NO: 33613 - RNA, 1721 nt, Artificial Sequence
  mRNA product Design a-1 (A100) comprising derived and/or modified sequence from LASV(ISTH0009-NIG-2011;Clade II)__AIT17404__GPCmut8 (opt4)
aggagagucccgcagucggcguccagcggcucugcuuguucgugugugugucguugcaggccuuauucaagcuuaccaugggccagaucaucaccuucuuccaggaggugccccacgugaucgaggaggugaugaacaucgugcugaucgcccugagccugcuggccauccugaagggcaucuacaacguggccaccugcggccuguucggccuggugagcuuccugcugcugugcggcagaagcugcagcaccaccuacaagggcguguacgagcugcagacccuggagcuggacauggccagccugaacaugugcaugccccugagcugcaccaagaacaacagccaccacuacaucauggugggcaacgagaccggccuggagcugacccugaccaacaccagcaucaucaaccacaaguucugcaaccugagcgacgcccacaagaagaaccuguacgaccacgcccugaugagcaucaucagcaccuuccaccugagcauccccaacuucaaccaguacgaggccaugagcugcgacuucaacggcggcaagaucagcgugcaguacaaccugagccacgccuacgccguggacgccgccaaccacugcggcaccaucgccaacggcgugcugcagaccuucaugagaauggccuggggcggcagcuacaucgcccuggacagcggcaagggcagcugggacugcaucaugaccagcuaccaguaccugaucauccagaacaccaccugggaggaccacugccaguucagcagacccagccccaucggcuaccugggccugcugagccagagaaccagagacaucuacaucagcagaagacugcugggcaccuucaccuggacccugagcgacagcgagggcaacgagacccccggcggcuacugccugaccagauggaugcugaucgaggccgagcugaagugcuucggcaacaccgccguggccaagugcaacgagaagcacgacgaggaguucugcgacaugcugagacuguucgacuucugcaagcaggccaucagaagacugaagacccccgcccagaugagcauccagcugaucaacaaggccgugaacgcccugaucaacgaccagcugaucaugaagaaccaccugagagacaucaugggcauccccuacugcaacuacagcaaguacugcuaccugaaccacaccgugaccggcaagaccagccugcccagaugcugccuggugagcaacggcagcuaccugaacgagacccacuucagcgacgacaucgagcagcaggccgacaacaugaucaccgagcugcugcagaaggaguacauggacagacagggcaagaccccccugggccugguggaccuguucguguucagcaccagcuucuaccugaucagcaucuuccugcaccugaucaagauccccacccacagacacaucaccggcaagcccugccccaagccccacagacugaaccacaugggcaucugcagcugcggccuguacaagcaccccggcgugcccgugaaguggaagagaugaggacuagucccuguucccagagcccacuuuuuuuucuuuuuuugaaauaaaauagccugucuuucagaucuaaaaaaaaaaaaaaaaaaaaaaaaaaaaaaaaaaaaaaaaaaaaaaaaaaaaaaaaaaaaaaaaaaaaaaaaaaaaaaaaaaaaaaaaaaaaaaaaaaaa

SEQ ID NO: 33614 - RNA, 1721 nt, Artificial Sequence
  mRNA product Design a-1 (A100) comprising derived and/or modified sequence from LASV(ISTH2010-NIG-2012;Clade II)__AIT17482__GPCmut8 (opt4)
aggagagucccgcagucggcguccagcggcucugcuuguucgugugugugucguugcaggccuuauucaagcuuaccaugggccagaucaucaccuucuuccaggaggugccccacgugaucgaggaggugaugaacaucgugcugaucgcccugagccugcuggccauccugaagggcaucuacaacguggccaccugcggccuguucggccuggugagcuuccugcugcugugcggcagaagcugcagcaccaccuacaagggcguguacgagcugcagacccuggagcuggacauggccagccugaacaugugcaugccccugagcugcaccaagaacaacagccaccacuacaucauggugggcaacgagaccggccuggagcugacccugaccaacaccagcaucaucaaccacaaguucugcaaccugagcgacgcccacaagaagaaccuguacgaccacgcccugaugagcaucaucagcaccuuccaccugagcauccccaacuucaaccaguacgaggccaugagcugcgacuucaacggcggcaagaucagcgugcaguacaaccugagccacgccuacgccguggacgccgccaaccacugcggcaccaucgccaacggcgugcugcagaccuucaugagaauggccuggggcggcagcuacaucgcccuggacagcggcaagggcagcugggacugcaucaugaccagcuaccaguaccugaucauccagaacaucaccugggaggaccacugccaguucagcagacccagccccaucggcuaccugggccugcugagccagagaaccagagacaucuacaucagcagaagacugcugggcaccuucaccuggacccugagcgacagcgagggcaacgagacccccggcggcuacugccugaccagauggaugcugaucgaggccgagcugaagugcuucggcaacaccgccguggccaagugcaacgagaagcacgacgaggaguucugcgacaugcugagacuguucgacuucugcaagcaggccaucagaagacugaagacccccgcccagaugagcauccagcugaucaacaaggccgugaacgcccugaucaacgaccagcugaucaugaagaaccaccugagagacaucaugggcauccccuacugcaacuacagcaaguacugcuaccugaaccacaccgugaccggcaagaccagccugcccagaugcugccuggugagcaacggcagcuaccugaacgagacccacuucagcgacgacaucgagcagcaggccgacaacaugaucaccgagcugcugcagaaggaguacaucgacagacagggcaagaccccccugggccugguggaccuguucguguucagcaccagcuucuaccugaucagcaucuuccugcaccuggugaagauccccacccacagacacguggugggcaagcccugccccaagccccacagacugaaccacaugggcaucugcagcugcggccuguacaagcaccccggcgugcccgugaaguggaagagaugaggacuagucccuguucccagagcccacuuuuuuuucuuuuuuugaaauaaaauagccugucuuucagaucuaaaaaaaaaaaaaaaaaaaaaaaaaaaaaaaaaaaaaaaaaaaaaaaaaaaaaaaaaaaaaaaaaaaaaaaaaaaaaaaaaaaaaaaaaaaaaaaaaaaa

SEQ ID NO: 33615 - RNA, 1721 nt, Artificial Sequence
  mRNA product Design a-1 (A100) comprising derived and/or modified sequence from LASV(Lassa virus/H.sapiens-wt/NGA/2015/ISTH_0543;Clade II)__AVO03639__GPCmut8 (opt4)
aggagagucccgcagucggcguccagcggcucugcuuguucgugugugugucguugcaggccuuauucaagcuuaccaugggccagaucaucaccuucuuccaggaggugccccacgugaucgaggaggugaugaacaucgugcugaucgcccugagccugcuggccauccugaagggcaucuacaacguggccaccugcggccuguucggccuggugagcuuccugcugcugugcggcagaagcugcagcaccaccuacaagggcguguacgagcugcagacccuggagcuggacauggccaaccugaacaugugcaugccccugagcugcaccaagaacaacagccaccacuacaucauggugggcaacgagaccggccuggagcugacccugaccaacaccagcaucaucaaccacaaguucugcaaccugagcgacgcccacaagaagaaccuguacgaccacgcccugaugagcaucaucagcaccuuccaccugagcauccccaacuucaaccaguacgaggccaugagcugcgacuucaacggcggcaagaucagcgugcaguacaaccugagccacaccuacgccguggacgccgccaaccacugcggcaccaucgccaacggcgugcugcagaccuucaugagaauggccuggggcggcagcuacaucgcccuggacagcggcaagggcagcugggacugcaucaugaccagcuaccaguaccuggugauccagaacaccaccugggaggaccacugccaguucagcagacccagccccaucggcuaccugggccugcugagccagagaaccagagacaucuacaucagcagaagacugcugggcaccuucaccuggacccugagcgacagcgagggcaacgagacccccggcggcuacugccugaccagauggaugcugaucgaggccgagcugaagugcuucggcaacaccgccguggccaagugcaacgagaagcacgacgaggaguucugcgacaugcugagacuguucgacuucugcaagcaggccaucagaagacugaagacccccgcccagaugagcauccagcugaucaacaaggccgugaacgcccugaucaacgaccagcugaucaugaagaaccaccugagagacaucaugggcauccccuacugcaacuacagcaaguacugcuaccugaaccacaccgugaccggcaagaccagccugcccagaugcugccuggugagcaacggcagcuaccugaacgagacccacuucagcgacgacaucgagcagcaggccgacaacaugaucaccgagcugcugcagaaggaguacaucgacagacagggcaagaccccccugggccugguggaccuguucguguucagcaccagcuucuaccugaucagcaucuuccugcaccuggugaagauccccacccacagacacaucaccggcaagcccugccccaagccccacagacugaaccacaugggcaucugcagcugcggccuguacaagcaccccggcgugcccgugaaguggaagagaugaggacuagucccuguucccagagcccacuuuuuuuucuuuuuuugaaauaaaauagccugucuuucagaucuaaaaaaaaaaaaaaaaaaaaaaaaaaaaaaaaaaaaaaaaaaaaaaaaaaaaaaaaaaaaaaaaaaaaaaaaaaaaaaaaaaaaaaaaaaaaaaaaaaaa

SEQ ID NO: 33616 - RNA, 1721 nt, Artificial Sequence
  mRNA product Design a-1 (A100) comprising derived and/or modified sequence from LASV(Lassa virus/H.sapiens-wt/NGA/2016/ISTH_0009;Clade II)__AVO03571__GPCmut8 (opt4)
aggagagucccgcagucggcguccagcggcucugcuuguucgugugugugucguugcaggccuuauucaagcuuaccaugggccagaucaucaccuucuuccaggaggugccccacgugaucgaggaggugaugaacaucgugcugaucgcccugagccugcuggccauccugaagggcaucuacaacguggccaccugcggccugcugggccuggugagcuuccugcugcugugcggcagaagcugcagcaccaccuacaagggcguguacgagcugcagacccuggagcuggacauggccagccugaacaugugcaugccccugagcugcaccaagaacaacagccaccacuacaucauggugggcaacgagaccggccuggagcugacccugaccaacaccagcaucaucaaccacaaguucugcaaccugagcgacgcccacaagaagaaccuguacgaccacgcccugaugagcaucaucagcaccuuccaccugagcauccccaacuucaaccaguacgaggccaugagcugcgacuucaacggcggcagaaucagcgugcaguacaaccugagccacagcuacgccguggacgccgccaaccacugcggcaccaucgccaacggcgugcugcagaccuucaugagaauggccuggggcggcagcuacaucgcccuggacagcggcaagggcagcugggacugcaucaugaccagcuaccaguaccugaucauccagaacaccaccugggaggaccacugccaguucagcagacccagccccaucggcuaccugggccugcugagccagagaaccagagacaucuacaucagcagaagacugcugggcaccuucaccuggacccugagcgacagcgagggcaacgagacccccggcggcuacugccugaccagauggaugcugaucgaggccgagcugaagugcuucggcaacaccgccguggccaagugcaacgagaagcacgacgaggaguucugcgacaugcugagacuguucgacuucugcaagcaggccaucagaagacugaagacccccgcccagaugagcauccagcugaucaacaaggccgugaacgcccugaucaacgaccagcugaucaugaagaaccaccugagagacaucaugggcauccccuacugcaacuacagcaaguacugcuaccugaaccacaccgugaccggcaagaccagccugcccagaugcugccuggugagcaacggcagcuaccugaacgagacccacuucagcgacgacaucgagcagcaggccgacaacaugaucaccgagcugcugcagaaggaguacaucgacagacagggcaagaccccccugggccugguggaccuguucguguucagcaccagcuucuaccugaucagcaucuuccugcaccuggugaagauccccacccacagacacaucaccggcaagcccugccccaagccccacagacugaaccacaugggcaucugcagcugcggccuguacaaccaccccggcgugcccgugaaguggaagagaugaggacuagucccuguucccagagcccacuuuuuuuucuuuuuuugaaauaaaauagccugucuuucagaucuaaaaaaaaaaaaaaaaaaaaaaaaaaaaaaaaaaaaaaaaaaaaaaaaaaaaaaaaaaaaaaaaaaaaaaaaaaaaaaaaaaaaaaaaaaaaaaaaaaaa

SEQ ID NO: 33617 - RNA, 1721 nt, Artificial Sequence
  mRNA product Design a-1 (A100) comprising derived and/or modified sequence from LASV(Lassa virus/H.sapiens-wt/NGA/2016/ISTH_0017;Clade II)__AVO03567__GPCmut8 (opt4)
aggagagucccgcagucggcguccagcggcucugcuuguucgugugugugucguugcaggccuuauucaagcuuaccaugggccagaucaucaccuucuuccaggaggugccccacgugaucgaggaggugaugaacaucgugcugaucgcccugagccugcuggccauccugaagggcaucuacaacguggccaccugcggccuguucggccuggugagcuuccugcugcugugcggcagaagcugcagcaccaccuacaagggcguguacgagcugcagacccuggagcuggacauggccagccugaacaugugcaugccccugagcugcaccaagaacaacagccaccacuacaucauggugggcaacgagaccggccuggagcugacccugaccaacaccagcaucaucaaccacaaguucugcaaccugagcgacgcccacaagaagaaccuguacgaccacgcccugaugagcaucaucagcaccuuccaccugagcauccccaacuucaaccaguacgaggccaugagcugcgacuucaacggcggcaagaucagcgugcaguacaaccugagccacaccuacgccaucgacgccgccaaccacugcggcaccaucgccaacggcgugcugcagaccuucaugagaauggccuggggcggcagcuacaucgcccuggacagcggcaagggcagcugggacugcaucaugaccagcuaccaguaccugaucauccagaacaccaccugggaggaccacugccaguucagcagacccagccccaucggcuaccugggccugcugagccagagaaccagagacaucuacaucagcagaagacugcugggcaccuucaccuggacccugagcgacagcgagggcaacgagacccccggcggcuacugccugaccagauggaugcugaucgaggccgagcugaagugcuucggcaacaccgccguggccaagugcaacgagaagcacgacgaggaguucugcgacaugcugagacuguucgacuucugcaagcaggccaucagaagacugaagacccccgcccagaugagcauccagcugaucaacaaggccgugaacgcccugaucaacgaccagcugaucaugaagaaccaccugagagacaucaugggcauccccuacugcaacuacagcaaguacugcuaccugaaccacaccgugaccggcaagaccagccugcccagaugcugccuggugagcaacggcagcuaccugaacgagacccacuucagcgacgacaucgagcagcaggccgacaacaugaucaccgagcugcugcagaaggaguacauggacagacagggcaagaccccccugggccugguggaccuguucguguucagcaccagcuucuaccugaucagcaucuuccugcaccuggugagaauccccacccacagacacgugaucggcaagcccugccccaagccccacagacugaaccacaugggcaucugcagcugcggccuguacaagcaccccggcgugcccgugaaguggaagagaugaggacuagucccuguucccagagcccacuuuuuuuucuuuuuuugaaauaaaauagccugucuuucagaucuaaaaaaaaaaaaaaaaaaaaaaaaaaaaaaaaaaaaaaaaaaaaaaaaaaaaaaaaaaaaaaaaaaaaaaaaaaaaaaaaaaaaaaaaaaaaaaaaaaaa

SEQ ID NO: 33618 - RNA, 1721 nt, Artificial Sequence
  mRNA product Design a-1 (A100) comprising derived and/or modified sequence from LASV(Lassa virus/H.sapiens-wt/NGA/2018/ISTH_0959;Clade II)__AVV65099__GPCmut8 (opt4)
aggagagucccgcagucggcguccagcggcucugcuuguucgugugugugucguugcaggccuuauucaagcuuaccaugggccagaucaucaccuucuuccaggaggugccccacgugaucgaggaggugaugaacaucgugcugaucgcccugagccugcuggccauccugaagggcaucuacaacguggugaccugcggccuguucggccuggugagcuuccugcugcugugcggcagaagcugcagcaccaccuacaagggcguguacgagcugcagacccuggagcuggacauggccagccugaacaugugcaugccccugagcugcaccaagaacaacagccaccacuacaucauggugggcaacgagaccggccuggagcugacccugaccaacaccagcaucaucaaccacaaguucugcaaccugagcgacgcccacaagaagaaccuguacgaccacgcccugaugagcaucaucagcaccuuccaccugagcauccccaacuucaaccaguacgaggccaugagcugcgacuucaacggcggcaagaucagcgugcaguacaaccugagccacgccuacgccaucgacgccgccaaccacugcggcaccaucgccaacggcgugcugcagaccuucaugagaauggccuggggcggcagcuacaucgcccuggacagcggcaagggcagcugggacugcaucaugaccagcuaccaguaccugaucauccagaacaccaccugggaggaccacugccaguucagcagacccagccccaucggcuaccugggccugcugagccagagaaccagagacaucuacaucagcagaagacugcugggcaccuucaccuggacccugagcgacagcgagggcaacgagacccccggcggcuacugccugaccagauggaugcugaucgaggccgagcugaagugcuucggcaacaccgccguggccaagugcaacgagaagcacgacgaggaguucugcgacaugcugagacuguucgacuucugcaagcaggccaucagaagacugaagacccccgcccagaugagcauccagcugaucaacaaggccgugaacgcccugaucaacgaccagcugaucaugaagaaccaccugagagacaucaugggcauccccuacugcaacuacagcaaguacugcuaccugaaccacaccgugaccggcaagaccagccugcccagaugcugccuggugagcaacggcagcuaccugaacgagacccacuucagcgacgacaucgagcagcaggccgacaacaugaucaccgagcugcugcagaaggaguacaucgacagacagggcaagaccccccugggccugguggaccuguucguguucagcaccagcuucuaccugaucagcaucuuccugcaccuggugaagauccccacccacagacacgugaucggcaagcccugccccaagccccacagacugaaccacaugggcaucugcagcugcggccuguacaagcaccccggcgugcccgugaaguggaagagaugaggacuagucccuguucccagagcccacuuuuuuuucuuuuuuugaaauaaaauagccugucuuucagaucuaaaaaaaaaaaaaaaaaaaaaaaaaaaaaaaaaaaaaaaaaaaaaaaaaaaaaaaaaaaaaaaaaaaaaaaaaaaaaaaaaaaaaaaaaaaaaaaaaaaa

SEQ ID NO: 33619 - RNA, 1721 nt, Artificial Sequence
  mRNA product Design a-1 (A100) comprising derived and/or modified sequence from LASV(LASV003-NIG-2008;Clade II)__AIT17580__GPCmut8 (opt4)
aggagagucccgcagucggcguccagcggcucugcuuguucgugugugugucguugcaggccuuauucaagcuuaccaugggccagaucaucaccuucuuccaggaggugccccacgugaucgaggaggugaugaacaucgugcugaucgcccugagccugcuggccauccugaagggcaucuacaacguggccaccugcggccuguucggccuggugagcuuccugcugcugugcggcagaagcugcagcaccaccuacaagggcguguacgagcugcagacccuggagcuggacauggccagccugaacaugugcaugccccugagcugcaccaagaacaacagccaccacuacaucauggugggcaacgagaccggccuggagcugacccugaccaacaccagcaucaucaaccacaaguucugcaaccugagcgacgcccacaagaagaaccuguacgaccacgcccugaugagcaucaucagcaccuuccaccugagcauccccaacuucaaccaguacgaggccaugagcugcgacuucaacggcggcaagaucagcgugcaguacaaccugagccacaccuacgccguggacgccgccaaccacugcggcaccaucgccaacggcgugcugcagaccuucaugagaauggccuggggcggcagcuacaucgcccuggacagcggcaagggcagcugggacugcaucaugaccagcuaccaguaccugaucauccagaacaccaccugggaggaccacugccaguucagcagacccagccccaucggcuaccugggccugcugagccagagaaccagagacaucuacaucagcagaagacugcugggcaccuucaccuggacccugagcgacagcgagagcaacgagacccccggcggcuacugccugaccagauggaugcugaucgaggccgagcugaagugcuucggcaacaccgccguggccaagugcaacgagaagcacgacgaggaguucugcgacaugcugagacuguucgacuucugcaagcaggccaucagaagacugaaggcccccgcccagaugagcauccagcugaucaacaaggccgugaacgcccugaucaacgaccagcugaucaugaagaaccaccugagagacaucaugggcauccccuacugcaacuacagcaaguacugcuaccugaaccacaccgugaccggcagaaccagccugcccagaugcugccuggugagcaacggcagcuaccugaacgagacccacuucagcgacgacaucgagcagcaggccgacaacaugaucaccgagcugcugcagaaggaguacauggacagacagggcaagaccccccugggccugguggaccuguucguguucagcaccagcuucuaccugaucagcaucuuccugcaccuggugaagauccccacccacagacacgugaucggcaagcccugccccaagccccacagacugaaccacaugggcaucugcagcugcggccuguacaagcaccccggcgugcccgugaaguggaagagaugaggacuagucccuguucccagagcccacuuuuuuuucuuuuuuugaaauaaaauagccugucuuucagaucuaaaaaaaaaaaaaaaaaaaaaaaaaaaaaaaaaaaaaaaaaaaaaaaaaaaaaaaaaaaaaaaaaaaaaaaaaaaaaaaaaaaaaaaaaaaaaaaaaaaa

SEQ ID NO: 33620 - RNA, 1721 nt, Artificial Sequence
  mRNA product Design a-1 (A100) comprising derived and/or modified sequence from LASV(LASV035-NIG-2009;Clade II)__AIT17588__GPCmut8 (opt4)
aggagagucccgcagucggcguccagcggcucugcuuguucgugugugugucguugcaggccuuauucaagcuuaccaugggccagaucaucaccuucuuccaggaggugccccacgugaucgaggaggugaugaacaucgugcugaucgcccugagccugcuggccauccugaagggcaucuacaacguggccaccugcggccuguucggccuggugagcuuccugcugcugugcggcagaagcugcagcaccaccuacaagggcguguacgagcugcagacccuggagcuggacauggccagccugaacaugugcaugccccugagcugcaccaagaacaacagccaccacuacaucauggugggcaacgagaccggccuggagcugacccugaccaacaccagcaucaucaaccacaaguucugcaaccugagcgacgcccacaagaagaaccuguacgaccacgcccugaugagcaucaucagcaccuuccaccugagcauccccaacuucaaccaguacgaggccaugagcugcgacuucaacggcggcaagaucagcgugcaguacaaccugagccacgccuacgccguggacgccgccaaccacugcggcaccaucgccaacggcgugcugcagaccuucaugagaauggccuggggcggcagcuacaucgcccuggacagcggcaagggcagcugggacugcaucaugaccagcuaccaguaccugaucauccagaacaccaccugggaggaccacugccaguucagcagacccagccccaucggcuaccugggccugcugagccagagaaccagagacaucuacaucagcagaagacugcugggcaccuucaccuggacccugagcgacagcgagggcaacgagacccccggcggcuacugccugaccagauggaugcugaucgaggccgagcugaagugcuucggcaacaccgccguggccaagugcaacgagaagcacgacgaggaguucugcgacaugcugagacuguucgacuucugcaagcaggccaucagaagacugaaggcccccgcccagaugagcauccagcugaucaacaaggccgugaacgcccugaucaacgaccagcugaucaugaagaaccaccugagagacaucaugggcauccccuacugcaacuacagcaaguacugcuaccugaaccacaccgugaccggcaagaccagccugcccagaugcugccuggugagcaacggcagcuaccugaacgagacccacuucagcgacgacaucgagcagcaggccgacaacaugaucaccgagcugcugcagaaggaguacaucgacagacagggcaagaccccccugggccugguggaccuguucguguucagcaccagcuucuaccugaucagcaucuuccugcaccuggugaagauccccacccacagacacgugaucggcaagcccugccccaagccccacagacugaaccacaugggcaucugcagcugcggccuguacaagcaccccggcgugcccgugaaguggaagagaugaggacuagucccuguucccagagcccacuuuuuuuucuuuuuuugaaauaaaauagccugucuuucagaucuaaaaaaaaaaaaaaaaaaaaaaaaaaaaaaaaaaaaaaaaaaaaaaaaaaaaaaaaaaaaaaaaaaaaaaaaaaaaaaaaaaaaaaaaaaaaaaaaaaaa

SEQ ID NO: 33621 - RNA, 1721 nt, Artificial Sequence
  mRNA product Design a-1 (A100) comprising derived and/or modified sequence from LASV(LASV1000-NIG-2009;Clade II)__AIT17782__GPCmut8 (opt4)
aggagagucccgcagucggcguccagcggcucugcuuguucgugugugugucguugcaggccuuauucaagcuuaccaugggccagaucaucaccuucuuccaggaggugccccacgugaucgaggaggugaugaacaucgugcugaucgcccugagccugcuggccauccugaagggcaucuacaacguggccaccugcggccuguucggccuggugagcuuccugcugcugugcggcagaagcugcagcaccaccuacaagggcguguacgagcugcagacccuggagcuggacauggccagccugaacaugugcaugccccugagcugcaccaagaacaacagccaccacuacaucauggugggcaacgagaccggccuggagcugacccugaccaacaccagcaucaucaaccacaaguucugcaaccugagcgacgcccacaagaagaaccuguacgaccacgcccugaugagcaucaucagcaccuuccaccugagcauccccaacuucaaccaguacgaggccaugagcugcgacuucaacggcggcaagaucagcgugcaguacaaccugagccacaccuacgccguggacgccgccaaccacugcggcaccaucgccaacggcgugcugcagaccuucaugagaauggccuggggcggcagcuacaucgcccuggacagcggcaagggcagcugggacugcaucaugaccagcuaccaguaccugaucauccagaacaccaccugggaggaccacugccaguucagcagacccagccccaucggcuaccugggccugcugagccagagaaccagagacaucuacaucagcagaagacugcugggcaccuucaccuggacccugagcgacagcgagggcaacgagacccccggcggcuacugccugaccagauggaugcugaucgaggccgagcugaagugcuucggcaacaccgccguggccaagugcaacgagaagcacgacgaggaguucugcgacaugcugagacuguucgacuucugcaagcaggccaucaagagacugaagacccccgcccagaugagcauccagcugaucaacaaggccgugaacgcccugaucaacgaccagcugaucaugaagaaccaccugagagacaucaugggcauccccuacugcaacuacagcaaguacugcuaccugaaccacaccgugaccggcaagaccagccugcccagaugcugccuggugagcaacggcagcuaccugaacgagacccacuucagcgacgacaucgagcagcaggccgacaacaugaucaccgagcugcugcagaaggaguacaucgacagacagggcaagaccccccugggccugguggaccuguucguguucagcaccagcuucuaccugaucagcaucuuccugcaccuggugaagauccccacccacagacacguggugggcaagcccugccccaagccccacagacugaaccacaugggcaucugcagcugcggccuguacaagcaccccggcgugcccgugaaguggaagagaugaggacuagucccuguucccagagcccacuuuuuuuucuuuuuuugaaauaaaauagccugucuuucagaucuaaaaaaaaaaaaaaaaaaaaaaaaaaaaaaaaaaaaaaaaaaaaaaaaaaaaaaaaaaaaaaaaaaaaaaaaaaaaaaaaaaaaaaaaaaaaaaaaaaaa

SEQ ID NO: 33622 - RNA, 1721 nt, Artificial Sequence
  mRNA product Design a-1 (A100) comprising derived and/or modified sequence from LASV(LASV221-NIG-2010;Clade II)__AIT17624__GPCmut8 (opt4)
aggagagucccgcagucggcguccagcggcucugcuuguucgugugugugucguugcaggccuuauucaagcuuaccaugggccagaucaucaccuucuuccaggaggugccccacgugaucgaggaggugaugaacaucgugcugaucgcccugagccugcuggccauccugaagggcaucuacaacguggccaccugcggccuguucggccuggugagcuuccugcugcugugcggcagaagcugcagcaccaccuacaagggcguguacgagcugcagacccuggagcuggacauggccagccugaacaugugcaugccccugagcugcaccaagaacaacagccaccacuacaucauggugggcaacgagaccggccuggagcugacccugaccaacaccagcaucaucaaccacaaguucugcaaccugagcgacgcccacaagaagaaccuguacgaccacgcccugaugagcaucaucagcaccuuccaccugagcauccccaacuucaaccaguacgaggccaugagcugcgacuucaacggcggcaagaucagcgugcaguacaaccugagccacaccuacgccaucgacgccgccaaccacugcggcaccaucgccaacggcgugcugcagaccuucaugagaauggccuggggcggcagcuacaucgcccuggacagcggcaagggcagcugggacugcaucaugaccagcuaccaguaccugaucauccagaacaccaccugggaggaccacugccaguucagcagacccagccccaucggcuaccugggccugcugagccagagaaccagagacaucuacaucagcagaagacugcugggcaccuucaccuggacccugagcgacagcgagggcaacgagacccccggcggcuacugccugaccagauggaugcugaucgaggccgagcugaagugcuucggcaacaccgccguggccaagugcaacgagaagcacgacgaggaguucugcgacaugcugagacuguucgacuucugcaagcaggccaucagaagacugaagacccccgcccagaugagcauccagcugaucaacaaggccgugaacgcccugaucaacgaccagcugaucaugaagaaccaccugagagacaucaugggcauccccuacugcaacuacagcaaguacugcuaccugaaccacaccgugaccggcaagaccagccugcccagaugcugccuggugagcaacggcagcuaccugaacgagacccacuucagcgacgacaucgagcagcaggccgacaacaugaucaccgagaugcugcagaaggaguacauggacagacagggcaagaccccccugggccugguggaccuguucguguucagcaccagcuucuaccugaucagcaucuuccugcaccuggugaagauccccacccacagacacgugaucggcaagcccugccccaagccccacagacugaaccacaugggcaucugcagcugcggccuguacaagcaccccggcgugcccgugaaguggaagagaugaggacuagucccuguucccagagcccacuuuuuuuucuuuuuuugaaauaaaauagccugucuuucagaucuaaaaaaaaaaaaaaaaaaaaaaaaaaaaaaaaaaaaaaaaaaaaaaaaaaaaaaaaaaaaaaaaaaaaaaaaaaaaaaaaaaaaaaaaaaaaaaaaaaaa

SEQ ID NO: 33623 - RNA, 1721 nt, Artificial Sequence
  mRNA product Design a-1 (A100) comprising derived and/or modified sequence from LASV(LASV237-NIG-2010;Clade II)__AIT17638__GPCmut8 (opt4)
aggagagucccgcagucggcguccagcggcucugcuuguucgugugugugucguugcaggccuuauucaagcuuaccaugggccagaucaucaccuucuuccaggaggugccccacgugaucgaggaggugaugaacaucgugcugaucgcccugagccugcuggccauccugaagggcaucuacaacguggccaccugcggccuguucggccuggugagcuuccugcugcugugcggcagaagcugcagcaccaccuacaagggcguguacgagcugcagacccuggagcuggacauggccagccugaacaugugcaugccccugagcugcaccaagaacaacagccaccacuacaucauggugggcaacgagaccggccuggagcugacccugaccaacaccagcaucaucaaccacaaguucugcaaccugagcgacgcccacaagaaggaccuguacgaccacgcccugaugagcaucaucagcaccuuccaccugagcauccccaacuucaaccaguacgaggccaugagcugcgacuucaacggcggcaagaucagcgugcaguacaaccugagccacaccuacgccguggacgccgccaaccacugcggcaccaucgccaacggcgugcugcagaccuucaugagaauggccuggggcggcagcuacaucgcccuggacagcggcaagggcagcugggacugcaucaugaccagcuaccaguaccugaucauccagaacaccaccugggaggaccacugccaguucagcagacccagccccaucggcuaccugggccugcugagccagagaaccagagacaucuacaucagcagaagacugcugggcaccuucaccuggacccugagcgacagcgagggcaacgagacccccggcggcuacugccugaccagauggaugcugaucgaggccgagcugaagugcuucggcaacaccgccguggccaagugcaacgagaagcacgacgaggaguucugcgacaugcugagacuguucgacuucugcaagcaggccaucagaagacugaagacccccgcccagaugagcauccagcugaucaacaaggccgugaacgcccugaucaacgaccagcugaucaugaagaaccaccugagagacaucaugggcauccccuacugcaacuacagcaaguacugcuaccugaaccacaccgugaccggcaagaccagccugcccagaugcugccuggugagcaacggcagcuaccugaacgagacccacuucagcgacgacaucgagcagcaggccgacaacaugaucaccgagcugcugcagaaggaguacauggacagacagggcaagaccccccugggccugguggaccuguucguguucagcaccagcuucuaccugaucagcaucuuccugcaccugaucaagauccccacccacagacacaucaccggcaagcccugccccaagccccacagacugaaccacaugggcaucugcagcugcggccuguacaagcaccccggcgugcccgugaaguggaagagaugaggacuagucccuguucccagagcccacuuuuuuuucuuuuuuugaaauaaaauagccugucuuucagaucuaaaaaaaaaaaaaaaaaaaaaaaaaaaaaaaaaaaaaaaaaaaaaaaaaaaaaaaaaaaaaaaaaaaaaaaaaaaaaaaaaaaaaaaaaaaaaaaaaaaa

SEQ ID NO: 33624 - RNA, 1721 nt, Artificial Sequence
  mRNA product Design a-1 (A100) comprising derived and/or modified sequence from LASV(LASV253-NIG-2011;Clade II)__AIT17670__GPCmut8 (opt4)
aggagagucccgcagucggcguccagcggcucugcuuguucgugugugugucguugcaggccuuauucaagcuuaccaugggccagaucaucaccuucuuccaggaggugccccacgugaucgaggaggugaugaacaucgugcugaucgcccugagccugcuggccauccugaagggcaucuacaacguggccaccugcggccuguucggccuggugagcuuccugcugcugugcggcagaagcugcagcaccaccuacaagggcguguacgagcugcagacccuggagcuggacauggccagccugaacaugugcaugccccugagcugcaccaagaacaacagccaccacuacaucauggugggcaacgagaccggccuggagcugacccugaccaacaccagcaucaucaaccacaaguucugcaaccugagcgacgcccacaagaagaaccuguacgaccacgcccugaugagcaucaucagcaccuuccaccugagcauccccaacuucaaccaguacgaggccaugagcugcgacuucaacggcggcaagaucagcgugcaguacaaccugagccacaccuacgccguggacgccgccaaccacugcggcaccaucgccaacggcgugcugcagaccuucaugagaauggccuggggcggcagcuacaucgcccuggacagcggcaagggcagcugggacugcaucaugaccagcuaccaguaccugaucauccagaacaccaccugggaggaccacugccaguucagcagacccagccccaucggcuaccugggccugcugagccagagaaccagagacaucuacaucagcagaagacugcugggcaccuucaccuggacccugagcgacagcgagggcaacgagacccccggcggcuacugccugaccagauggaugcugaucgaggccgagcugaagugcuucggcaacaccgccguggccaagugcaacgagaagcacgacgaggaguucugcgacaugcugagacuguucgacuucugcaagcaggccaucagaagacugaaggcccccgcccagaugagcauccagcugaucaacaaggccgugaacgcccugaucaacgaccagcugaucaugaagaaccaccugagagacaucaugggcauccccuacugcaacuacagcaaguacugcuaccugaaccacaccgugaccggcagaaccagccugcccagaugcugccuggugagcaacggcagcuaccugaacgagacccacuucagcgacgacaucgagcagcaggccgacaacaugaucaccgagcugcugcagaaggaguacaucgacagacagggcaagaccccccugggccugguggaccuguucguguucagcaccagcuucuaccugaucagcaucuuccugcaccuggugaagauccccacccacagacacaucaucggcaagcccugccccaagccccacagacugaaccacaugggcaucugcagcugcggccuguacaagcaccccggcgugcccgugaaguggaagagaugaggacuagucccuguucccagagcccacuuuuuuuucuuuuuuugaaauaaaauagccugucuuucagaucuaaaaaaaaaaaaaaaaaaaaaaaaaaaaaaaaaaaaaaaaaaaaaaaaaaaaaaaaaaaaaaaaaaaaaaaaaaaaaaaaaaaaaaaaaaaaaaaaaaaa

SEQ ID NO: 33625 - RNA, 1721 nt, Artificial Sequence
  mRNA product Design a-1 (A100) comprising derived and/or modified sequence from LASV(LASV254-NIG-2011;Clade II)__AIT17674__GPCmut8 (opt4)
aggagagucccgcagucggcguccagcggcucugcuuguucgugugugugucguugcaggccuuauucaagcuuaccaugggccagaucaucaccuucuuccaggaggugccccacgugaucgaggaggugaugaacaucgugcugaucgcccugagccugcuggccauccugaagggcaucuacaacguggccaccugcggccuguucggccuggugagcuuccugcugcugugcggcagaagcugcagcaccaccuacaagggcguguacgagcugcagacccuggagcuggacaugaccaaccugaacaugugcaugccccugagcugcaccaagaacaacagccaccacuacaucauggugggcaacgagaccggccuggagcugacccugaccaacaccagcaucaucaaccacaaguucugcaaccugagcgacgcccacaagaagaaccuguacaaccacgcccugaugagcaucaucagcaccuuccaccugagcauccccaacuucaaccaguacgaggccaugagcugcgacuucaacggcggcaagaucagcgugcaguacaaccugagccacagcuacgccguggacgccgccaaccacugcggcaccaucgccaacggcgugcugcagaccuucaugagaauggccuggggcggcagcuacaucgcccuggacagcggcaagggcaacugggacugcaucaugaccagcuaccaguaccugaucauccagaacaccaccugggaggaccacugccaguucagcagacccagccccaucggcuaccugggccugcugagccagagaaccagagacaucuacaucagcagaagacugcugggcaccuucaccuggacccugagcgacagcgagggcaacgagacccccggcggcuacugccugaccagauggaugcugaucgaggccgagcugaagugcuucggcaacaccgccguggccaagugcaacgagaagcacgacgaggaguucugcgacaugcugagacuguucgacuucugcaagcaggccaucagaagacugaagacccccgcccaggccaacauccagcugaucaacaaggccgugaacgcccugaucaacgaccagcugaucaugaagaaccaccugagagacaucaugggcauccccuacugcaacuacagcaaguacugcuaccugaaccacaccgugaccggcaagaccagccugcccagaugcugccuggugagcaacggcagcuaccugaacgagacccacuucagcgacgacaucgagcagcaggccgacaacaugaucaccgagcugcugcagaaggaguacauggacagacagggcaagaccccccugggccugguggaccuguucguguucagcaccagcuucuaccugaucagcaucuuccugcaccuggugaagauccccacccacagacacgugaucggcaagcccugccccaagccccacagacugaaccacaugggcaucugcagcugcggccuguacaagcaccccggcgugcccgugaaguggaagagaugaggacuagucccuguucccagagcccacuuuuuuuucuuuuuuugaaauaaaauagccugucuuucagaucuaaaaaaaaaaaaaaaaaaaaaaaaaaaaaaaaaaaaaaaaaaaaaaaaaaaaaaaaaaaaaaaaaaaaaaaaaaaaaaaaaaaaaaaaaaaaaaaaaaaa

SEQ ID NO: 33626 - RNA, 1721 nt, Artificial Sequence
  mRNA product Design a-1 (A100) comprising derived and/or modified sequence from LASV(Nig08-A19;Clade III)__ADU56618__GPCmut8 (opt4)
aggagagucccgcagucggcguccagcggcucugcuuguucgugugugugucguugcaggccuuauucaagcuuaccaugggccagaucgugaccuucuuccaggaggugccccacgugaucgaggaggugaugaacaucgugcugaucgcccugagcauccuggccauccugaagggccuguacaacaucgccaccugcggccugaucggccuggugaccuuccugcugcugagcggcagaagcugcagcaugaccuacaagggcguguacgagcugcagacccuggagcugaacaugaacacccugaacaugugcaugccccugagcugcaccaagaacaacagccaccacuacaucauggugggcaacgagaccggccuggagcugacccugaccaacaccagccugcugcaccacaaguucugcaaccugagcgacgcccacaagaagaaccuguacgaccacacccugaugagcaucaucagcaccuuccaccugagcauccccaacuucaaccaguacgaggccaugagcugcgacuucaacggcggcaagaucaccgugcaguacaaccugagccacagcuacgccaucgacgccgccaaccacugcggcaccguggccaacggcgugcugcagaccuucaugagaauggccuggggcggcagcuacaucgcccuggacagcggcagaggcaagugggacugcaucaugaccagcuaccaguaccugaucauccagaacaccaccugggaggaccacugccaguucagcagacccagccccaucggcuaccugggccugcugagccagagaaccagagacaucuacaucagcagaagacugcugggcaccuucaccuggacccugagcgacagcgagggcaacgagacccccggcggcuacugccugaccagauggaugcugaucgaggccgagcugaagugcuucggcaacaccgccguggccaagugcaacgagaagcacgacgaggaguucugcgacaugcugagacuguucgacuucugcaagcaggccaucagaagacugaaggcccccgcccagaugagcauccagcugaucaacaaggccgugaacgcccugaucaacgaccagcugaucaugaagaaccaccugagagacaucaugggcauccccuacugcaacuacagcaaguacugcuaccugaaccacaccagcaccggcagaaccagccugcccagaugcugccuggugagcaacggcagcuaccugaacgagacccacuucagcgacgacaucgagcagcaggccgacaacaugaucaccgagaugcugcagaaggaguaccuggacagacagggcaagaccccccugggccugguggaccuguucguguucagcaccagcuucuaccugaucagcaucuuccugcaccuggugaagauccccacccacagacacaucgugggcaagcccugccccaagccccacagacugaaccacaugggcaucugcagcugcggccuguacaagcagcccggcgugcccgugagauggaagagaugaggacuagucccuguucccagagcccacuuuuuuuucuuuuuuugaaauaaaauagccugucuuucagaucuaaaaaaaaaaaaaaaaaaaaaaaaaaaaaaaaaaaaaaaaaaaaaaaaaaaaaaaaaaaaaaaaaaaaaaaaaaaaaaaaaaaaaaaaaaaaaaaaaaaa

SEQ ID NO: 33627 - RNA, 1724 nt, Artificial Sequence
  mRNA product Design a-1 (A100) comprising derived and/or modified sequence from LASV(G1180-SLE-2010;Clade IV)__AIT17168__GPCmut8 (opt4)
aggagagucccgcagucggcguccagcggcucugcuuguucgugugugugucguugcaggccuuauucaagcuuaccaugggccagaucgugaccuucuuccaggaggugccccacgugaucgaggaggugaugaacaucgugcugaucgcccugagcauccuggccgugcugaagggccuguacaacuucgccaccugcggccuggugggccugcugaccuuccugcugcugugcggcagaagcugcaccgccagcagauacaagggcguguacgagcugcagacccuggagcugaacauggagacccugaacaugugcaugccccugagcugcaccaagaacaacagccaccacuacaucauggugggcaacgagaccggccuggagcugacccugaccaacaccagcaucaucaaccacaaguucugcaaccugagcgacgcccacaagaagaaccuguacgaccacgcccugaugagcaucaucagcaccuuccaccugagcauccccaacuucaaccaguacgaggccaugagcugcgacuucaacggcggcaagaucagcgugcaguacaaccugagccacagcuacgccggcgacgccgccaaccacugcggcaccguggccaacggcgugcugcagaccuucaugagaauggccuggggcggcagcuacaucgcccuggacagcggccacggcagcugggacugcaucaugaccagcuaccaguaccugaucauccagaacaccaccugggaggaccacugccaguucagcagacccagccccaucggcuaccugggccugcugagccagagaaccagagacaucuacaucagcagaagacugcugggcaccuucaccuggacccugagcgacagcgagggcaaggacacccccggcggcuacugccugaccagauggaugcugaucgaggccgagcugaagugcuucggcaacaccgccguggccaagugcaacgagaagcacgacgaggaguucugcgacaugcugagacuguucgacuucugcaagcaggccauccagagacugaaggcccccgcccagaugagcauccagcugaucaacaaggccgugaacgcccugaucaacgaccagcugaucaugaagaaccaccugagagacaucaugggcauccccuacugcaacuacagcaaguacugcuaccugaaccacaccaccaccggcaagaccagccugcccaagugcugccuggugagcaacggcagcuaccugaacgagacccacuucagcgacgacaucgagcagcaggccgacaacaugaucaccgagaugcugcagaaggaguacauggagagacagggcaagaccccccugggccugguggaccuguucguguucagcaccagcuucuaccugaucagcaucuuccugcaccuggugaagauccccacccacagacacaucgugggcaagagcugccccaagccccacagacugaaccacaugggcaucugcagcugcggccuguacaagcagcccggcgugcccgugaaguggaagagaugaggacuagucccuguucccagagcccacuuuuuuuucuuuuuuugaaauaaaauagccugucuuucagaucuaaaaaaaaaaaaaaaaaaaaaaaaaaaaaaaaaaaaaaaaaaaaaaaaaaaaaaaaaaaaaaaaaaaaaaaaaaaaaaaaaaaaaaaaaaaaaaaaaaaa

SEQ ID NO: 33628 - RNA, 1724 nt, Artificial Sequence
  mRNA product Design a-1 (A100) comprising derived and/or modified sequence from LASV(G1442-SLE-2011;Clade IV)__AIT17180__GPCmut8 (opt4)
aggagagucccgcagucggcguccagcggcucugcuuguucgugugugugucguugcaggccuuauucaagcuuaccaugggccagaucgugaccuucuuccaggaggugccccacgugaucgaggaggugaugaacaucgugcugaucgcccugagcauccuggccgugcugaagggccuguacaacguggccaccugcggccugaucggccuggugaccuuccugcugcugugcggcagaagcugcaccaccacccuguacaagggcguguacgagcugcagacccuggagcugaacauggagacccugaacaugugcaugccccugagcugcaccaagaacaacagccaccacuacaucagagugggcaacgagaccggccuggagcugacccugaccaacaccagcaucaucaaccacaaguucugcaaccugagcgacgcccacaagaagaaccuguacgaccacgcccugaugagcaucaucagcaccuuccaccugagcauccccaacuucaaccaguacgaggccaugagcugcgacuucaacggcggcaagaucagcgugcaguacaaccugagccacagcuacgccggcgacgccgccaaccacugcggcaccguggccaacggcgugcugcagaccuucaugagaauggccuggggcggcagcuacaucgcccuggacagcggcagaggcaacugggacugcaucaugaccagcuaccaguaccugaucauccagaacaccaccugggacgaccacugccaguucagcagacccagccccaucggcuaccugggccugcugagccagagaaccagagacguguacaucagcagaagacugcugggcaccuucaccuggacccugagcgacagcgagggcaaggacacccccggcggcuacugccugaccagauggaugcugaucgaggccgagcugaagugcuucggcaacaccgccguggccaagugcaacgagaagcacgacgaggaguucugcgacaugcugagacuguucgacuucugcaagcaggccauccagagacugaaggcccccgcccagaugagcauccagcugaucaacaaggccgugaacgcccugaucaacgaccagcugaucaugaagaaccaccugagagacaucaugggcauccccuacugcaacuacagcaaguacugcuaccugaacaacaccgccaccggcaagaccagccugcccaagugcugccugaucagcaacggcagcuaccugaacgagacccacuucagcgacgacaucgagcaggaggccgacaacaugaucaccgagaugcugcagaaggaguacauggagagacagggcaagaccccccugggccugguggaccuguucguguucagcaccagcuucuaccugaucagcaucuuccugcaccuggugaagauccccacccacagacacaucgugggcaagagcugccccaagccccacagacugaaccacaugggcaucugcagcugcggccuguacaagcagcccggcgugcccgugagauggaagagaugaggacuagucccuguucccagagcccacuuuuuuuucuuuuuuugaaauaaaauagccugucuuucagaucuaaaaaaaaaaaaaaaaaaaaaaaaaaaaaaaaaaaaaaaaaaaaaaaaaaaaaaaaaaaaaaaaaaaaaaaaaaaaaaaaaaaaaaaaaaaaaaaaaaaa

SEQ ID NO: 33629 - RNA, 1724 nt, Artificial Sequence
  mRNA product Design a-1 (A100) comprising derived and/or modified sequence from LASV(G3010-SLE-2013;Clade IV)__AIT17344__GPCmut8 (opt4)
aggagagucccgcagucggcguccagcggcucugcuuguucgugugugugucguugcaggccuuauucaagcuuaccaugggccagaucgugaccuucuuccaggaggugccccacgugaucgaggaggugaugaacaucgugcugaucgcccugagcauccuggccgugcugaagggccuguacaacuucgccaccugcggccuggugggccuggugaccuuccugcugcugugcggcagaagcugcaccaccagccuguacaagggcguguacgagcugcagacccuggagcugaacauggagacccugaacaugugcaugccccugagcugcaccaagaacaacagccaccacuacaucauggugggcaacgagaccggccuggagcugacccugaccaacaccagcaucaucaaccacaaguucugcaaccugagcgacgcccacaagaagaaccuguacaaccacgcccugaugagcaucaucagcaccuuccaccugagcauccccaacuucaaccaguacgaggccaugagcugcgacuucaacggcggcaagaucagcgugcaguacaaccugagccacagcuacgccggcgacgccgccagccacugcggcaccguggccaacggcgugcugcagaccuucaugagaauggccuggggcggcagcuacaucgcccuggacagcggcuacggcaagugggacugcaucaugaccagcuaccaguaccugaucauccagaacaccaccugggaggaccacugccaguucagcagacccagccccaucggcuaccugggccugcugagccagagaaccagagacaucuacaucagcagaagacugcugggcaccuucaccuggacccugagcgacagcgagggcaaggacacccccggcggcuacugccugaccagauggaugcugaucgaggccgagcugaagugcuucggcaacaccgccguggccaagugcaacgagaagcacgacgaggaguucugcgacaugcugagacuguucgacuucugcaagcaggccauccagagacugaagacccccgcccagaugagcauccagcugaucaacaaggccgugaacgcccugaucaacgaccagcugaucaugaagaaccaccugagagacaucaugggcauccccuacugcaacuacagcaaguacugcuaccugaaccacaccaccaccggcaagaccagccugcccaagugcugccuggugagcaacggcagcuaccugaacgagacccacuucagcgacgacaucgagcagcaggccgacaacaugaucaccgagaugcugcagaaggaguacauggagagacagggcaagaccccccugggccugguggaccuguucguguucagcaccagcuucuaccugaucagcaucuuccugcaccuggugaagauccccacccacagacacaucgugggcaagagcugccccaagccccacagacugaaccacaugggcaucugcagcugcggccuguacaagcagcccggcgugcccgugagauggaagagaugaggacuagucccuguucccagagcccacuuuuuuuucuuuuuuugaaauaaaauagccugucuuucagaucuaaaaaaaaaaaaaaaaaaaaaaaaaaaaaaaaaaaaaaaaaaaaaaaaaaaaaaaaaaaaaaaaaaaaaaaaaaaaaaaaaaaaaaaaaaaaaaaaaaaa

SEQ ID NO: 33630 - RNA, 1724 nt, Artificial Sequence
  mRNA product Design a-1 (A100) comprising derived and/or modified sequence from LASV(G502-SLE-2009;Clade IV)__AIT17126__GPCmut8 (opt4)
aggagagucccgcagucggcguccagcggcucugcuuguucgugugugugucguugcaggccuuauucaagcuuaccaugggccagaucgugaccuucuuccaggaggugccccacgugaucgaggaggugaugaacaucgugcugaucgcccugagcauccuggccgugcugaagggccuguacaacuucgccaccugcggccuggugggccugcugaccuuccugcugcugugcggcagaagcugcaccaccggccuguacaagggcguguacgagcugcagacccuggagcugaacauggagacccugaacaugugcaugccccugagcugcaccaagaacaacagccaccacuacaucauggugggcaacgagaccggccuggagcugacccugaccaacaccagcaucaucaaccacaaguucugcaaccugagcgacgcccacaagaagaaccuguacgaccacgcccugaugagcaucaucagcaccuuccaccugagcauccccaacuucaaccaguacgaggccaugagcugcgacuucaacggcggcaagaucagcgugcaguacaaccugagccacagcuacgccggcgacgccgccgaccacugcggcaccguggccaacggcgugcugcagaccuucaugagaauggccuggggcggcagcuacaucgcccuggacagcggcagaggcagaugggacugcaucaugaccagcuaccaguaccugaucauccagaacaccaccugggaggaccacugccaguucagcagacccagccccaucggcuaccugggccugcugagccagagaaccagagacaucuacaucagcagaagacugcugggcaccuucaccuggacccugagcgacagcgagggcaaggacacccccggcggcuacugccugaccagauggaugcugaucgaggccgagcugaagugcuucggcaacaccgccguggccaagugcaacgagaagcacgacgaggaguucugcgacaugcugagacuguucgacuucugcaagcaggccauccagagacugaaggcccccgcccagaugagcauccagcugaucaacaaggccgugaacgcccugaucaacgaccagcuggugaugaagaaccaccugagagacaucaugggcauccccuacugcaacuacagcagauacugcuaccugaaccacaccaccaccggcagaaccagccugcccaagugcugccuggugagcaacggcagcuaccugaacgagacccacuucagcgacgacaucgagcagcaggccgacaacaugaucaccgagaugcugcagaaggaguacauggagagacagggcaagaccccccugggccugguggaccuguucguguucagcaccagcuucuaccugaucagcaucuuccugcaccuggugaagauccccacccacagacacaucgugggcaagagcugccccaagccccacagacugaaccacaugggcaucugcagcugcggccuguacaagcagcccggcgugcccgugaaguggaagagaugaggacuagucccuguucccagagcccacuuuuuuuucuuuuuuugaaauaaaauagccugucuuucagaucuaaaaaaaaaaaaaaaaaaaaaaaaaaaaaaaaaaaaaaaaaaaaaaaaaaaaaaaaaaaaaaaaaaaaaaaaaaaaaaaaaaaaaaaaaaaaaaaaaaaa

SEQ ID NO: 33631 - RNA, 1724 nt, Artificial Sequence
  mRNA product Design a-1 (A100) comprising derived and/or modified sequence from LASV(G733-SLE-2010;Clade IV)__AIT17154__GPCmut8 (opt4)
aggagagucccgcagucggcguccagcggcucugcuuguucgugugugugucguugcaggccuuauucaagcuuaccaugggccagaucgugaccuucuuccaggaggugccccacgugaucgaggaggugaugaacaucgugcugaucgcccugagcauccuggccgugcugaagggccuguacaacuucgccaccugcggcaucgugggccuggugagcuuccugcugcugugcggcagaagcugcaccaccagccuguacaagggcguguacgagcugcagacccuggagcugaacauggagacccugaacaugugcaugccccugagcugcaccaagaacaacagccaccacuacaucauggugggcaacgagaccggccuggagcugacccugaccaacaccagcaucaucaaccacaaguucugcaaccugagcgacgcccacaagaagaaccuguacgaccacgcccugaugagcaucaucagcaccuuccaccugagcauccccaacuucaaccaguacgaggccaugagcugcgacuucaacggcggcaagaucagcgugcaguacaaccugagccacagcuacgccggcgacgccgccaaccacugcggcaccaucgccaacggcgugcugcagaccuucaugagaauggccuggggcggcagcuacaucgcccuggacagcggcagagacagaugggacugcaucaugaccagcuaccaguaccugaucauccagaacaccaccugggaggaccacugccaguucagcagacccagccccaucggcuaccugggccugcugagccagagaaccagagacaucuacaucagcagaagacugcugggcaccuucaccuggacccugagcgacagcgagggcaaggacacccccggcggcuacugccugaccagauggaugcugaucgaggccgagcugaagugcuucggcaacaccgccguggccaagugcaacgagaagcacgacgaggaguucugcgacaugcugagacuguucgacuucugcaagcaggccauccagagacugaaggcccccgcccagaugagcauccagcugaucaacaaggccgugaacgcccugaucaacgaccagcugaucaugaagaaccaccugagagacaucaugggcauccccuacugcaacuacagcaaguacugcuaccugaaccacaccaccaccggcaagaccagccugcccaagugcugccuggugagcaacggcagcuaccugaacgagacccacuucagcgacgacaucgagcagcaggccgacaacaugaucaccgagaugcugcagaaggaguacauggagagacagggcaagaccccccugggccugguggaccuguucguguucagcaccagcuucuaccugaucagcaucuuccugcaccuggugaagauccccacccacagacacguggugggcaagagcugccccaagccccacagacugaaccacaugggcaucugcagcugcggccuguacggccagcccggcgugcccgugaaguggaagagaugaggacuagucccuguucccagagcccacuuuuuuuucuuuuuuugaaauaaaauagccugucuuucagaucuaaaaaaaaaaaaaaaaaaaaaaaaaaaaaaaaaaaaaaaaaaaaaaaaaaaaaaaaaaaaaaaaaaaaaaaaaaaaaaaaaaaaaaaaaaaaaaaaaaaa

SEQ ID NO: 33632 - RNA, 1724 nt, Artificial Sequence
  mRNA product Design a-1 (A100) comprising derived and/or modified sequence from MOPV/LASV reassortant(IGS-1;Clade IV)__AFY05576__GPCmut8 (opt4)
aggagagucccgcagucggcguccagcggcucugcuuguucgugugugugucguugcaggccuuauucaagcuuaccaugggccagaucgugaccuucuuccaggaggugccccacgugaucgaggaggugaugaacaucgugcugaucgcccugagcgugcuggccgugcugaagggccuguacaacuucgccaccugcggccuggugggccuggugaccuuccugcugcugugcggcagaagcugcaccaccagccuguacaagggcguguacgagcugcagacccuggagcugaacauggagacccugaacaugugcaugccccugagcugcaccaagaacaacagccaccacuacaucauggugggcaacgagaccggccuggagcugacccugaccaacaccagcaucaucaaccacaaguucugcaaccugagcgacgcccacaagaagaaccuguacgaccacgcccugaugagcaucaucagcaccuuccaccugagcauccccaacuucaaccaguacgaggccaugagcugcgacuucaacggcggcaagaucagcgugcaguacaaccugagccacagcuacgccggcgacgccgccaaccacugcggcaccguggccaacggcgugcugcagaccuucaugagaauggccuggggcggcagcuacaucgcccuggacagcggcagaggcaacugggacugcaucaugaccagcuaccaguaccugaucauccagaacaccaccugggaggaccacugccaguucagcagacccagccccaucggcuaccugggccugcugagccagagaaccagagacaucuacaucagcagaagacugcugggcaccuucaccuggacccugagcgacagcgagggcgaggacacccccggcggcuacugccugaccagauggaugcugaucgaggccgagcugaagugcuucggcaacaccgccguggccaagugcaacgagaagcacgacgaggaguucugcgacaugcugagacuguucgacuucugcaagcaggccauccagagacugaaggcccccgcccagaugagcauccagcugaucaacaaggccgugaacgcccugaucaacgaccagcugaucaugaagaaccaccugagagacaucaugggcauccccuacugcaacuacagcaaguacugcuaccugaaccacaccaccaccggcagaaccagccugcccaagugcugccuggugagcaacggcagcuaccugaacgagacccacuucagcgacgacaucgagcagcaggccgacaacaugaucaccgagaugcugcagaaggaguacauggagagacagggcaagaccccccugggccugguggaccuguucguguucagcaccagcuucuaccugaucagcaucuuccugcaccuggugaagauccccacccacagacacaucgugggcaagagcugccccaagccccacagacugaaccacaugggcaucugcagcugcggccuguacaagcagcccggcgugcccgugaaguggaagagaugaggacuagucccuguucccagagcccacuuuuuuuucuuuuuuugaaauaaaauagccugucuuucagaucuaaaaaaaaaaaaaaaaaaaaaaaaaaaaaaaaaaaaaaaaaaaaaaaaaaaaaaaaaaaaaaaaaaaaaaaaaaaaaaaaaaaaaaaaaaaaaaaaaaaa

SEQ ID NO: 33633 - RNA, 1724 nt, Artificial Sequence
  mRNA product Design a-1 (A100) comprising derived and/or modified sequence from LASV(LM765-SLE-2012;Clade IV)__AIT17814__GPCmut8 (opt4)
aggagagucccgcagucggcguccagcggcucugcuuguucgugugugugucguugcaggccuuauucaagcuuaccaugggccagaucgugaccuucuuccaggaggugccccacgugaucgaggaggugaugaacaucgugcugaucgcccugagcauccuggccgugcugaagggccuguacaacuucgccaccugcggccuggugggccuggugaccuuccugcugcugugcggcagaagcugcaccaccagccuguacaagggcguguacgagcugcagacccuggagcugaacauggagacccugaacaugugcaugccccugagcugcaccaagaacaacagccaccacuacaucauggugggcaacgagaccggccuggagcugacccugaccaacaccagcaucaucgaccacaaguucugcaaccugagcgacgcccacagaaagaaccuguacgaccacgcccugaugagcaucaucagcaccuuccaccugagcauccccaacuucaaccaguacgaggccaugagcugcgacuucaacggcggcaagaucagcgugcaguacaaccugagccacagcuacgccaaggacgccgccgaccacugcggcaccguggccaacggcgugcugcagaccuucaugagaauggccuggggcggcagcuacaucgcccuggacagcggcagaggcagaugggacugcaucaugaccagcuaccaguaccugaucauccagaacaccaccugggaggaccacugccaguucagcagacccagccccaucggcuaccugggccugcugagccagagaaccagagacaucuacaucagcagaagacugcugggcaccuucaccuggacccugagcgacagcgagggcaaggacacccccggcggcuacugccugaccagauggaugcugaucgaggccgagcugaagugcuucggcaacaccgccguggccaagugcaacgagaagcacgacgaggaguucugcgacaugcugagacuguucgacuucugcaagcaggccauccagagacugaaggcccccgcccagaugagcauccagcugaucaacaaggccgugaacgcccugaucaacgaccagcugaucaugaagaaccaccugagagacaucaugggcauccccuacugcaacuacagcaaguacugcuaccugaaccacaccaccaccggcaagaccagccugcccaagugcugccuggugagcaacggcagcuaccugaacgagacccacuucagcgacgacaucgagcagcaggccgacaacaugaucaccgagaugcugcagaaggaguacauggagagacagggcaagaccccccugggccugguggaccuguucguguucagcaccagcuucuaccugaucagcaucuuccugcaccuggugaagauccccacccacagacacaucgugggcaagcccugccccaagccccacagacugaaccacaugggcaucugcagcugcggccuguacaagcagcccggcgugcccgugaaguggaagagaugaggacuagucccuguucccagagcccacuuuuuuuucuuuuuuugaaauaaaauagccugucuuucagaucuaaaaaaaaaaaaaaaaaaaaaaaaaaaaaaaaaaaaaaaaaaaaaaaaaaaaaaaaaaaaaaaaaaaaaaaaaaaaaaaaaaaaaaaaaaaaaaaaaaaa

SEQ ID NO: 33634 - RNA, 1724 nt, Artificial Sequence
  mRNA product Design a-1 (A100) comprising derived and/or modified sequence from LASV(LM776-SLE-2012;Clade IV)__AIT17824__GPCmut8 (opt4)
aggagagucccgcagucggcguccagcggcucugcuuguucgugugugugucguugcaggccuuauucaagcuuaccaugggccagaucgugaccuucuuccaggaggugccccacgugaucgaggaggugaugaacaucgugcugaucgcccugagcauccuggccgugcugaagggccuguacaacuucgccaccugcggccuggugggccuggugaccuuccugcugcugugcggcagaagcugcaccaccagcguguacaagggcguguacgagcugcagacccuggagcugaacauggagacccugaacaugugcaugccccugagcugcaccaagaacaacagccaccacuacaucauggugggcaacgagaccggccuggagcugacccugaccaacaccagcaucaucaaccacaaguucugcaaccugagcgacgcccacaagaagaaccuguacgaccacgcccugaugagcaucaucagcaccuuccaccugagcauccccaacuucaaccaguacgaggccaugagcugcgacuucaacggcggcaagaucagcgugcaguacaaccugagccacagcuacgccggcgacgccgccaaccacugcggcaccguggccaacggcgugcugcagaccuucaugagaauggccuggggcggcagcuacaucgcccuggacagcggccacggcaagugggacugcaucaugaccagcuaccaguaccugaucauccagaacaccaccugggaggaccacugccaguucagcagacccagccccaucggcuaccugggccugcugagccagagaaccagagacaucuacaucagcagaagacugcugggcaccuucaccuggacccugagcgacagcgagggcaaggacacccccggcggcuacugccugaccagauggaugcugaucgaggccgagcugaagugcuucggcaacaccgccguggccaagugcaacgagaagcacgacgaggaguucugcgacaugcugagacuguucgacuucugcaagcaggccauccagagacugaaggcccccgcccagaugagcauccagcugaucaacaaggccgugaacgcccugaucaacgaccagcugaucaugaagaaccaccugagagacaucaugggcauccccuacugcaacuacagcaaguacugcuaccugaaccacaccaccaccggcaagaccagccugcccaagugcugccuggugagcaacggcagcuaccugaacgagacccacuucagcgacgacaucgagcagcaggccgacaacaugaucaccgagaugcugcagaaggaguacauggagagacagggcaagaccccccugggccugguggaccuguucguguucagcaccagcuucuaccugaucagcaucuuccugcaccuggugaagauccccacccacagacacaucgugggcaagagcugccccaagccccacagacugaaccacaugggcaucugcagcugcggccuguacaagcagcccggcgugcccgugagauggaagagaugaggacuagucccuguucccagagcccacuuuuuuuucuuuuuuugaaauaaaauagccugucuuucagaucuaaaaaaaaaaaaaaaaaaaaaaaaaaaaaaaaaaaaaaaaaaaaaaaaaaaaaaaaaaaaaaaaaaaaaaaaaaaaaaaaaaaaaaaaaaaaaaaaaaaa

SEQ ID NO: 33635 - RNA, 1724 nt, Artificial Sequence
  mRNA product Design a-1 (A100) comprising derived and/or modified sequence from LASV(Mad39;Clade IV)__ANH09722__GPCmut8 (opt4)
aggagagucccgcagucggcguccagcggcucugcuuguucgugugugugucguugcaggccuuauucaagcuuaccaugggccagaucgugaccuucuuccaggaggugccccacgugaucgaggaggugaugaacaucgugcugaucgcccugagcauccuggccgugcugaagggccuguacaacguggccaccugcggccugaucggccuggugaccuuccugcugcugugcggcagaagcugcaccaccacccuguacaagggcguguacgagcugcaggcccuggagcugaacauggagacccugaacaugugcaugccccugagcugcaccaagaacaacagccaccacuacaucagagugggcaacgagaccggccuggagcugacccugaccaacaccagccugaucaaccacaaguucugcaaccugagcgacgcccacaagaagaaccuguacgaccacgcccugaugagcaucaucagcaccuuccaccugagcauccccaacuucaaccaguacgaggccaugagcugcgacuucaacgacggcaagaucagcgugcaguacaaccugagccacaccuacgccggcgacaccgccaaccacugcggcaccguggccaacggcgugcugcagaccuucaugagaauggccuggggcggcagcuacaucgcccuggacagcggcagaggcggcugggacugcaucaugaccagcuaccaguaccugaucauccagaacaccaccugggaggaccacugccaguucagcagacccagccccaucggcuaccugggccugcugagccagagaaccagagacaucuacaucagcagaagacugcugggcaccuucaccuggacccugagcgacagcgagggcaaggacacccccggcggcuacugccugaccagauggaugcugaucgaggccgagcugaagugcuucggcaacaccgccguggccaagugcaacgagaagcacgacgaggaguucugcgacaugcugagacuguucgacuucugcaagcaggccauccagagacugaaggcccccgcccagaugagcauccagcugaucaacaaggccgugaacgcccugaucaacgaccagcugaucaugaagaaccaccugagagacaucaugggcauccccuacugcaacuacagcaaguacugcuaccugaaccacaccgugaccggcaagaccagccugcccaagugcugccuggugagcaacggcagcuaccugaacgagacccacuucagcgacgacaucgagcagcaggccgacaacaugaucaccgagaugcugcagaaggaguacauggagagacagggcaagaccccccugggccugguggaccuguucguguucagcaccagcuucuaccugaucagcaucuuccugcaccuggugaagauccccacccacagacacguggugggcaagcccugccccaagccccacagacugaaccacaugggcaucugcagcugcggcuucuacaagcagcccggcgugcccgugagauggaagagaugaggacuagucccuguucccagagcccacuuuuuuuucuuuuuuugaaauaaaauagccugucuuucagaucuaaaaaaaaaaaaaaaaaaaaaaaaaaaaaaaaaaaaaaaaaaaaaaaaaaaaaaaaaaaaaaaaaaaaaaaaaaaaaaaaaaaaaaaaaaaaaaaaaaaa

SEQ ID NO: 33636 - RNA, 1724 nt, Artificial Sequence
  mRNA product Design a-1 (A100) comprising derived and/or modified sequence from LASV(Z0947-SLE-2011;Clade IV)__AIT17840__GPCmut8 (opt4)
aggagagucccgcagucggcguccagcggcucugcuuguucgugugugugucguugcaggccuuauucaagcuuaccaugggccagaucgugaccuucuuccaggaggugccccacgugaucgaggaggugaugaacaucgugcugaucgcccugagcauccuggccgugcugaagggccuguacaacuucgccaccugcggccuggugggccuggugaccuuccugcugcugugcggcagaagcugcaccaucagccuguacaagggcguguacgagcugcagacccuggagcugaacauggagacccugaacaugugcaugccccugagcugcaccaagaacaacagccaccacuacaucauggugggcaacgagaccggccuggagcugacccugaccaacaccagcaucaucaaccacaaguucugcaaccugagcgacgcccacaagaagaaccuguacgaccacgcccugaugagcaucaucagcaccuuccaccugagcauccccaacuucaaccaguacgaggccaugagcugcgacuucaacggcggcaagaucagcgugcaguacaaccugagccacagcuacgccggcgacgccgccaaccacugcggcaccguggccaacggcgugcugcagaccuucaugagaauggccuggggcggcagcuacaucgcccuggacagcggcagagacagaugggacugcaucaugaccagcuaccaguaccugaucauccagaacaccaccugggaggaccacugccaguucagcagacccagccccaucggcuaccugggccugcugagccagagaaccagagacaucuacaucagcagaagacugcugggcaccuucaccuggacccugagcgacagcgagggcaaggacacccccggcggcuacugccugaccagauggaugcugaucgaggccgagcugaagugcuucggcaacaccgccguggccaagugcaacgagaagcacgacgaggaguucugcgacaugcugagacuguucgacuucugcaagcaggccauccagagacugaaggcccccgcccagaugagcauccagcugaucaacaaggccgugaacgcccugaucaacgaccagcugaucaugaagaaccaccugagagacaucaugggcauccccuacugcaacuacagcaaguacugcuaccugaaccacaccaccaccggcaagaccagccugcccaagugcugccuggugagcaacggcagcuaccugaacgagacccacuucagcgacgacaucgagcagcaggccgacaacaugaucaccgagaugcugcagaaggaguacauggagagacagggcaagaccccccugggccugguggaccuguucguguucagcaccagcuucuaccugaucagcaucuuccugcaccuggugaagauccccacccacagacacaucgugggcaagcccugccccaagccccacagacugaaccacaugggcaucugcagcugcggccuguacaagcagcccggcgugcccgugaaguggaagagaugaggacuagucccuguucccagagcccacuuuuuuuucuuuuuuugaaauaaaauagccugucuuucagaucuaaaaaaaaaaaaaaaaaaaaaaaaaaaaaaaaaaaaaaaaaaaaaaaaaaaaaaaaaaaaaaaaaaaaaaaaaaaaaaaaaaaaaaaaaaaaaaaaaaaa

SEQ ID NO: 33637 - RNA, 1724 nt, Artificial Sequence
  mRNA product Design a-1 (A100) comprising derived and/or modified sequence from LASV(Josiah;Clade IV)__NP_694870__GPCmut8 (opt5)
aggagagucccgcagucggcguccagcggcucugcuuguucgugugugugucguugcaggccuuauucaagcuuaccaugggccagaucgugaccuucuuucaagaggucccccacguuauugaagaggugaugaacaucgugcugauugcccucagcguccuggcugugcuuaaggggcuguacaauuucgccacaugcggacucguuggccuggugacguuucuucugcucugugggagauccugcaccacaucucuguauaaaggagucuacgaacugcagacccucgagcugaacauggaaacacuuaauauguguaugccucugagcugcaccaagaacaauucccaucacuauaucauggugggcaacgagacagggcucgagcugacccuuacgaauaccucuauuaucaaccauaaauucuguaaucugagcgacgcgcacaagaaaaaccucuacgaucaugcucugauguccaucauuucuacauuucaccugagcaucccgaauuucaaccaguaugaagccauguccugcgacuuuaauggaggcaagauuagcguucaguacaaccucucucacuccuaugccggcgaugcugccaaucauugugggaccguggcuaacggaguccugcaaacauucaugcggauggccuggggcgggagcuacaucgcgcuugacucuggacgcggcaacugggauugcauuaugaccuccuaccaguaucugaucauucagaauacgacaugggaggaccacugucaguuuagcagacccucuccuaucggguaccucggacugcuuucccaacggacccgcgauaucuauauuagcagacggcugcucggcacauucaccuggacccuguccgacucugaaggcaaggauacacccgggggauacugccugacgcgcuggaugcucaucgaggccgagcugaaauguuuuggcaacaccgcuguggccaagugcaaugaaaaacaugacgaggaguucugcgauaugcuuagacuguuugacuucuguaagcaggcuauucagcggcucaaagccccugcgcagaugagcauccaacugauuaacaaggccgugaaugcucuuaucaacgaucagcugaucaugaagaaucaccuccgcgacauuauggggauccccuauugcaacuacuccaaauauuguuaccugaaucacacaaccacaggaagaaccagccugccuaagugcugucucgucucuaacggcuccuaccugaaugaaacgcauuucagcgacgauauugaacagcaagccgacaacaugaucacagagaugcuucagaaagaguauauggaacggcaggggaagaccccgcugggacucguugaucuguuuguguucucuaccagcuuuuaccugauuuccaucuuccuucaccucgugaaaauccccacacaucgccacauugucggcaagucuugcccuaaaccccauagacugaaucacaugggcaucuguagcugcgggcuguauaagcagccuggagugcccguuaaguggaaacggugaggacuagucccuguucccagagcccacuuuuuuuucuuuuuuugaaauaaaauagccugucuuucagaucuaaaaaaaaaaaaaaaaaaaaaaaaaaaaaaaaaaaaaaaaaaaaaaaaaaaaaaaaaaaaaaaaaaaaaaaaaaaaaaaaaaaaaaaaaaaaaaaaaaaa

SEQ ID NO: 33638 - RNA, 1721 nt, Artificial Sequence
  mRNA product Design a-1 (A100) comprising derived and/or modified sequence from LASV(LP;Clade I)__AAF86701__GPCmut8 (opt5)
aggagagucccgcagucggcguccagcggcucugcuuguucgugugugugucguugcaggccuuauucaagcuuaccaugggccagaucauuaccuucuuucaagaggugccccacgucaucgaagagguuaugaacauugugcugaucgcccucagccugcuugcuauucugaaggggcucuacaauaucgccacaugcggaaucauuggccugguggcguuccuuuuucugugugggaaauccugcucucucacgcugaagggaggcuaugaacugcagacccucgagcugaacauggaaacacuuaauauguguaugccucugagcugcaccaaaaacuccucucaucacuacaucagagucgggaaugagacaggacucgagcugacccuuacaaacaccagcauuaucaaucauaaguucuguaaccuguccgacgcucacaaaaagaaucucuaugaucaugcccugaugucuauuaucagcacguuucaccuguccauuccgaacuucaaucaguacgaagccaugagcugcgacuuuaacggcggcaagaucucugugcaguauaaucucucccacagcuacgcuggggaugccgcugagcauuguggaaccguugccaacggcgugcugcaaacauucaugcggauggcguggggagggcgcuauaucgcccuugacucuggcaaagggaauugggauugcauuaugaccuccuaccaguaccugaucauucagaacacaaccugggaagaccacugucaguuuagcagacccucuccuaucggauaucucggccugcuuucccaacggacgcgcgauauuuacaucagcagacggcugcucggcacauucaccuggacacuguccgacucugaggggaacgagacccccggaggcuauugccugacccgcuggaugcucaucgaagcugagcugaaguguuuugggaauacagccgucgcuaaaugcaacgaaaagcaugaugaggaguucugcgacaugcuuagacuguuugauuucuguaaacaggccauucggcgccucaaggcgccugcccagaugagcauccagcugauuaauaaggcugugaacgcccuuaucaaugaccaacugauuaugaaaaaccaccucagagauaucaugggaauccccuacugcaauuauuccaaguacuguuaucugaaccacacgagcucuggccggaccucccugccuaaaugcugucucauuagcaaugggucuuaccugaacgaaacacaguucagcgacgacaucgagcagcaagcugauaauaugauuaccgaaaugcuucagaaggaguacaucgaacgccagggaaaaacaccgcugggccucguugacauuuuuaucuucuccaccucuuuuuaucugauuagcaucuuccugcaucuuaucaagauucccacgcacagacauaucgugggcaaaccuugccccaagccucaccggcucaaccauaugggggucuguuccugcggacuguacaagcaccccggcgugccgacaaaauggaagcgcugaggacuagucccuguucccagagcccacuuuuuuuucuuuuuuugaaauaaaauagccugucuuucagaucuaaaaaaaaaaaaaaaaaaaaaaaaaaaaaaaaaaaaaaaaaaaaaaaaaaaaaaaaaaaaaaaaaaaaaaaaaaaaaaaaaaaaaaaaaaaaaaaaaaaa

SEQ ID NO: 33639 - RNA, 1721 nt, Artificial Sequence
  mRNA product Design a-1 (A100) comprising derived and/or modified sequence from LASV(803213;Clade II)__AAF86703__GPCmut8 (opt5)
aggagagucccgcagucggcguccagcggcucugcuuguucgugugugugucguugcaggccuuauucaagcuuaccaugggccagaucauuaccuucuuucaagaggugccccacgucaucgaagagguuaugaacauugugcugaucgcccucagccugcuugcuauucugaaggggaucuacaauguggccacaugcggacucuucggccugaucuccuuucuucugcucugugggagaucuugcagcgucacguauaaaggaguguacgaacugcagacccuggagcucaacauggcgaaucugaacauguguaugccucuuuccugcacaaagaauaacucucaucacuauauuaugguuggcaaugaaaccgggcuggagcucacacugaccaacacaagcaucauuaaucauaaauucuguaaccuuuccgacgcucacaagaaaaaucuguacgaucaugcccucaugucuaucauuagcaccuuucaccuguccaucccgaacuucaaucaguaugaggccaugagcugcgacuuuaacggaggcaagauuucugugcaguacaaucugucccacagcuucgcugucgaugccgcuaaccauuguggcacgaucgccaacggggugcuccaaaccuuuaugcggauggcguggggaggcucuuauaucgcccuggacuccgggaagggaaauugggauugcauuaugacaagcuaccaguaccuuaucauucagaacaccacaugggaagaccacugucaguucucucgccccuccccuaucggcuaucuggggcuccugagccaaagaacccgggauauuuacaucucccgcagacuucugggaacguuuacauggacccucucugacagcgagggcaaugaagcucccggcggguauugccugacacgguggaugcugaucgaggccgagcucaaauguuucggaaacaccgcuguugccaagugcaaugaaaaacaugaugaggaauuuugcgacaugcugcgccuuuucgauuucuguaagcaggcgauuaaaagacugaagaccccugcccagauguccauccagcucauuaacaaggcugugaaugcccugaucaacgaccaacuuauuaugaaaaaucaucugcgggauaucaugggcauccccuacugcaacuauagccgcuacuguuaucucaaucacacagucacggggaagaccucucugccuagaugcugucugguguccaacggaagcuaccucaaugagacacacuuuucugacgacauugaacagcaggcugauaacaugaucaccgagaugcugcaaaaagaguacauggaccggcagggcaagacaccgcuugggcugguggaucucuucgucuuuagcaccuccuucuaucugauuucuaucuuucugcaccuuguuaaaauucccacgcaucgccacaucgugggaaagccuugccccaaaccucauagacucaaucacaugggcauuuguagcugcggccuguacaagcaccccggggugccggucaaguggaaacggugaggacuagucccuguucccagagcccacuuuuuuuucuuuuuuugaaauaaaauagccugucuuucagaucuaaaaaaaaaaaaaaaaaaaaaaaaaaaaaaaaaaaaaaaaaaaaaaaaaaaaaaaaaaaaaaaaaaaaaaaaaaaaaaaaaaaaaaaaaaaaaaaaaaaa

SEQ ID NO: 33640 - RNA, 1721 nt, Artificial Sequence
  mRNA product Design a-1 (A100) comprising derived and/or modified sequence from LASV(GA391;Clade III)__CAA36645__GPCmut8 (opt5)
aggagagucccgcagucggcguccagcggcucugcuuguucgugugugugucguugcaggccuuauucaagcuuaccaugggccagaucgugaccuucuuucaagaggucccccacguuauugaagaggugaugaacaucgugcugauugcccucagcauccuggcuauucuuaaggggcuguacaaugucgccacaugcggacucaucggccuggugacguuccuucugcucuccgggagaucuuguagccugaucuauaaaggaaccuacgaacugcagacacucgagcugaacauggaaacccuuaauaugugcaugccucuguccuguacaaagaacaauucucaucacuauauucggguuggcaacgagaccgggcucgagcugacacuuaccaauacgagcauccugaaccauaaauuuugcaaucucuccgacgcgcacaagcgcaaccuguacgaucauucucugaugagcauuaucuccaccuuccaccucagcauuccgaauuuuaaccaguaugaagcuaugucuugugacuucaauggaggcaaaaucacagugcaguacaaccugucccacagcuuugccgucgaugccgcuggccauugcgggacccuugccaauggagugcugcaaacauucaugagaauggcuuggggcgggucuuauauugcccucgacuccggacggggcaacugggauuguaucaugaccagcuaccaguaccugaucauucagaacacgacaugggacgaucacugccaguuuucucgccccuccccuaucggguaucuuggacugcucagccaaagaacccgggacauuuacaucucccgcagacugcugggcacauucaccuggacccucucugauagcgagggcaaugaaacacccgggggauauugucugacgcgguggaugcuuauugaggcggagcugaagugcuuuggcaacaccgccguugcuaaguguaaugaaaaacaugacgaggaguucugcgauaugcuccgccuguuugacuucugcaagcaggccaucagacggcuuaaaaccccugcucagauguccauccagcugauuaacaaggccgugaaugcgcucaucaacgaucaacugauuaugaaaaaucaucugcgcgacaucauggggauucccuacuguaacuauagcagauacugcuaucucaaucacacaucuacaggaaagaccucccugccucgguguugccuuaucagcaacggcucuuaccugaaugaaacgaaguucagcgacgauaucgaacagcaggccgacaacaugauuacagagaugcuccaaaaagaguacaucgaucgccaggggaagaccccgcugggacuggucgaccuuuuuguguucuccaccucuuuuuaucucauuagcaucuuccugcaccuggugaaaauucccacacacagacauaucgucggcaagccuugucccaaaccucaccggcucaaucauaugggcauuugcuccugugggcuguacaagcagcccggaguuccggugagauggaaacgcugaggacuagucccuguucccagagcccacuuuuuuuucuuuuuuugaaauaaaauagccugucuuucagaucuaaaaaaaaaaaaaaaaaaaaaaaaaaaaaaaaaaaaaaaaaaaaaaaaaaaaaaaaaaaaaaaaaaaaaaaaaaaaaaaaaaaaaaaaaaaaaaaaaaaa

SEQ ID NO: 33641 - RNA, 1724 nt, Artificial Sequence
  mRNA product Design a-1 (A100) comprising derived and/or modified sequence from LASV(AV;Clade V)__CCA30314__GPCmut8 (opt5)
aggagagucccgcagucggcguccagcggcucugcuuguucgugugugugucguugcaggccuuauucaagcuuaccaugggccagaucgugaccuucuuucaagaggucccccacguuauugaagaggugaugaacaucgugcugauugcccucagcauccuggcuguccuuaaggggcuguacaauauugccacaugcggacucaucggccugaucacguuccuucugcucugugggagauccugcucuagcaaccuguauaaaggaguguacgaacugcagucccucgaccugaauauggagacccuuaacauguguaugccucugucuugcacaaagaauaacagccaucacuauauucggguuggcaaugauaccgggcucgaacugacacuuaccaacacauccauccugaaucauaaauuuuguaaccucucugacgcgcacaagaaagaucuguacgaccaugcucugaugagcauuaucuccaccuuccaccucagcauuccgaauuuuaaccaguaugaggccaugucuugcgauuucaauggaggcaagaucuccgugcaguacaaccugagccacucuuaugccauugacgcugccaaucauuguggcacggucgcuaacgggauccuucaaaccuuuaugcgcauggccuggggaggcuccuacaucgcgcuggauagcgggagaggaaacugggacugcauuaugacaucuuaccaguaucucaucauucagaauaccacaugggagaaccacugucaguucucccggcccagcccuaucggcuaccuggggcuucugucccaacgcaccagagauauuuauaucucucggcgccuccugggaacguuuacauggacccugagcgacuccgaaggcaaugccacacccggcggguacugccucaccagauggaugcugaucgaggcugaacuuaaguguuucggaaacaccgccguggcuaaaugcaaugagaagcaugaugaggaauuuugcgacaugcugcgccucuucgauuuuuguaaacaggccauuagccggcugaagucuccugcgcagauguccauccagcuuauuaacaaagccguuaaugcucugaucaacgaccaacucauuaugaagaaucaccugagagacaucaugggcauccccuauugcaacuacagcaaguauuguuaccugaaucacacaauuacggggaaaaccucucucccuaagugcugucuggugagcaacggauccuaccuuaaugagacacauuucucugaugacaucgaacagcaggccgauaacaugauuaccgagaugcugcaaaaagaauauauggagcggcagggcaagacaccgcucgggcuggucgaccuguucguguuuagcaccuccuucuaccuuaucagcauuuuucuccgccuggugaaaauccccacgcacagacauauugucggaaagccuugccccaaaccucaccggcugaaucauaugggcaucuguucuugcggccucuauaagcagcccgggguuccggugcgcuggaagagaugaggacuagucccuguucccagagcccacuuuuuuuucuuuuuuugaaauaaaauagccugucuuucagaucuaaaaaaaaaaaaaaaaaaaaaaaaaaaaaaaaaaaaaaaaaaaaaaaaaaaaaaaaaaaaaaaaaaaaaaaaaaaaaaaaaaaaaaaaaaaaaaaaaaaa

SEQ ID NO: 33642 - RNA, 1721 nt, Artificial Sequence
  mRNA product Design a-1 (A100) comprising derived and/or modified sequence from LASV(Togo/2016/7082;Clade VI)__AMR44577__GPCmut8 (opt5)
aggagagucccgcagucggcguccagcggcucugcuuguucgugugugugucguugcaggccuuauucaagcuuaccaugggccagaucauuaccuucuuucaagaggugccccacgucaucgaagagguuaugaacauugugcugaucgcccucagccugcuugcuauucugaaggggguguacaaugucgccacaugcggaaucaucggccucgugacguuccuguuucuuugugggagauccugcucucugauuuauaaaggaagcuacgaacuccagacccuggagcugaacauggaaacacucaauauguguaugccucuguccugcaccaagaacucuagccaucacuauauccggguuggcaaugagacagggcuugagcugacccucacaaacaccuccauuaucaaucauaaauucuguaaccugucugacgcgcacaagcgcaaucuuuacgaucaugcucugaugagcauucucuccacguuucaccugagcaucccgaacuucaaucaguaugaagccaugucuugcgacuuuaacggaggcaaaauuuccgugcaguacaaucugagccacgccuaugcugucgaugccgcugagcauuguggcaccguggccaacgggguucuccaaacauucaugagaauggcguggggaggcucuuacaucgcccuggacuccgggcggggaaauugggauugcaucaugaccagcuaccaguaucuuauuauccagaacacaaccugggaagaccacugucaguuuucucgccccuccccuauuggcuaccuggggcuccugagccaaagaacgcgggauaucuauauuucccgcagacuucugggaacauucaccuggacacucucugacagcgagggcaacgagacccccggcggguacugccugacccgguggaugcugaucgaagcugagcucaaguguuuuggaaauacagccguggcuaagugcaacgaaaaacaugaugaggaguucugcgacaugcugcgccuuuuugauuucuguaagcaggccauccagagacugaaauccccugcgcagaugagcauucaacucaucaauaaggccgucaacgcucugauuaaugaccagcuuaucaugaaaaaccaucugcgggauaugaugggcauucccuauugcaauuacucuaaguauuguuaccucaaccacacguccagcgggcgcaccucucugccuaagugcugucuggugagcaauggauccuaccucaacgaaacacacuucucugacgacaucgagcagcaagccgauaauaugaucaccgaaaugcugcagaaagaguauauugacagacagggcaagacaccgcuugggcugguggaucucuuugucuucagcaccuccuuuuaccugaucagcauuuuccugcaccuuaucaaaauucccacgcaucggcacaucguuggaaagccuugccccaaaccucaucgccucaaccacaugggcauuuguucuugcggccuguauaagcagcccggggugccgacaagauggaaacggugaggacuagucccuguucccagagcccacuuuuuuuucuuuuuuugaaauaaaauagccugucuuucagaucuaaaaaaaaaaaaaaaaaaaaaaaaaaaaaaaaaaaaaaaaaaaaaaaaaaaaaaaaaaaaaaaaaaaaaaaaaaaaaaaaaaaaaaaaaaaaaaaaaaaa

SEQ ID NO: 33643 - RNA, 1721 nt, Artificial Sequence
  mRNA product Design a-1 (A100) comprising derived and/or modified sequence from LASV(KAK-428;Clade n.d. (VII))__ANH09740__GPCmut8 (opt5)
aggagagucccgcagucggcguccagcggcucugcuuguucgugugugugucguugcaggccuuauucaagcuuaccaugggccagaucgugaccuucuuucaagaggucccccacguuauugaagaggugaugaacaucgugcugauugcccucagccugcuugcuauccugaaggggcucuacaauuucgccacaugcggagucauuggccugaucacguuucuucugcucugugggagauccugcucugcgaccuauaaaggacaguacgaacugcagacacuggagcucaacauggaaagccugaauauguguaugccucuuuccugcaccaagaacaauucucaucacuauauccgggcuggcaacaauacagggcuggagcucacccugacaaacaccagcauuaucucccauaaauucuguaaucuuucugacgcccacaagaaaaaccuguacgaucauacgcucaugagcauuaucaccacauuucaccuguccauuccgaauuucaaccaguaugaggccaugagcugcgacuuuaauggaggcaagaucucuauucaauacaaccugucccacagcuaugcuggcgaugccgcucagcauugugggaccguggccaauggaguucuccagacauucaugcgcauggcguggggcgggucuuaccuggcccuugacuccggaagacggggcugggauugcaucaucagcucuuaccaguaucugauuauccaaaacaccacgugggacgaucacugucaguuuucccgccccagcccuauuggguaccucggauucgugucccagaagacaagagacaucuauauuucucggcgccugcuuggcaccuuuacauggacccugagcgauuccgaaggccaugacaugcccgggggauacugccucaccagauggaugcugaucgaggcugaucugaaauguuucggcaacacagccgucgcuaagugcaaugaaaaacacgacgaggaguuuugcgauauguggcgccucuucgacuucuguaagcaggccauccaacggcugaaagcgccugcccagaugaacauucagcuuaucaauaaggcugugaacgcccugauuaaugaccaacucaugaugaagaaccaccugagagauaucauggggauucccuauugcaauuacagcaaauuuuguuaucuuaacaauacgaccacaggacggaccucucugccucgcugcugucucaucuccaacggcagcuaccugaaugaaacacauuucucugacgauaucgagcagcaggcugacaacaugauuaccgaaaugcugcagaaggaguacauggauagacaagggaaaacgccgcucggacugguugaccuuuuuguguucagcacauccuuuuaucugaucaccauuuuccuccaccuggucaagauccccacccaucggcacauugugggcaaaccuugccccaagccucaucgccugaaucacaugggcaucuguucuugcgggcuuuacaaacagcccggagugccggucagauggaagcggugaggacuagucccuguucccagagcccacuuuuuuuucuuuuuuugaaauaaaauagccugucuuucagaucuaaaaaaaaaaaaaaaaaaaaaaaaaaaaaaaaaaaaaaaaaaaaaaaaaaaaaaaaaaaaaaaaaaaaaaaaaaaaaaaaaaaaaaaaaaaaaaaaaaaa

SEQ ID NO: 33644 - RNA, 1721 nt, Artificial Sequence; identical to SEQ ID NO: 33638
  mRNA product Design a-1 (A100) comprising derived and/or modified sequence from LASV(Pinneo-NIG-1969;Clade I)__AIT17836__GPCmut8 (opt5)

SEQ ID NO: 33645 - RNA, 1721 nt, Artificial Sequence
  mRNA product Design a-1 (A100) comprising derived and/or modified sequence from LASV(ISTH0009-NIG-2011;Clade II)__AIT17404__GPCmut8 (opt5)
aggagagucccgcagucggcguccagcggcucugcuuguucgugugugugucguugcaggccuuauucaagcuuaccaugggccagaucauuaccuucuuucaagaggugccccacgucaucgaagagguuaugaacauugugcugaucgcccucagccugcuugcuauucugaaggggaucuacaauguggccacaugcggacucuucggccuggucuccuuucuucugcucugugggagaucuugcagcacgaccuauaaaggaguguacgaacugcagacacuggagcucgacauggcgucccugaacauguguaugccucuuucuugcaccaagaauaacagccaucacuauaucaugguuggcaaugaaacagggcuggagcucacccugacaaacaccuccauuaucaaucauaaauucuguaaccuuucugaugcucacaagaaaaaucuguacgaccaugcccucaugagcauuaucuccacguuucaccugagcauuccgaacuucaaucaguaugaggccaugucuugcgauuuuaacggaggcaagaucuccgugcaguacaaucugagccacgcuuaugccgucgacgcugccaaccauuguggcaccauugcgaauggggugcuccaaacauucaugcggauggccuggggaggcucuuacaucgcucuggauuccgggaagggaagcugggacugcaucaugaccucuuaccaguaucuuauuauccagaacacaaccugggaagaucacugucaguuuucccgccccagcccuauuggcuaccuggggcuccugucccaaagaacgcgggacaucuauauuucucgcagacuucugggaacauucaccuggacacucagcgauuccgagggcaacgaaacccccggcggguacugccugacccgguggaugcugaucgaggccgagcucaaauguuuuggaaauacagcuguugccaagugcaacgaaaaacaugacgaggaguucugcgauaugcugcgccuuuuugacuucuguaagcaggcgaucagacggcugaaaacgccugcccagaugagcauucagcucaucaauaaggcugugaacgcccugauuaaugaucaacuuaucaugaagaaccaucugcgcgacauuaugggcauccccuauugcaauuacucuaaauauuguuaccucaaccacaccgucacagggaagaccucccugccuagaugcugucuggugagcaauggaucuuaccucaacgaaacacacuucagcgacgauaucgaacagcaggcugacaauaugauuaccgagcugcuucaaaaagaguauauggaucggcagggcaagacgccgcuggggcucguggaccuguuugucuucuccacaucuuuuuaccugaucagcauuuuccuucaccucaucaaaauucccacccaucgccacaucaccggaaagccuugccccaaaccucauagacugaaccacaugggcauuuguuccugcggccuguauaagcaccccgggguuccggugaaguggaaacggugaggacuagucccuguucccagagcccacuuuuuuuucuuuuuuugaaauaaaauagccugucuuucagaucuaaaaaaaaaaaaaaaaaaaaaaaaaaaaaaaaaaaaaaaaaaaaaaaaaaaaaaaaaaaaaaaaaaaaaaaaaaaaaaaaaaaaaaaaaaaaaaaaaaaa

SEQ ID NO: 33646 - RNA, 1721 nt, Artificial Sequence
  mRNA product Design a-1 (A100) comprising derived and/or modified sequence from LASV(ISTH2010-NIG-2012;Clade II)__AIT17482__GPCmut8 (opt5)
aggagagucccgcagucggcguccagcggcucugcuuguucgugugugugucguugcaggccuuauucaagcuuaccaugggccagaucauuaccuucuuucaagaggugccccacgucaucgaagagguuaugaacauugugcugaucgcccucagccugcuugcuauucugaaggggaucuacaauguggccacaugcggacucuucggccuggucuccuuucuucugcucugugggagaucuugcagcacgaccuauaaaggaguguacgaacugcagacacuggagcucgacauggcgucccugaacauguguaugccucuuucuugcaccaagaauaacagccaucacuauaucaugguuggcaaugaaacagggcuggagcucacccugacaaacaccuccauuaucaaucauaaauucuguaaccuuucugaugcucacaagaaaaaucuguacgaccaugcccucaugagcauuaucuccacguuucaccugagcauuccgaacuucaaucaguaugaggccaugucuugcgauuuuaacggaggcaagaucuccgugcaguacaaucugagccacgcuuaugccgucgacgcugccaaccauuguggcaccauugcgaauggggugcuccaaacauucaugcggauggccuggggaggcucuuacaucgcucuggauuccgggaagggaagcugggacugcaucaugaccucuuaccaguaucuuauuauccagaacauuacaugggaagaucacugucaguuuucccgccccagcccuaucggcuaccuggggcuccugucccaaagaacccgggacauuuauaucucucgcagacuucugggaacguucacauggacccucagcgauuccgagggcaacgaaacacccggcggguacugccugacccgguggaugcugaucgaggccgagcucaaauguuuuggaaauaccgcuguugccaagugcaacgaaaaacaugacgaggaguucugcgauaugcugcgccuuuuugacuucuguaagcaggcgauuagacggcugaaaacgccugcccagaugagcauccagcucauuaauaaggcugugaacgcccugaucaaugaucaacuuauuaugaagaaccaucugcgcgacaucaugggcauccccuauugcaauuacucuaaauauuguuaccucaaccacacagucaccgggaagacaucccugccuagaugcugucuggugagcaauggaucuuaccucaacgaaacccacuucagcgacgauauugaacagcaggcugacaauaugaucacagagcugcuucaaaaagaguauauugaucggcagggcaagaccccgcuggggcucguggaccuguuugucuucuccacgucuuuuuaccugaucagcauuuuccuucaccucguuaaaauccccacacaucgccacguggugggaaagccuugccccaaaccucauagacugaaccacaugggcauuuguuccugcggccuguauaagcaccccggggucccggugaaguggaaacggugaggacuagucccuguucccagagcccacuuuuuuuucuuuuuuugaaauaaaauagccugucuuucagaucuaaaaaaaaaaaaaaaaaaaaaaaaaaaaaaaaaaaaaaaaaaaaaaaaaaaaaaaaaaaaaaaaaaaaaaaaaaaaaaaaaaaaaaaaaaaaaaaaaaaa

SEQ ID NO: 33647 - RNA, 1721 nt, Artificial Sequence
  mRNA product Design a-1 (A100) comprising derived and/or modified sequence from LASV(Lassa virus/H.sapiens-wt/NGA/2015/ISTH_0543;Clade II)__AVO03639__GPCmut8 (opt5)
aggagagucccgcagucggcguccagcggcucugcuuguucgugugugugucguugcaggccuuauucaagcuuaccaugggccagaucauuaccuucuuucaagaggugccccacgucaucgaagagguuaugaacauugugcugaucgcccucagccugcuugcuauucugaaggggaucuacaauguggccacaugcggacucuucggccuggucuccuuucuucugcucugugggagaucuugcagcacgaccuauaaaggaguguacgaacugcagacacuggagcucgacauggcgaaccugaauauguguaugccucuuuccugcaccaagaacaauucucaucacuauaucaugguuggcaacgaaacagggcuggagcucacccugacaaauaccagcauuaucaaccauaaauucuguaaucuuuccgaugcucacaagaaaaaccuguacgaccaugcccucaugucuauuaucagcacguuucaccuguccauuccgaauuucaaccaguaugaggccaugagcugcgauuuuaauggaggcaagaucucugugcaguacaaccugucccacaccuaugcugucgacgccgcuaaucauuguggcacaauugccaacggggugcuccaaaccuucaugcggauggcguggggaggcagcuacaucgcccuggauucugggaagggauccugggacugcaucaugacaagcuaccaguaucuuguuauucagaacaccacgugggaagaucacugucaguuuucucgccccuccccuaucggcuaccuggggcuccugagccaaagaacacgggacauuuauaucucccgcagacuucugggaaccuucacauggacccucucugauagcgagggcaaugaaacccccggcggguacugccugacacgguggaugcugauugaggcugagcucaaauguuuuggaaacacggccguggcuaagugcaaugaaaaacaugacgaggaguucugcgauaugcugcgccuuuuugacuucuguaagcaggccaucagacggcugaaaaccccugcgcagauguccauccagcucauuaacaaggccgucaaugcucugaucaacgaucaacuuauuaugaagaaucaucugcgcgacaucaugggcauucccuauugcaacuacagcaaauauuguuaccucaaucacacagugaccgggaagacaucucugccuagaugcugucugguguccaacggaagcuaccucaaugaaacccacuucucugacgauaucgaacagcaggccgacaacaugaucacggagcugcuucaaaaagaguauauugaucggcagggcaagacaccgcuggggcucgucgaccuguuuguuuucagcaccuccuuuuaccugaucucuauuuuccuucaccucgugaaaauccccacccaucgccacauuacaggaaagccuugccccaaaccucauagacugaaucacaugggcaucuguagcugcggccuguauaagcaccccggggugccggucaaguggaaacggugaggacuagucccuguucccagagcccacuuuuuuuucuuuuuuugaaauaaaauagccugucuuucagaucuaaaaaaaaaaaaaaaaaaaaaaaaaaaaaaaaaaaaaaaaaaaaaaaaaaaaaaaaaaaaaaaaaaaaaaaaaaaaaaaaaaaaaaaaaaaaaaaaaaaa

SEQ ID NO: 33648 - RNA, 1721 nt, Artificial Sequence
  mRNA product Design a-1 (A100) comprising derived and/or modified sequence from LASV(Lassa virus/H.sapiens-wt/NGA/2016/ISTH_0009;Clade II)__AVO03571__GPCmut8 (opt5)
aggagagucccgcagucggcguccagcggcucugcuuguucgugugugugucguugcaggccuuauucaagcuuaccaugggccagaucauuaccuucuuucaagaggugccccacgucaucgaagagguuaugaacauugugcugaucgcccucagccugcuugcuauucugaaggggaucuacaauguggccacaugcggacuccugggccuugucuccuuccugcuccugugugggagaucuugcagcacgaccuauaaaggaguguacgaacugcagacacucgagcuggacauggcgucccuuaacauguguaugccucugucuugcaccaagaauaacagccaucacuauaucaugguuggcaaugaaacagggcucgagcugacccuuacaaacaccuccauuaucaaucauaaauuuuguaaccugucugaugcucacaagaaaaaucucuacgaccaugcccugaugagcauuaucuccacguuccaccugagcauuccgaacuuuaaucaguaugaggccaugucuugcgauuucaacggaggccggaucuccgugcaguacaaucucagccacucuuaugcugucgacgccgcuaaccauuguggcaccauugccaauggggugcugcaaacauuuaugcgcauggcguggggaggcuccuacaucgcccuugauagcgggaagggaucuugggacugcaucaugaccuccuaccaguaucugauuauccagaacacaaccugggaagaucacugucaguucagcagacccuccccuauuggcuaccucgggcugcuuucucaacggacgcgcgacaucuauauuagcagacggcugcucggaacauuuaccuggacacuguccgauagcgagggcaacgaaacccccggcggguacugccugacccgcuggaugcucaucgaggcugagcugaaguguuucggaaauacagccguugcuaaaugcaacgaaaagcaugacgaggaauuuugcgauaugcuuagacuguucgacuuuuguaaacaggccauccggcgccucaagacgccugcgcagaugucuauucagcugaucaauaaagccgugaacgcucuuauuaaugaucaacugaucaugaagaaccaccucagagacauuaugggcauccccuauugcaauuacuccaaguauuguuaccugaaccacaccgucacagggaaaaccagccugccucggugcugucucgugucuaauggaagcuaccugaacgagacacauuucuccgacgauaucgaacagcaggccgacaauaugauuaccgagcuucugcaaaaggaguauaucgaucgccagggcaaaacgccgcucgggcugguggaccuguucgucuuuucuaccagcuucuaccuuauuuccaucuuucuccaccugguuaagauucccacacauagacacaucaccggaaaaccuugccccaagccucaucggcugaaccacaugggcauuuguagcugcggccucuauaaucaccccggggugccggugaaauggaagcgcugaggacuagucccuguucccagagcccacuuuuuuuucuuuuuuugaaauaaaauagccugucuuucagaucuaaaaaaaaaaaaaaaaaaaaaaaaaaaaaaaaaaaaaaaaaaaaaaaaaaaaaaaaaaaaaaaaaaaaaaaaaaaaaaaaaaaaaaaaaaaaaaaaaaaa

SEQ ID NO: 33649 - RNA, 1721 nt, Artificial Sequence
  mRNA product Design a-1 (A100) comprising derived and/or modified sequence from LASV(Lassa virus/H.sapiens-wt/NGA/2016/ISTH_0017;Clade II)__AVO03567__GPCmut8 (opt5)
aggagagucccgcagucggcguccagcggcucugcuuguucgugugugugucguugcaggccuuauucaagcuuaccaugggccagaucauuaccuucuuucaagaggugccccacgucaucgaagagguuaugaacauugugcugaucgcccucagccugcuugcuauucugaaggggaucuacaauguggccacaugcggacucuucggccuggucuccuuucuucugcucugugggagaucuugcagcacgaccuauaaaggaguguacgaacugcagacacuggagcucgacauggcgucccugaacauguguaugccucuuucuugcaccaagaauaacagccaucacuauaucaugguuggcaaugaaacagggcuggagcucacccugacaaacaccuccauuaucaaucauaaauucuguaaccuuucugaugcucacaagaaaaaucuguacgaccaugcccucaugagcauuaucuccacguuucaccugagcauuccgaacuucaaucaguaugaggccaugucuugcgauuuuaacggaggcaagaucuccgugcaguacaaucugagccacaccuaugcuauugacgccgcuaaccauuguggcacaaucgccaaugggguccuccaaaccuucaugcggauggcguggggaggcucuuacaucgcccuggauuccgggaagggaagcugggacugcauuaugacaucuuaccaguaucuuaucauucagaacaccacgugggaagaucacugucaguuuucccgccccagcccuaucggcuaccuggggcuccugucccaaagaacacgggacauuuauaucucucgcagacuucugggaaccuucacauggacccucagcgauuccgagggcaacgaaacccccggcggguacugccugacacgguggaugcugaucgaggcugagcucaaauguuuuggaaauacggccguggcuaagugcaacgaaaaacaugacgaggaguucugcgauaugcugcgccuuuuugacuucuguaagcaggccauuagacggcugaaaaccccugcgcagaugagcauccagcucauuaauaaggccguuaacgcucugaucaaugaucaacuuauuaugaagaaccaucugcgcgacaucaugggcauccccuauugcaauuacucuaaauauuguuaccucaaccacacagugaccgggaagacaucccugccuagaugcugucuggucagcaauggaucuuaccucaacgaaacccacuucagcgacgauauugaacagcaggccgacaauaugaucacggagcugcuucaaaaagaguauauggaucggcagggcaagacaccgcuggggcucguggaccuguuuguguucuccaccucuuuuuaccugauuagcaucuuccuucaccucguccgcauucccacccauagacacguuaucggaaaaccuugccccaagccucaucggcugaaccacaugggcauuuguuccugcggccuguauaaacaccccggggugccggugaaguggaagcgcugaggacuagucccuguucccagagcccacuuuuuuuucuuuuuuugaaauaaaauagccugucuuucagaucuaaaaaaaaaaaaaaaaaaaaaaaaaaaaaaaaaaaaaaaaaaaaaaaaaaaaaaaaaaaaaaaaaaaaaaaaaaaaaaaaaaaaaaaaaaaaaaaaaaaa

SEQ ID NO: 33650 - RNA, 1721 nt, Artificial Sequence
  mRNA product Design a-1 (A100) comprising derived and/or modified sequence from LASV(Lassa virus/H.sapiens-wt/NGA/2018/ISTH_0959;Clade II)__AVV65099__GPCmut8 (opt5)
aggagagucccgcagucggcguccagcggcucugcuuguucgugugugugucguugcaggccuuauucaagcuuaccaugggccagaucauuaccuucuuucaagaggugccccacgucaucgaagagguuaugaacauugugcugaucgcccucagccugcuugcuauucugaaggggaucuacaauguggucacaugcggacucuucggccugguguccuuucuucugcucugugggagaucuugcagcacgaccuauaaaggaguuuacgaacugcagacacuggagcucgacauggccucccugaacauguguaugccucuuucuugcaccaagaauaacagccaucacuauaucauggugggcaaugaaacagggcuggagcucacccugacaaacaccuccauuaucaaucauaaauucuguaaccuuucugaugcgcacaagaaaaaucuguacgaccaugcucucaugagcauuaucuccacguuucaccugagcauuccgaacuucaaucaguaugaggccaugucuugcgauuuuaacggaggcaagaucuccguccaguacaaucugagccacgccuaugcuauugacgccgcuaaccauuguggcaccaucgccaauggggugcuccaaacauucaugcggauggcguggggaggcucuuacaucgcccuggauuccgggaagggaagcugggacugcauuaugaccucuuaccaguaucuuaucauucagaacacaaccugggaagaucacugucaguuuucccgccccagcccuaucggcuaccuggggcuccugucccaaagaacgcgggacauuuauaucucucgcagacuucugggaacauucaccuggacacucagcgauuccgagggcaacgaaacccccggcggguacugccugacccgguggaugcugaucgaggcugagcucaaauguuuuggaaauacagccguugcuaagugcaacgaaaaacaugacgaggaguucugcgauaugcugcgccuuuuugacuucuguaagcaggccauuagacggcugaaaacgccugcgcagaugagcauccagcucauuaauaaggccgugaacgcucugaucaaugaucaacuuauuaugaagaaccaucugcgcgacaucaugggcauccccuauugcaauuacucuaaauauuguuaccucaaccacaccgucacagggaagaccucccugccuagaugcugucuggugagcaauggaucuuaccucaacgaaacacacuucagcgacgauauugaacagcaggccgacaauaugaucaccgagcugcuucaaaaagaguauauugaucggcagggcaagacgccgcuggggcucguggaccuguuugucuucuccacaucuuuuuaccugaucagcauuuuccuucaccucguuaaaauccccacccaucgccacgugauuggaaagccuugccccaaaccucauagacugaaccacaugggcaucuguuccugcggccuguauaagcaccccggggugccggucaaguggaaacggugaggacuagucccuguucccagagcccacuuuuuuuucuuuuuuugaaauaaaauagccugucuuucagaucuaaaaaaaaaaaaaaaaaaaaaaaaaaaaaaaaaaaaaaaaaaaaaaaaaaaaaaaaaaaaaaaaaaaaaaaaaaaaaaaaaaaaaaaaaaaaaaaaaaaa

SEQ ID NO: 33651 - RNA, 1721 nt, Artificial Sequence
  mRNA product Design a-1 (A100) comprising derived and/or modified sequence from LASV(LASV003-NIG-2008;Clade II)__AIT17580__GPCmut8 (opt5)
aggagagucccgcagucggcguccagcggcucugcuuguucgugugugugucguugcaggccuuauucaagcuuaccaugggccagaucauuaccuucuuucaagaggugccccacgucaucgaagagguuaugaacauugugcugaucgcccucagccugcuugcuauucugaaggggaucuacaauguggccacaugcggacucuucggccuggucuccuuucuucugcucugugggagaucuugcagcacgaccuauaaaggaguguacgaacugcagacacuggagcucgacauggcgucccugaacauguguaugccucuuucuugcaccaagaauaacagccaucacuauaucaugguuggcaaugaaacagggcuggagcucacccugacaaacaccuccauuaucaaucauaaauucuguaaccuuucugaugcucacaagaaaaaucuguacgaccaugcccucaugagcauuaucuccacguuucaccugagcauuccgaacuucaaucaguaugaggccaugucuugcgauuuuaacggaggcaagaucuccgugcaguacaaucugagccacaccuaugcugucgacgccgcuaaccauuguggcacaauugccaauggggugcuccaaaccuucaugcggauggcguggggaggcucuuacaucgcccuggauuccgggaagggaagcugggacugcaucaugacaucuuaccaguaucuuauuauccagaacaccacgugggaagaucacugucaguuuucccgccccagcccuauuggcuaccuggggcuccugucccaaagaacacgggacaucuauauuucucgcagacuucugggaaccuucacauggacccucagcgauuccgagagcaacgaaacccccggcggcuacugccugacacgguggaugcugaucgaggcugagcucaaauguuuugggaauacggccguugcuaagugcaacgaaaaacaugacgaggaguucugcgauaugcugcgccuuuuugacuucuguaagcaggccaucagacggcugaaagcgccugcccagaugucuauucagcucaucaauaaggcugugaacgcccugauuaaugaucaacuuaucaugaagaaccaucugcgcgacauuaugggaauccccuauugcaauuacuccaaauauuguuaccucaaccacaccgucacaggcagaaccagccugccucggugcugucuggugucuaaugggagcuaccucaacgaaacacacuucuccgacgauaucgaacagcaggcugacaauaugauuaccgagcugcuucaaaaggaguauauggaucgccagggaaaaacgccgcugggccucguggaccuguuugucuucucuaccagcuuuuaccugaucuccauuuuccuucaccucguuaagauccccacacauagacacgugauugggaaaccuugccccaagccucaucggcugaaccacaugggaaucuguagcugcggccuguauaaacaccccggcgugccggucaaguggaagcgcugaggacuagucccuguucccagagcccacuuuuuuuucuuuuuuugaaauaaaauagccugucuuucagaucuaaaaaaaaaaaaaaaaaaaaaaaaaaaaaaaaaaaaaaaaaaaaaaaaaaaaaaaaaaaaaaaaaaaaaaaaaaaaaaaaaaaaaaaaaaaaaaaaaaaa

SEQ ID NO: 33652 - RNA, 1721 nt, Artificial Sequence
  mRNA product Design a-1 (A100) comprising derived and/or modified sequence from LASV(LASV035-NIG-2009;Clade II)__AIT17588__GPCmut8 (opt5)
aggagagucccgcagucggcguccagcggcucugcuuguucgugugugugucguugcaggccuuauucaagcuuaccaugggccagaucauuaccuucuuucaagaggugccccacgucaucgaagagguuaugaacauugugcugaucgcccucagccugcuugcuauucugaaggggaucuacaauguggccacaugcggacucuucggccuggucuccuuucuucugcucugugggagaucuugcagcacgaccuauaaaggaguguacgaacugcagacacuggagcucgacauggcgucccugaacauguguaugccucuuucuugcaccaagaauaacagccaucacuauaucaugguuggcaaugaaacagggcuggagcucacccugacaaacaccuccauuaucaaucauaaauucuguaaccuuucugaugcucacaagaaaaaucuguacgaccaugcccucaugagcauuaucuccacguuucaccugagcauuccgaacuucaaucaguaugaggccaugucuugcgauuuuaacggaggcaagaucuccgugcaguacaaucugagccacgcuuaugccgucgacgcugccaaccauuguggcaccauugcgaauggggugcuccaaacauucaugcggauggccuggggaggcucuuacaucgcucuggauuccgggaagggaagcugggacugcaucaugaccucuuaccaguaucuuauuauccagaacacaaccugggaagaucacugucaguuuucccgccccagcccuauuggcuaccuggggcuccugucccaaagaacgcgggacaucuauauuucucgcagacuucugggaacauucaccuggacacucagcgauuccgagggcaacgaaacccccggcggguacugccugacccgguggaugcugaucgaggccgagcucaaauguuuuggaaauacagcuguugccaagugcaacgaaaaacaugacgaggaguucugcgauaugcugcgccuuuuugacuucuguaagcaggcgaucagacggcugaaagccccugcucagaugagcauucagcucaucaauaaggccgugaacgcucugauuaaugaucaacuuaucaugaagaaccaucugcgcgacauuaugggcauccccuauugcaauuacucuaaauauuguuaccucaaccacacggucaccgggaagacaucccugccuagaugcugucuggugagcaauggaucuuaccucaacgaaacccacuucagcgacgauaucgaacagcaggccgacaauaugauuacagagcugcuucaaaaagaguauaucgaucggcagggcaagaccccgcuggggcucguggaccuguuugucuucuccacgucuuuuuaccugauuagcaucuuccuucaccucguuaaaauucccacacaucgccacgugaucggaaagccuugccccaaaccucauagacugaaccacaugggcauuuguuccugcggccuguauaagcaccccggggugccggucaaguggaaacggugaggacuagucccuguucccagagcccacuuuuuuuucuuuuuuugaaauaaaauagccugucuuucagaucuaaaaaaaaaaaaaaaaaaaaaaaaaaaaaaaaaaaaaaaaaaaaaaaaaaaaaaaaaaaaaaaaaaaaaaaaaaaaaaaaaaaaaaaaaaaaaaaaaaaa

SEQ ID NO: 33653 - RNA, 1721 nt, Artificial Sequence
  mRNA product Design a-1 (A100) comprising derived and/or modified sequence from LASV(LASV1000-NIG-2009;Clade II)__AIT17782__GPCmut8 (opt5)
aggagagucccgcagucggcguccagcggcucugcuuguucgugugugugucguugcaggccuuauucaagcuuaccaugggccagaucauuaccuucuuucaagaggugccccacgucaucgaagagguuaugaacauugugcugaucgcccucagccugcuugcuauucugaaggggaucuacaauguggccacaugcggacucuucggccuggucuccuuucuucugcucugugggagaucuugcagcacgaccuauaaaggaguguacgaacugcagacacuggagcucgacauggcgucccugaacauguguaugccucuuucuugcaccaagaauaacagccaucacuauaucaugguuggcaaugaaacagggcuggagcucacccugacaaacaccuccauuaucaaucauaaauucuguaaccuuucugaugcucacaagaaaaaucuguacgaccaugcccucaugagcauuaucuccacguuucaccugagcauuccgaacuucaaucaguaugaggccaugucuugcgauuuuaacggaggcaagaucuccgugcaguacaaucugagccacaccuaugcugucgacgccgcuaaccauuguggcacaauugccaauggggugcuccaaaccuucaugcggauggcguggggaggcucuuacaucgcccuggauuccgggaagggaagcugggacugcaucaugacaucuuaccaguaucuuauuauccagaacaccacgugggaagaucacugucaguuuucccgccccagcccuauuggcuaccuggggcuccugucccaaagaacacgggacaucuauauuucucgcagacuucugggaaccuucacauggacccucagcgauuccgagggcaacgaaacccccggcggguacugccugacacgguggaugcugaucgaggcugagcucaaauguuuuggaaauacggccguugcuaagugcaacgaaaaacaugacgaggaguucugcgauaugcugcgccuuuuugacuucuguaagcaggccaucaaaagacugaagaccccugcgcagaugagcauucagcucaucaauaaggccgugaacgcucugauuaaugaucaacuuaucaugaaaaaccaucugcgggacauuaugggcauccccuauugcaauuacucuaaguauuguuaccucaaccacacagucaccgggaaaacaucccugccucgcugcugucuggugagcaauggaucuuaccucaacgaaacccacuucagcgacgauaucgaacagcaggccgacaauaugauuacggagcugcuucaaaaggaguauaucgauagacagggcaaaacaccgcuggggcucguggaccuguuugucuucuccaccucuuuuuaccugauuagcaucuuccuucaccucguuaagauucccacccaucggcacguggugggaaaaccuugccccaagccucaucgccugaaccacaugggcaucuguuccugcggccuguauaagcaccccggggucccggugaaauggaagagaugaggacuagucccuguucccagagcccacuuuuuuuucuuuuuuugaaauaaaauagccugucuuucagaucuaaaaaaaaaaaaaaaaaaaaaaaaaaaaaaaaaaaaaaaaaaaaaaaaaaaaaaaaaaaaaaaaaaaaaaaaaaaaaaaaaaaaaaaaaaaaaaaaaaaa

SEQ ID NO: 33654 - RNA, 1721 nt, Artificial Sequence
  mRNA product Design a-1 (A100) comprising derived and/or modified sequence from LASV(LASV221-NIG-2010;Clade II)__AIT17624__GPCmut8 (opt5)
aggagagucccgcagucggcguccagcggcucugcuuguucgugugugugucguugcaggccuuauucaagcuuaccaugggccagaucauuaccuucuuucaagaggugccccacgucaucgaagagguuaugaacauugugcugaucgcccucagccugcuugcuauucugaaggggaucuacaauguggccacaugcggacucuucggccuggucuccuuucuucugcucugugggagaucuugcagcacgaccuauaaaggaguguacgaacugcagacacuggagcucgacauggcgucccugaacauguguaugccucuuucuugcaccaagaauaacagccaucacuauaucaugguuggcaaugaaacagggcuggagcucacccugacaaacaccuccauuaucaaucauaaauucuguaaccuuucugaugcucacaagaaaaaucuguacgaccaugcccucaugagcauuaucuccacguuucaccugagcauuccgaacuucaaucaguaugaggccaugucuugcgauuuuaacggaggcaagaucuccgugcaguacaaucugagccacaccuaugcuauugacgccgcuaaccauuguggcacaaucgccaaugggguccuccaaaccuucaugcggauggcguggggaggcucuuacaucgcccuggauuccgggaagggaagcugggacugcauuaugacaucuuaccaguaucuuaucauucagaacaccacgugggaagaucacugucaguuuucccgccccagcccuaucggcuaccuggggcuccugucccaaagaacacgggacauuuauaucucucgcagacuucugggaaccuucacauggacccucagcgauuccgagggcaacgaaacccccggcggguacugccugacacgguggaugcugaucgaggcugagcucaaauguuuuggaaauacggccguggcuaagugcaacgaaaaacaugacgaggaguucugcgauaugcugcgccuuuuugacuucuguaagcaggccauuagacggcugaaaaccccugcgcagaugagcauccagcucauuaauaaggccguuaacgcucugaucaaugaucaacuuauuaugaagaaccaucugcgcgacaucaugggcauccccuauugcaauuacucuaaauauuguuaccucaaccacacagugaccgggaagacaucccugccuagaugcugucuggucagcaauggaucuuaccucaacgaaacccacuucagcgacgauauugaacagcaggccgacaauaugaucacggagaugcugcaaaaagaguauauggaucggcagggcaagacaccgcuugggcugguggaccucuuuguguucuccaccucuuuuuaccugauuagcaucuuccugcaccuugucaaaauucccacccaucgccacguuaucggaaagccuugccccaaaccucauagacucaaccacaugggcauuuguuccugcggccuguauaagcaccccggggugccggugaaguggaaacggugaggacuagucccuguucccagagcccacuuuuuuuucuuuuuuugaaauaaaauagccugucuuucagaucuaaaaaaaaaaaaaaaaaaaaaaaaaaaaaaaaaaaaaaaaaaaaaaaaaaaaaaaaaaaaaaaaaaaaaaaaaaaaaaaaaaaaaaaaaaaaaaaaaaaa

SEQ ID NO: 33655 - RNA, 1721 nt, Artificial Sequence
  mRNA product Design a-1 (A100) comprising derived and/or modified sequence from LASV(LASV237-NIG-2010;Clade II)__AIT17638__GPCmut8 (opt5)
aggagagucccgcagucggcguccagcggcucugcuuguucgugugugugucguugcaggccuuauucaagcuuaccaugggccagaucauuaccuucuuucaagaggugccccacgucaucgaagagguuaugaacauugugcugaucgcccucagccugcuugcuauucugaaggggaucuacaauguggccacaugcggacucuucggccuggucuccuuucuucugcucugugggagaucuugcagcacgaccuauaaaggaguguacgaacugcagacacuggagcucgacauggcgucccugaacauguguaugccucuuucuugcaccaagaauaacagccaucacuauaucaugguuggcaaugaaacagggcuggagcucacccugacaaacaccuccauuaucaaucauaaauucuguaaccuuucugaugcucacaagaaagaccuguacgaucaugcccucaugagcauuaucuccacguuucaccugagcauuccgaauuucaaccaguaugaggccaugucuugcgacuuuaauggaggcaagaucuccgugcaguacaaccugagccacaccuaugcugucgaugccgcuaaucauuguggcacaauugccaacggggugcuccaaaccuucaugcggauggcguggggaggcucuuacaucgcccuggacuccgggaagggaagcugggauugcaucaugacaucuuaccaguaucuuauuauccagaauaccacgugggaagaccacugucaguuuucccgccccagcccuauuggcuaccuggggcuccugucccaaagaacacgggauaucuauauuucucgcagacuucugggaaccuucacauggacccucagcgacuccgagggcaacgaaacccccggcggguacugccugacacgguggaugcugaucgaggcugagcucaaauguuuuggaaacacggccguugcuaagugcaaugaaaaacaugaugaggaguucugcgacaugcugcgccuuuuugauuucuguaagcaggccaucagacggcugaaaaccccugcgcagaugagcauucagcucaucaacaaggccgugaaugcucugauuaacgaccaacuuaucaugaagaaucaucugcgcgacauuaugggcauccccuauugcaacuacucuaaauauuguuaccucaaucacacagucaccgggaagacaucccugccuagaugcugucuggugagcaacggaucuuaccucaaugaaacccacuucagcgaugacaucgaacagcaggccgauaacaugauuacggagcugcuucaaaaagaguauauggaccggcagggcaagacaccgcuggggcucguggaucuguuugucuucuccaccucuuuuuaccugaucagcauuuuccuucaccucaucaaaauucccacccaucgccacaucacaggaaagccuugccccaaaccucauagacugaaucacaugggcauuuguuccugcggccuguauaagcaccccgggguuccggugaaguggaaacggugaggacuagucccuguucccagagcccacuuuuuuuucuuuuuuugaaauaaaauagccugucuuucagaucuaaaaaaaaaaaaaaaaaaaaaaaaaaaaaaaaaaaaaaaaaaaaaaaaaaaaaaaaaaaaaaaaaaaaaaaaaaaaaaaaaaaaaaaaaaaaaaaaaaaa

SEQ ID NO: 33656 - RNA, 1721 nt, Artificial Sequence
  mRNA product Design a-1 (A100) comprising derived and/or modified sequence from LASV(LASV253-NIG-2011;Clade II)__AIT17670__GPCmut8 (opt5)
aggagagucccgcagucggcguccagcggcucugcuuguucgugugugugucguugcaggccuuauucaagcuuaccaugggccagaucauuaccuucuuucaagaggugccccacgucaucgaagagguuaugaacauugugcugaucgcccucagccugcuugcuauucugaaggggaucuacaauguggccacaugcggacucuucggccuggucuccuuucuucugcucugugggagaucuugcagcacgaccuauaaaggaguguacgaacugcagacacuggagcucgacauggcgucccugaacauguguaugccucuuucuugcaccaagaauaacagccaucacuauaucaugguuggcaaugaaacagggcuggagcucacccugacaaacaccuccauuaucaaucauaaauucuguaaccuuucugaugcucacaagaaaaaucuguacgaccaugcccucaugagcauuaucuccacguuucaccugagcauuccgaacuucaaucaguaugaggccaugucuugcgauuuuaacggaggcaagaucuccgugcaguacaaucugagccacaccuaugcugucgacgccgcuaaccauuguggcacaauugccaauggggugcuccaaaccuucaugcggauggcguggggaggcucuuacaucgcccuggauuccgggaagggaagcugggacugcaucaugacaucuuaccaguaucuuauuauccagaacaccacgugggaagaucacugucaguuuucccgccccagcccuauuggcuaccuggggcuccugucccaaagaacacgggacaucuauauuucucgcagacuucugggaaccuucacauggacccucagcgauuccgagggcaacgaaacccccggcggguacugccugacacgguggaugcugaucgaggcugagcucaaauguuuuggaaauacggccguugcuaagugcaacgaaaaacaugacgaggaguucugcgauaugcugcgccuuuuugacuucuguaagcaggccaucagacggcugaaagcgccugcccagaugagcauucagcucaucaauaaggcugugaacgcccugauuaaugaucaacuuaucaugaagaaccaucugcgcgacauuaugggcauccccuauugcaauuacucuaaauauuguuaccucaaccacaccgucacagggagaaccucccugccucggugcugucuggugagcaauggaucuuaccucaacgaaacacacuucagcgacgauaucgaacagcaggcugacaauaugauuaccgagcugcuucaaaaggaguauaucgaucgccagggcaaaacgccgcuggggcucguggaccuguuugucuucuccacaucuuuuuaccugauuagcaucuuccuucaccucguuaagauucccacccauagacacaucauuggaaaaccuugccccaagccucaucggcugaaccacaugggcaucuguuccugcggccuguauaaacaccccggggugccggugaaguggaagcgcugaggacuagucccuguucccagagcccacuuuuuuuucuuuuuuugaaauaaaauagccugucuuucagaucuaaaaaaaaaaaaaaaaaaaaaaaaaaaaaaaaaaaaaaaaaaaaaaaaaaaaaaaaaaaaaaaaaaaaaaaaaaaaaaaaaaaaaaaaaaaaaaaaaaaa

SEQ ID NO: 33657 - RNA, 1721 nt, Artificial Sequence
  mRNA product Design a-1 (A100) comprising derived and/or modified sequence from LASV(LASV254-NIG-2011;Clade II)__AIT17674__GPCmut8 (opt5)
aggagagucccgcagucggcguccagcggcucugcuuguucgugugugugucguugcaggccuuauucaagcuuaccaugggccagaucauuaccuucuuucaagaggugccccacgucaucgaagagguuaugaacauugugcugaucgcccucagccugcuugcuauucugaaggggaucuacaauguggccacaugcggacucuucggccuggucuccuuucuucugcucugugggagaucuugcagcacgaccuauaaaggaguguacgaacugcagacacuggagcucgacaugaccaaccugaauauguguaugccucuuuccugcacaaagaacaauucucaucacuauaucaugguuggcaacgaaaccgggcuggagcucacacugaccaauacgagcauuaucaaccauaaauucuguaaucuuuccgaugcgcacaagaaaaaccuguacaaucaugcucucaugucuauuaucagcaccuuucaccuguccauuccgaacuucaaucaguaugaggccaugagcugcgacuuuaacggaggcaagaucucugugcaguacaaucugucccacagcuaugccgucgaugcugccaaccauuguggcacaauugcuaacggggugcuccaaaccuucaugcggauggccuggggaggcucuuacaucgcgcuggacuccgggaagggaaauugggauugcaucaugacaagcuaccaguaucuuauuauccagaacaccacgugggaagaccacugucaguuuucucgccccuccccuauuggcuaccuggggcuccugagccaaagaacacgggauaucuauauuucccgcagacuucugggaaccuucacauggacccucucugacagcgagggcaaugaaacccccggcggguacugccugacacgguggaugcugaucgaggccgagcucaaauguuuuggaaacacggcuguugccaagugcaaugaaaaacaugaugaggaguucugcgacaugcugcgccuuuuugauuucuguaagcaggcuaucagacggcugaaaaccccugcccaggcgaacauucagcucaucaauaaggccgugaacgcucugauuaaugaccaacuuaucaugaagaaccaucugcgcgauauuaugggcauccccuauugcaauuacuccaaauauuguuaccucaaccacacagucaccgggaagacaagccugccuagaugcugucuggugucuaauggauccuaccucaacgaaacccacuucagcgacgacaucgaacagcaggccgauaauaugauuacggagcugcuucaaaaagaguauauggaccggcagggcaagacaccgcuggggcucguggaucuguuugucuucucuaccagcuuuuaccugaucuccauuuuccuucaccucguuaaaauccccacccaucgccacgugauuggaaagccuugccccaaaccucauagacugaaccacaugggcaucuguucuugcggccuguauaagcaccccggggugccggucaaguggaaacggugaggacuagucccuguucccagagcccacuuuuuuuucuuuuuuugaaauaaaauagccugucuuucagaucuaaaaaaaaaaaaaaaaaaaaaaaaaaaaaaaaaaaaaaaaaaaaaaaaaaaaaaaaaaaaaaaaaaaaaaaaaaaaaaaaaaaaaaaaaaaaaaaaaaaa

SEQ ID NO: 33658 - RNA, 1721 nt, Artificial Sequence
  mRNA product Design a-1 (A100) comprising derived and/or modified sequence from LASV(Nig08-A19;Clade III)__ADU56618__GPCmut8 (opt5)
aggagagucccgcagucggcguccagcggcucugcuuguucgugugugugucguugcaggccuuauucaagcuuaccaugggccagaucgugaccuucuuucaagaggucccccacguuauugaagaggugaugaacaucgugcugauugcccucagcauccuggcuauucuuaaggggcuguacaauaucgccacaugcggacucaucggccuggucacguuccuucugcucuccgggagaucuuguagcaugaccuauaaaggaguguacgaacugcagacacuggagcucaacaugaauacccugaacaugugcaugccucuuuccuguacaaagaauaacucucaucacuauauuaugguuggcaaugaaaccgggcuggagcucacacugaccaacacgagccuucugcaucacaaauuuugcaaucucuccgacgcgcauaagaaaaaccuguacgaucacacccugaugucuaucauuagcacauuccaccucuccaucccgaauuuuaaccaguaugaggcuaugagcugugacuucaauggaggcaagauuaccgugcaguacaaccugucucauuccuaugccaucgaugccgcuaaucacugcggcacagucgccaacggggugcuucaaaccuuuaugcggauggcuuggggaggcagcuacauugcccuggacucugggcgcggaaagugggauuguaucaugacguccuaccaguaucucaucauucagaacacaaccugggaagaccauugccaguucagcagacccucuccuaucggcuaccuggggcuucugucccaacggacacgcgauauuuauaucagcagacggcuccugggaaccuuuaccuggacacuguccgacucugagggcaaugaaacgcccggcggguacugucucacccgcuggaugcugauugaggcggagcuuaaaugcuucggaaacacagccguugcuaaguguaaugaaaaacacgaugaggaauuuugcgacaugcugagacucuucgauuuuugcaagcaggccauccggcgccugaaagcuccugcccagaugagcauccagcuuauuaacaaggcggugaaugcccugaucaacgaccaacucauuaugaagaaucaccugagagauaucaugggcauucccuauuguaacuacuccaaauauugcuaccugaaucauaccagcacagggcggaccucucucccucgcuguugccuggucuccaacggaagcuaccuuaaugagacgcacuucucugacgacaucgaacagcaggcugauaacaugaucacagagaugcugcaaaaggaguaucucgacagacagggcaaaaccccgcuggggcugguggaucuuuucguguuuagcaccuccuucuaccucauuucuaucuuucugcaucuggucaagauucccacacaccggcauaucguuggaaaaccuugucccaagccucaccgccucaaucacaugggcauuugcagcuguggccuguauaaacagcccggggugccggugagauggaagcggugaggacuagucccuguucccagagcccacuuuuuuuucuuuuuuugaaauaaaauagccugucuuucagaucuaaaaaaaaaaaaaaaaaaaaaaaaaaaaaaaaaaaaaaaaaaaaaaaaaaaaaaaaaaaaaaaaaaaaaaaaaaaaaaaaaaaaaaaaaaaaaaaaaaaa

SEQ ID NO: 33659 - RNA, 1724 nt, Artificial Sequence
  mRNA product Design a-1 (A100) comprising derived and/or modified sequence from LASV(G1180-SLE-2010;Clade IV)__AIT17168__GPCmut8 (opt5)
aggagagucccgcagucggcguccagcggcucugcuuguucgugugugugucguugcaggccuuauucaagcuuaccaugggccagaucgugaccuucuuucaagaggucccccacguuauugaagaggugaugaacaucgugcugauugcccucagcauccuggcuguccuuaaggggcuguacaauuucgccacaugcggacucgugggccugcuuacguuucugcuccugugugggagauccugcaccgcgucucgguauaaaggaguuuacgaacugcagacacucgagcugaacauggaaacccuuaauauguguaugccucugagcugcacaaagaacaauucccaucacuauauuauggugggcaacgagaccgggcucgagcugacacuuaccaauacgucuaucaucaaccauaaauucuguaaucugagcgacgcucacaagaaaaaccucuacgaucaugcccugauguccauuaucucuaccuuucaccugagcauuccgaauuucaaccaguaugaagccauguccugcgacuuuaauggaggcaagaucagcguccaguacaaccucucucacuccuaugcuggcgaugccgcuaaucauugugggacaguggccaacggaguucugcaaaccuucaugcgcauggcguggggcgggagcuacauugcccuugacucuggacacggcuccugggauugcaucaugacaagcuaccaguaucugauuauccagaacaccacgugggaggaccauugucaguuuucuagacccuccccuaucggguaccucggacugcuuagccaacggacacgcgauauuuauaucuccagacggcugcucggcaccuucacauggacccugucugacagcgaaggcaaggauacccccgggggauacugccugacacgcuggaugcucauugaggcugagcugaaauguuuuggcaauacggccguggcuaagugcaacgaaaaacacgacgaggaguucugcgauaugcuuagacuguuugacuucuguaagcaggccauccagcggcucaaagcgccugcccagauguccauucaacugaucaauaaggcugucaacgcccuuaucaaugaucagcugauuaugaagaaccaccuccgcgacaucauggggauucccuauugcaauuacagcaaauauuguuaccugaaccauaccacaaccggaaagacaucucugccuaaaugcugucucguguccaauggcagcuaccugaacgaaacccacuucucugacgauaucgaacagcaagcugacaauaugauuacggagaugcuucagaaggaguauauggaaagacaggggaaaacaccgcugggacucguggaucuguuugucuucagcaccuccuuuuaccugaucucuaucuuccuucaucucguuaagauucccacccaccggcauaucgugggcaaaagcugcccuaagccccaccgccugaaccacaugggcauuuguuccugcgggcuguauaagcagccuggagugcccgucaaauggaagagaugaggacuagucccuguucccagagcccacuuuuuuuucuuuuuuugaaauaaaauagccugucuuucagaucuaaaaaaaaaaaaaaaaaaaaaaaaaaaaaaaaaaaaaaaaaaaaaaaaaaaaaaaaaaaaaaaaaaaaaaaaaaaaaaaaaaaaaaaaaaaaaaaaaaaa

SEQ ID NO: 33660 - RNA, 1724 nt, Artificial Sequence
  mRNA product Design a-1 (A100) comprising derived and/or modified sequence from LASV(G1442-SLE-2011;Clade IV)__AIT17180__GPCmut8 (opt5)
aggagagucccgcagucggcguccagcggcucugcuuguucgugugugugucguugcaggccuuauucaagcuuaccaugggccagaucgugaccuucuuucaagaggucccccacguuauugaagaggugaugaacaucgugcugauugcccucagcauccuggcuguccuuaaggggcuguacaauguggccacaugcggacucauuggccugguuacguuccuucugcucugugggagauccugcaccacaacccuguauaaaggaguguacgaacugcagacacucgagcugaacauggaaacccuuaauauguguaugccucugucuugcacaaagaacaauagccaucacuauauccgggucggcaacgagaccgggcucgagcugacgcuuaccaauacauccaucauuaaccauaaauuuuguaaucugucugacgcgcacaagaaaaaccucuacgaucaugcucugaugagcaucauuuccaccuuccaccugucuaucccgaauuuuaaccaguaugaagccaugagcugcgacuucaauggaggcaagauuuccgugcaguacaaccucagccacucuuaugccggcgaugcugccaaucauugugggacaguugcuaacggagugcugcaaaccuuuaugcgcauggccuggggcggguccuacaucgcgcuugacagcggaagaggcaacugggauugcauuaugacgucuuaccaguaucugaucauccagaauacaaccugggacgaucacugucaguucucccggcccagcccuauuggguaccucggacugcuuucucaacgcacaagagacgucuauaucucccggcgccugcucggcaccuuuaccuggacacugagcgauuccgagggcaaggacacgcccgggggauacugccugaccagauggaugcucauugaagccgagcugaaauguuucggcaacacagcuguggccaagugcaaugagaaacaugaugaagaguuuugcgacaugcuucggcuguucgauuuuuguaagcaggcuauccagcgccucaaagccccugcgcagaugucuauucaacugaucaacaaggccgugaaugcucuuaucaacgaccagcugauuaugaagaaucaccucagagacaucauggggauucccuauugcaacuacagcaaauauuguuaccugaauaacaccgccacaggaaagaccucccugccuaaaugcugucucaucagcaauggcucuuaccugaacgaaacgcacuucuccgaugacauugagcaggaagcugauaauaugaucacagagaugcuucaaaaggaguauauggaacggcaggggaaaaccccgcugggacucgucgaccuguucguuuuuagcaccucuuucuaccugaucagcauuuuucuucaucucgugaagauccccacacaccgccauauugugggcaaauccugcccuaagccccacagacugaaccauaugggcaucuguucuugcgggcuguauaagcagccuggaguccccgugcgguggaaacgcugaggacuagucccuguucccagagcccacuuuuuuuucuuuuuuugaaauaaaauagccugucuuucagaucuaaaaaaaaaaaaaaaaaaaaaaaaaaaaaaaaaaaaaaaaaaaaaaaaaaaaaaaaaaaaaaaaaaaaaaaaaaaaaaaaaaaaaaaaaaaaaaaaaaaa

SEQ ID NO: 33661 - RNA, 1724 nt, Artificial Sequence
  mRNA product Design a-1 (A100) comprising derived and/or modified sequence from LASV(G3010-SLE-2013;Clade IV)__AIT17344__GPCmut8 (opt5)
aggagagucccgcagucggcguccagcggcucugcuuguucgugugugugucguugcaggccuuauucaagcuuaccaugggccagaucgugaccuucuuucaagaggucccccacguuauugaagaggugaugaacaucgugcugauugcccucagcauccuggcuguccuuaaggggcuguacaauuucgccacaugcggacucgugggccugguuacguuucuucugcucugugggagauccugcaccacaucucuguauaaaggaguguacgaacugcagacccucgagcugaacauggaaacacuuaauauguguaugccucugagcugcaccaagaacaauucccaucacuauauuauggucggcaacgagacagggcucgagcugacccuuacgaauaccucuaucaucaaccauaaauucuguaaucugagcgacgcgcacaagaaaaaccucuacaaucaugcucugauguccauuaucucuacauuucaccugagcauuccgaacuucaaucaguaugaagccauguccugcgauuuuaacggaggcaagaucagcgugcaguacaaucucucucacuccuaugccggcgacgcugccagccauugugggaccguugcuaacggagugcugcaaacauucaugcggauggccuggggcgggucuuacauugcgcuugauuccggauacggcaagugggacugcaucaugaccagcuaucaguaccugauuauccagaacacgacaugggaggaucacugucaguuuucucgccccuccccuaucggguaucucggacugcuuagccaaagaacccgggacauuuacaucucccgcagacugcucggcacauucaccuggacccugucugauagcgaaggcaaagacacacccgggggauauugccugacgcgguggaugcucauugaggccgagcugaaguguuuuggcaauaccgcugucgccaaaugcaacgaaaagcaugaugaggaguucugcgacaugcuucgccuguuugauuucuguaaacaggcuauccagagacucaagaccccugcccagauguccauucaacugaucaauaaggcggugaacgcccuuaucaaugaccagcugauuaugaaaaaccaccuccgggauaucauggggauucccuacugcaauuauagcaaguacuguuaccugaaccacacaacaaccggaaaaacgucucugccuaagugcugucucguguccaauggcagcuaucugaacgaaacacauuucucugacgacaucgaacagcaagcugauaauaugauuaccgagaugcuucagaaagaguacauggaacgccaggggaagaccccgcugggacucgucgaccuguuuguuuucagcacauccuuuuaucugaucucuaucuuccuucaccucgugaaaauucccacccauagacacaucgugggcaagagcugcccuaagccccaucggcugaaccacaugggcauuuguuccugcgggcuguacaaacagccuggaguccccgugcgcuggaagagaugaggacuagucccuguucccagagcccacuuuuuuuucuuuuuuugaaauaaaauagccugucuuucagaucuaaaaaaaaaaaaaaaaaaaaaaaaaaaaaaaaaaaaaaaaaaaaaaaaaaaaaaaaaaaaaaaaaaaaaaaaaaaaaaaaaaaaaaaaaaaaaaaaaaaa

SEQ ID NO: 33662 - RNA, 1724 nt, Artificial Sequence
  mRNA product Design a-1 (A100) comprising derived and/or modified sequence from LASV(G502-SLE-2009;Clade IV)__AIT17126__GPCmut8 (opt5)
aggagagucccgcagucggcguccagcggcucugcuuguucgugugugugucguugcaggccuuauucaagcuuaccaugggccagaucgugaccuucuuucaagaggucccccacguuauugaagaggugaugaacaucgugcugauugcccucagcauccuggcuguccuuaaggggcuguacaauuucgccacaugcggacucgugggccugcuuacguuucugcuccugugugggagauccugcaccacaggacuguauaaaggcguuuacgaacuccagacccuggagcuuaacauggaaacacugaauauguguaugccucucucuugcaccaagaacaauagccaucacuauauuaugguggggaacgagacaggacuggagcuuacccugacgaauaccuccaucaucaaccauaaauucuguaaucucucugacgcgcacaagaaaaaccuguacgaucaugcucugaugagcauuaucuccacauuucaccucucuauuccgaauuucaaccaguaugaagccaugagcugcgacuuuaauggcggcaagaucuccguccaguacaaccugagccacucuuaugccggggaugcugccgaccauuguggaaccguggcuaauggcguucuucaaacauucaugcggauggccuggggaggguccuacauugcgcuggauagcggccgcgggagaugggacugcaucaugaccucuuaccaguaucucauuauccagaacacgacaugggaggaucacugucaguuuucccggcccagcccuaucggauaccugggccuucugucucaacgcaccagagacauuuauaucucccggcgccuccugggcacauucaccuggacccugagcgauuccgaagggaaggacacacccggaggcuacugccucacgagauggaugcugauugaggccgagcuuaaauguuuugggaacaccgcuguggccaagugcaaugaaaaacaugaugaggaguucugcgacaugcugcggcucuuugauuucuguaagcaggcuauccagcgccugaaagccccugcgcagaugucuauucaacuuaucaacaaggccgucaaugcucugaucaacgaccagcucgugaugaagaaucaccugagagacauuaugggaauccccuauugcaacuacagccgguauuguuaccugaaucacacaaccacaggccgcaccucccucccuaaaugcugucuggugagcaacgggucuuaccuuaaugaaacgcauuucuccgaugacauugaacagcaagccgauaacaugaucacagagaugcugcagaaggaguauauggaaagacagggaaaaaccccgcucggccuggucgaccuguuuguuuucagcaccucuuuuuaccuuauuagcaucuuccuccaccuggugaagauccccacacaucggcacauugugggcaaauccugcccuaagccccaucgccugaaucacauggggaucuguucuugcggacucuauaaacagccuggcguccccgugaaguggaagagaugaggacuagucccuguucccagagcccacuuuuuuuucuuuuuuugaaauaaaauagccugucuuucagaucuaaaaaaaaaaaaaaaaaaaaaaaaaaaaaaaaaaaaaaaaaaaaaaaaaaaaaaaaaaaaaaaaaaaaaaaaaaaaaaaaaaaaaaaaaaaaaaaaaaaa

SEQ ID NO: 33663 - RNA, 1724 nt, Artificial Sequence
  mRNA product Design a-1 (A100) comprising derived and/or modified sequence from LASV(G733-SLE-2010;Clade IV)__AIT17154__GPCmut8 (opt5)
aggagagucccgcagucggcguccagcggcucugcuuguucgugugugugucguugcaggccuuauucaagcuuaccaugggccagaucgugaccuucuuucaagaggucccccacguuauugaagaggugaugaacaucgugcugauugcccucagcauccuggcuguccuuaaggggcuguacaauuucgccacaugcggaauugugggccucguuuccuuucugcuucugugugggagaucuugcacgaccagccucuauaaaggaguguacgaacugcagacacuggagcucaacauggaaacccugaauauguguaugccucuuuccugcacaaagaacaauucucaucacuauaucauggucggcaacgagaccgggcuggagcucacacugaccaauacgagcaucauuaaccauaaauucuguaaucuuuccgacgcgcacaagaaaaaccuguacgaucaugcucucaugucuaucauuagcaccuuucaccuguccaucccgaauuucaaccaguaugaagccaugagcugcgacuuuaauggaggcaagauuucugugcaguacaaccugucccacagcuaugccggcgaugcugccaaucauugugggacaaucgcuaacggaguucuccaaaccuucaugcggauggccuggggcgggucuuacauugcgcuggacuccggacgcgauagaugggacugcaucaugacaagcuaccaguaucuuaucauucagaacaccacgugggaggaucacugucaguuuucucggcccuccccuaucggcuaccuggggcuccugagccaacgcacaagagacauuuauaucucccggcgccuucugggaaccuucacauggacccucucugauagcgaaggcaaggacacccccggcggguacugccugacaagauggaugcugauugaggccgagcucaaauguuuuggaaauacggcuguggccaagugcaacgaaaaacaugaugaggaguucugcgacaugcugcggcuuuuugauuucuguaagcaggcuauccagcgccugaaagccccugcgcagauguccauccaacucauuaauaaggccgucaacgcucugaucaaugaccagcuuauuaugaagaaccaccugagagacaucaugggcauucccuauugcaauuacagcaaauauuguuaccucaaccacaccacaaccgggaagacaucucugccuaaaugcugucugguguccaauggaagcuaccucaacgaaacccauuucucugaugacaucgaacagcaagccgauaauaugaucacggagaugcugcagaaggaguauauggaacggcagggcaaaacaccgcuugggcugguggaccucuuugucuucagcaccuccuuuuaccugauuucuaucuuccugcaccuuguuaagauucccacccaucgccacguggugggaaaaagcugcccuaagccccauagacucaaccacaugggcaucuguuccugcggccuguaugggcagccuggaguccccgugaaguggaaacggugaggacuagucccuguucccagagcccacuuuuuuuucuuuuuuugaaauaaaauagccugucuuucagaucuaaaaaaaaaaaaaaaaaaaaaaaaaaaaaaaaaaaaaaaaaaaaaaaaaaaaaaaaaaaaaaaaaaaaaaaaaaaaaaaaaaaaaaaaaaaaaaaaaaaa

SEQ ID NO: 33664 - RNA, 1724 nt, Artificial Sequence
  mRNA product Design a-1 (A100) comprising derived and/or modified sequence from MOPV/LASV reassortant(IGS-1;Clade IV)__AFY05576__GPCmut8 (opt5)
aggagagucccgcagucggcguccagcggcucugcuuguucgugugugugucguugcaggccuuauucaagcuuaccaugggccagaucgugaccuucuuucaagaggucccccacguuauugaagaggugaugaacaucgugcugauugcccucagcguccuggcugugcuuaaggggcuguacaauuucgccacaugcggacucguuggccuggugacguuucuucugcucugugggagauccugcaccacaucucuguauaaaggagucuacgaacugcagacccucgagcugaacauggaaacacuuaauauguguaugccucugagcugcaccaagaacaauucccaucacuauaucauggugggcaacgagacagggcucgagcugacccuuacgaauaccucuauuaucaaccauaaauucuguaaucugagcgacgcgcacaagaaaaaccucuacgaucaugcucugauguccaucauuucuacauuucaccugagcaucccgaauuucaaccaguaugaagccauguccugcgacuuuaauggaggcaagauuagcguucaguacaaccucucucacuccuaugccggcgaugcugccaaucauugugggaccguggcuaacggaguccugcaaacauucaugcggauggccuggggcgggagcuacaucgcgcuugacucuggacgcggcaacugggauugcauuaugaccuccuaccaguaucugaucauucagaauacgacaugggaggaccacugucaguuuagcagacccucuccuaucggguaccucggacugcuuucccaacggacccgcgauaucuauauuagcagacggcugcucggcacauucaccuggacccuguccgacucugaaggcgaggauacacccgggggauacugccugacgcgcuggaugcucaucgaggccgaacugaaguguuuuggcaacaccgcuguggccaaaugcaaugagaagcaugacgaagaguucugcgauaugcuuagacuguuugacuucuguaaacaggcuauucagcggcucaaggccccugcgcagaugagcauccaacugauuaacaaagccgugaaugcucuuaucaacgaucagcugaucaugaagaaucaccuccgcgacauuauggggauccccuauugcaacuacuccaaguauuguuaccugaaucacacaaccacaggaagaaccagccugccuaaaugcugucucgucucuaacggcuccuaccugaaugaaacgcauuucagcgacgauauugagcagcaagccgacaacaugaucacagagaugcuucagaaggaauauauggagcggcaggggaaaaccccgcugggacucguugaucuguuuguguucucuaccagcuuuuaccugauuuccaucuuccuucaccucgugaagauccccacacaucgccacauugucggcaaaucuugcccuaagccccauagacugaaucacaugggcaucuguagcugcgggcuguauaaacagccuggagugcccguuaaguggaagcggugaggacuagucccuguucccagagcccacuuuuuuuucuuuuuuugaaauaaaauagccugucuuucagaucuaaaaaaaaaaaaaaaaaaaaaaaaaaaaaaaaaaaaaaaaaaaaaaaaaaaaaaaaaaaaaaaaaaaaaaaaaaaaaaaaaaaaaaaaaaaaaaaaaaaa

SEQ ID NO: 33665 - RNA, 1724 nt, Artificial Sequence
  mRNA product Design a-1 (A100) comprising derived and/or modified sequence from LASV(LM765-SLE-2012;Clade IV)__AIT17814__GPCmut8 (opt5)
aggagagucccgcagucggcguccagcggcucugcuuguucgugugugugucguugcaggccuuauucaagcuuaccaugggccagaucgugaccuucuuucaagaggucccccacguuauugaagaggugaugaacaucgugcugauugcccucagcauccuggcuguccuuaaggggcuguacaauuucgccacaugcggacucgugggccugguuacguuucuucugcucugugggagauccugcaccacaucucuguauaaaggaguguacgaacugcagacccucgagcugaacauggaaacacuuaauauguguaugccucugagcugcaccaagaacaauucccaucacuauauuauggucggcaacgagacagggcucgagcugacccuuacgaauaccucuaucaucgaccauaaauucuguaaccugagcgaugcgcaccggaagaaucucuacgaccaugcucugauguccauuaucucuacauuucaccugagcauuccgaacuucaaucaguaugaagccauguccugcgauuuuaacggaggcaaaaucagcgugcaguacaaucucucucacuccuaugccaaggacgcugccgaucauuguggcaccguugcuaacggggugcugcaaacauucaugcgcauggccuggggaggcagcuacauugcgcuugacucugggagaggacggugggauugcaucaugaccuccuaccaguaucugauuauccagaauacgacaugggaggaccacugucaguuuagccgccccucuccuaucggcuaccucgggcugcuuucccaaagaacccgggauauuuauaucagccgcagacugcucggaacauucaccuggacccuguccgacucugaaggcaaggauacacccggcggguacugccugacgcgguggaugcucauugaggccgagcugaaauguuuuggaaacaccgcugucgccaagugcaacgaaaaacaugacgaggaguucugcgauaugcuucgccuguuugacuucuguaagcaggcuauccagagacucaaagccccugcgcagaugagcauucaacugaucaauaaggccgugaacgcucuuaucaaugaccagcugauuaugaagaaccaccuccgggauaucaugggcauucccuauugcaauuacuccaaauauuguuaccugaaccacacaaccacagggaagaccagccugccuaaaugcugucucgugucuaauggauccuaccugaacgaaacgcauuucagcgacgauaucgaacagcaagccgacaauaugauuacagagaugcuucagaaggaguauauggaacgccagggcaaaaccccgcuggggcucgucgaucuguuuguuuucucuaccagcuuuuaccugaucuccaucuuccuucaccucgugaagauucccacacauagacacaucgugggaaaaccuugccccaagccucaucggcugaaccacaugggcauuuguucuugcggccuguauaagcagcccggggucccggugaaauggaagcgcugaggacuagucccuguucccagagcccacuuuuuuuucuuuuuuugaaauaaaauagccugucuuucagaucuaaaaaaaaaaaaaaaaaaaaaaaaaaaaaaaaaaaaaaaaaaaaaaaaaaaaaaaaaaaaaaaaaaaaaaaaaaaaaaaaaaaaaaaaaaaaaaaaaaaa

SEQ ID NO: 33666 - RNA, 1724 nt, Artificial Sequence
  mRNA product Design a-1 (A100) comprising derived and/or modified sequence from LASV(LM776-SLE-2012;Clade IV)__AIT17824__GPCmut8 (opt5)
aggagagucccgcagucggcguccagcggcucugcuuguucgugugugugucguugcaggccuuauucaagcuuaccaugggccagaucgugaccuucuuucaagaggucccccacguuauugaagaggugaugaacaucgugcugauugcccucagcauccuggcuguccuuaaggggcuguacaauuucgccacaugcggacucgugggccugguuacguuucuucugcucugugggagauccugcaccacaucuguguauaaaggagucuacgaacugcagacccuggagcucaacauggaaacacugaauauguguaugccucuuagcugcaccaagaacaauucccaucacuauauuauggugggcaacgagacagggcuggagcucacccugacgaauaccucuaucaucaaccauaaauucuguaaucuuagcgacgcgcacaagaaaaaccuguacgaucaugcucucauguccauuaucucuacauuucaccugagcauuccgaauuucaaccaguaugaagccauguccugcgacuuuaauggaggcaagaucagcguucaguacaaccugucucacuccuaugccggcgaugcugccaaucauugugggaccguggcuaacggaguccuccaaacauucaugcggauggccuggggcgggagcuacauugcgcuggacucuggacacggcaagugggauugcaucaugaccuccuaccaguaucuuauuauccagaacacgacaugggaggaccauugucaguuuagccgccccucuccuaucggguaccugggacuccugucccaaagaacccgggauauuuauaucagccgcagacuucugggcacauucaccuggacccucuccgacucugaaggcaaagauacacccgggggauacugccugacgcgguggaugcugauugaggccgagcucaaguguuuuggcaauaccgcuguggccaaaugcaacgaaaagcacgacgaggaguucugcgauaugcugcgccuuuuugacuucuguaaacaggcuauccagagacugaaggccccugcgcagaugagcauucaacucaucaauaaggccgugaacgcucugaucaaugaucagcuuauuaugaaaaaccaucugcgggacaucauggggauucccuauugcaauuacuccaaguauuguuaccucaaccacacaaccacaggaaaaaccagccugccuaagugcugucuggucucuaauggcuccuaccucaacgaaacgcacuucagcgacgauaucgaacagcaagccgacaauaugauuacagagaugcugcagaaagaguauauggaacgccaggggaagaccccgcuuggacugguugaucucuuuguguucucuaccagcuuuuaccugaucuccaucuuccugcaucuugugaaaauucccacacacagacauaucgucggcaagucuugcccuaagccccaccggcucaaccacaugggcauuuguagcugcgggcuguauaaacagccuggagugcccguucgcuggaagagaugaggacuagucccuguucccagagcccacuuuuuuuucuuuuuuugaaauaaaauagccugucuuucagaucuaaaaaaaaaaaaaaaaaaaaaaaaaaaaaaaaaaaaaaaaaaaaaaaaaaaaaaaaaaaaaaaaaaaaaaaaaaaaaaaaaaaaaaaaaaaaaaaaaaaa

SEQ ID NO: 33667 - RNA, 1724 nt, Artificial Sequence
  mRNA product Design a-1 (A100) comprising derived and/or modified sequence from LASV(Mad39;Clade IV)__ANH09722__GPCmut8 (opt5)
aggagagucccgcagucggcguccagcggcucugcuuguucgugugugugucguugcaggccuuauucaagcuuaccaugggccagaucgugaccuucuuucaagaggucccccacguuauugaagaggugaugaacaucgugcugauugcccucagcauccuggcuguccuuaaggggcuguacaauguggccacaugcggacucauuggccugguuacguuccuucugcucugugggagauccugcaccacaacccuguauaaaggaguguacgaacugcaggcgcucgagcugaacauggaaacacuuaauauguguaugccucugucuugcaccaagaacaauagccaucacuauauccgggucggcaacgagacagggcucgagcugacccuuacgaauaccucccugaucaaccauaaauuuuguaaucucucugacgcucacaagaaaaaccuguacgaucaugcccugaugagcauuaucuccacauuccaccucucuauuccgaauuuuaaccaguaugaagccaugagcugcgacuucaaugauggaaagaucuccgugcaguacaaccugagccacaccuaugcuggcgacacagccaaucauuguggcaccguugcuaacggggugcuucaaacguuuaugcgcauggccuggggaggcucuuacauugcgcuggauuccgggagaggaggcugggacugcaucaugacaagcuaccaguaucucauuauccagaacaccacaugggaggaucacugucaguucucucggcccuccccuaucggguaccugggacuucugagccaacgcaccagagacauuuauaucucucggcgccuccugggcaccuuuacauggacgcuguccgauagcgaaggcaaggacacccccgggggauacugccucacaagauggaugcugauugaggccgagcuuaaauguuucggcaauaccgcugucgccaagugcaacgaaaaacaugaugaggaauuuugcgacaugcugcgccucuucgauuuuuguaagcaggcuauccagcggcugaaagccccugcgcagauguccauucaacuuaucaauaaggccgugaacgcucugaucaaugaccagcucauuaugaagaaccaccugagagacaucauggggauucccuauugcaauuacucuaaauauuguuaccugaaccacacagugaccggaaagacgagccucccuaaaugcugucuggucuccaauggcagcuaccuuaacgagacacauuucucugaugacaucgaacagcaagccgauaauaugauuaccgagaugcugcagaaggaguauauggaacggcaggggaaaaccccgcucggacugguugaccuguucguguuuuccaccagcuucuaccuuaucucuaucuuucuccaccuggugaagauucccacacaucgccacgucgugggcaaaccuugccccaagccucauagacugaaccacaugggcaucuguagcugcggguucuauaagcagcccggaguuccggugcgguggaaacgcugaggacuagucccuguucccagagcccacuuuuuuuucuuuuuuugaaauaaaauagccugucuuucagaucuaaaaaaaaaaaaaaaaaaaaaaaaaaaaaaaaaaaaaaaaaaaaaaaaaaaaaaaaaaaaaaaaaaaaaaaaaaaaaaaaaaaaaaaaaaaaaaaaaaaa

SEQ ID NO: 33668 - RNA, 1724 nt, Artificial Sequence
  mRNA product Design a-1 (A100) comprising derived and/or modified sequence from LASV(Z0947-SLE-2011;Clade IV)__AIT17840__GPCmut8 (opt5)
aggagagucccgcagucggcguccagcggcucugcuuguucgugugugugucguugcaggccuuauucaagcuuaccaugggccagaucgugaccuucuuucaagaggucccccacguuauugaagaggugaugaacaucgugcugauugcccucagcauccuggcuguccuuaaggggcuguacaauuucgccacaugcggacucgugggccugguuacguuucuucugcucugugggagauccugcaccauuucucuguauaaaggaguguacgaacugcagacacucgagcugaacauggaaacccuuaauauguguaugccucugagcugcacaaagaacaauucccaucacuauaucauggucggcaacgagaccgggcucgagcugacacuuaccaauacgucuaucauuaaccauaaauucuguaaucugagcgacgcgcacaagaaaaaccucuacgaucaugcucugauguccaucauuucuaccuuucaccugagcaucccgaauuucaaccaguaugaagccauguccugcgacuuuaauggaggcaagauuagcgugcaguacaaccucucucacuccuaugccggcgaugcugccaaucauugugggacaguugcuaacggagugcugcaaaccuucaugcggauggccuggggcgggagcuacaucgcgcuugacucuggacgcgauagaugggacugcauuaugacauccuaccaguaucugaucauccagaacaccacgugggaggaucacugucaguuuagccggcccucuccuauuggcuaccucgggcugcuuucccaacgcacaagagacaucuauauuagccggcgccugcucggaaccuucacauggacccuguccgauucugaaggcaaggacacccccggcggguacugccugacaagauggaugcucaucgaggccgagcugaaauguuuuggaaauacggcugucgccaagugcaacgaaaaacaugaugaggaguucugcgacaugcuucggcuguuugauuucuguaagcaggcuauucagcgccucaaagccccugcgcagaugagcauccaacugaucaauaaggccgugaacgcucuuauuaaugaccagcugaucaugaagaaccaccucagagacauuaugggcauccccuauugcaauuacuccaaauauuguuaccugaaccacaccacaaccgggaagacaagccugccuaaaugcugucucgugucuaauggauccuaccugaacgaaacccauuucagcgaugacauugaacagcaagccgauaauaugaucacggagaugcuucagaaggaguauauggaacggcagggcaaaacaccgcuggggcucgucgaccuguuuguuuucucuaccagcuuuuaccugaucuccauuuuccuucaccucgugaagauccccacccaucgccacauugugggaaaaccuugccccaagccucauagacugaaccacaugggcaucuguucuugcggccuguauaagcagcccggggucccggugaaauggaagcggugaggacuagucccuguucccagagcccacuuuuuuuucuuuuuuugaaauaaaauagccugucuuucagaucuaaaaaaaaaaaaaaaaaaaaaaaaaaaaaaaaaaaaaaaaaaaaaaaaaaaaaaaaaaaaaaaaaaaaaaaaaaaaaaaaaaaaaaaaaaaaaaaaaaaa

SEQ ID NO: 33669 - RNA, 1736 nt, Artificial Sequence
  mRNA product Design a-2 (hSL-A64-N5) comprising derived and/or modified sequence from LASV(Josiah;Clade IV)__NP_694870__GPCmut8 (opt1)
aggagaguccgcucagccagguugcagaagcggcuuagcguguguccuaaucuucucucugcguguagguaggccugugccgcaaacaagcuuaccaugggccagaucgugaccuucuuccaggaggucccccacgugaucgaggaggugaugaacaucguccugaucgcccucagcgugcuggccgugcugaaggggcucuacaacuucgcgaccugcggccuggucgggcuggugacguuccuccugcugugcggccgcuccugcaccaccagccucuacaaggggguguacgagcugcagacccuggagcucaacauggagacgcugaacaugugcaugccgcuguccugcaccaagaacaacagccaccacuacaucauggucggcaacgagaccggccucgagcugacgcugaccaacaccuccaucaucaaccacaaguucugcaaccucagcgacgcccacaagaagaaccuguacgaccacgcccugauguccaucaucagcaccuuccaccucuccauccccaacuucaaccaguacgaggccaugagcugcgacuucaacgggggcaagaucuccgugcaguacaaccugagccacuccuacgccggggacgcggccaaccacugcggcacgguggccaacgggguccugcagaccuucaugcggauggccuggggcggcagcuacaucgcgcucgacuccgggcgcggcaacugggacugcaucaugaccagcuaccaguaccugaucauccagaacaccacgugggaggaccacugccaguucucccggcccagccccaucggguaccugggccuccugucccagcgcacccgggacaucuacaucagccgccggcugcucggcaccuucaccuggacgcugagcgacuccgaggggaaggacaccccgggcggguacugccugacccgcuggaugcucaucgaggccgagcugaagugcuucggcaacaccgccguggccaagugcaacgagaagcacgacgaggaguucugcgacaugcugcggcuguucgacuucugcaagcaggccauccagcgccugaaggcgcccgcccagaugagcauccagcugaucaacaaggccgugaacgcccucaucaacgaccagcugaucaugaagaaccaccuccgggacaucauggggauccccuacugcaacuacuccaaguacugcuaccucaaccacacgaccaccggccgcaccagccugcccaagugcugccuggucuccaacggcagcuaccucaacgagacgcacuucuccgacgacaucgagcagcaggccgacaacaugaucaccgagaugcugcagaaggaguacauggagcggcaggggaagacgccccugggccucguggaccuguucguguucagcaccuccuucuaccugaucagcaucuuccugcaccucgucaagaucccgacccaccgccacaucguggggaaguccugccccaagccccaccggcugaaccacaugggcaucugcagcugcgggcuguacaagcagcccggcgugccggucaaguggaagcgcugaggacuagucccuguucccagagcccacuuuuuuuucuuuuuuugaaauaaaauagccugucuuucagaucucaaaggcucuuuucagagccaccaaaaaaaaaaaaaaaaaaaaaaaaaaaaaaaaaaaaaaaaaaaaaaaaaaaaaaaaaaaaaaaaagaauu

SEQ ID NO: 33670 - RNA, 1733 nt, Artificial Sequence
  mRNA product Design a-2 (hSL-A64-N5) comprising derived and/or modified sequence from LASV(LP;Clade I)__AAF86701__GPCmut8 (opt1)
aggagaguccgcucagccagguugcagaagcggcuuagcguguguccuaaucuucucucugcguguagguaggccugugccgcaaacaagcuuaccaugggccagaucaucaccuucuuccaggaggugccccacgucaucgaggaggugaugaacaucgugcugaucgcccucagccugcuggccauccucaaggggcuguacaacaucgcgaccugcggcaucaucgggcuggucgccuuccucuuccugugcggcaaguccugcagccugacgcucaagggcggguacgagcugcagacccuggagcucaacauggagacccugaacaugugcaugccgcuguccugcacgaagaacagcucccaccacuacauccgcgugggcaacgagaccgggcucgagcugacccugaccaacacgagcaucaucaaccacaaguucugcaaccucuccgacgcccacaagaagaaccuguacgaccacgcccugaugagcaucaucuccaccuuccaccucagcauccccaacuucaaccaguacgaggccauguccugcgacuucaacggcgggaagaucagcgugcaguacaaccugucccacagcuacgcgggcgacgccgccgagcacugcgggaccgucgccaacggcgugcugcagaccuucaugcggauggcguggggcgggcgcuacaucgcccucgacuccggcaaggggaacugggacugcaucaugacgagcuaccaguaccugaucauccagaacaccaccugggaggaccacugccaguucucccggcccagccccaucggcuaccugggccuccugucccagcgcacccgggacaucuacaucagccgccggcugcucgggacguucaccuggacccugagcgacuccgagggcaacgagacccccgggggcuacugccugacgcgcuggaugcucaucgaggccgagcugaagugcuucgggaacaccgccguggccaagugcaacgagaagcacgacgaggaguucugcgacaugcugcggcuguucgacuucugcaagcaggcgauccgccggcugaaggcccccgcccagaugagcauccagcugaucaacaaggccgucaacgcccucaucaacgaccagcugaucaugaagaaccaccuccgcgacaucaugggcauccccuacugcaacuacuccaaguacugcuaccucaaccacaccagcuccggccggaccagccugcccaagugcugccugaucuccaacgggagcuaccucaacgagacgcaguucuccgacgacaucgagcagcaggcggacaacaugaucaccgagaugcugcagaaggaguacaucgagcgccagggcaagaccccgcuggggcucguggacaucuucaucuucagcaccuccuucuaccugaucagcaucuuccugcaccugaucaagaucccgacgcaccggcacaucgugggcaagcccugccccaagccccaccgccucaaccacaugggggucugcuccugcggccuguacaagcacccgggcgugcccaccaaguggaagcggugaggacuagucccuguucccagagcccacuuuuuuuucuuuuuuugaaauaaaauagccugucuuucagaucucaaaggcucuuuucagagccaccaaaaaaaaaaaaaaaaaaaaaaaaaaaaaaaaaaaaaaaaaaaaaaaaaaaaaaaaaaaaaaaaagaauu

SEQ ID NO: 33671 - RNA, 1733 nt, Artificial Sequence
  mRNA product Design a-2 (hSL-A64-N5) comprising derived and/or modified sequence from LASV(803213;Clade II)__AAF86703__GPCmut8 (opt1)
aggagaguccgcucagccagguugcagaagcggcuuagcguguguccuaaucuucucucugcguguagguaggccugugccgcaaacaagcuuaccaugggccagaucaucaccuucuuccaggaggugccccacgucaucgaggaggugaugaacaucgugcugaucgcccucagccugcuggccauccucaaggggaucuacaacgucgcgaccugcggccuguucgggcugaucuccuuccuccugcugugcggccgcagcugcuccgugacguacaaggggguguacgagcuccagacccuggagcugaacauggccaaccucaacaugugcaugccgcugagcugcaccaagaacaacucccaccacuacaucauggucggcaacgagacgggccuggagcucacccugaccaacaccagcaucaucaaccacaaguucugcaaccuguccgacgcccacaagaagaaccucuacgaccacgcccugaugagcaucaucuccacguuccaccugagcauccccaacuucaaccaguacgaggccauguccugcgacuucaacgggggcaagaucagcgugcaguacaaccucucccacagcuucgcgguggacgccgccaaccacugcgggaccaucgccaacggcguccugcagaccuucaugcggauggcguggggcggguccuacaucgcccuggacagcggcaaggggaacugggacugcaucaugaccuccuaccaguaccucaucauccagaacacgaccugggaggaccacugccaguucagccgccccucccccaucggcuaccuggggcugcucagccagcggacccgcgacaucuacaucagccggcgccugcugggcaccuucacguggacccucuccgacagcgagggcaacgaggcccccgggggcuacugccugacccgguggaugcugaucgaggccgagcucaagugcuucgggaacaccgccguggcgaagugcaacgagaagcacgacgaggaguucugcgacaugcugcgccuguucgacuucugcaagcaggccaucaagcggcucaagacgcccgcccagauguccauccagcugaucaacaaggccgugaacgcccugaucaacgaccagcucaucaugaagaaccaccuccgcgacaucaugggcauccccuacugcaacuacagccgguacugcuaccugaaccacaccgucaccgggaagaccucccugccccgcugcugccuggugagcaacggcuccuaccugaacgagacgcacuucagcgacgacaucgagcagcaggcggacaacaugaucaccgagaugcuccagaaggaguacauggaccggcagggcaagaccccgcuggggcugguggaccucuucgucuucuccaccagcuucuaccugaucuccaucuuccugcaccuggugaagaucccgacgcaccgccacaucgugggcaagcccugccccaagccccaccggcucaaccacauggggaucugcagcugcggccuguacaagcacccggggguccccgugaaguggaagcgcugaggacuagucccuguucccagagcccacuuuuuuuucuuuuuuugaaauaaaauagccugucuuucagaucucaaaggcucuuuucagagccaccaaaaaaaaaaaaaaaaaaaaaaaaaaaaaaaaaaaaaaaaaaaaaaaaaaaaaaaaaaaaaaaaagaauu

SEQ ID NO: 33672 - RNA, 1733 nt, Artificial Sequence
  mRNA product Design a-2 (hSL-A64-N5) comprising derived and/or modified sequence from LASV(GA391;Clade III)__CAA36645__GPCmut8 (opt1)
aggagaguccgcucagccagguugcagaagcggcuuagcguguguccuaaucuucucucugcguguagguaggccugugccgcaaacaagcuuaccaugggccagaucgugaccuucuuccaggaggucccccacgugaucgaggaggugaugaacaucguccugaucgcccucagcauccuggccauccugaaggggcucuacaacguggcgaccugcggccugaucgggcuggugacguuccuccugcuguccggccgcagcugcucccucaucuacaaggggaccuacgagcugcagacccuggagcucaacauggagacccugaacaugugcaugccgcugagcugcaccaagaacaacucccaccacuacauccgggucggcaacgagaccggccucgagcugacccugacgaacaccagcauccucaaccacaaguucugcaaccuguccgacgcccacaagcgcaaccuguacgaccacagccucauguccaucaucagcaccuuccaccuguccauccccaacuucaaccaguacgaggccaugagcugcgacuucaacgggggcaagaucaccgugcaguacaaccugucccacagcuucgccguggacgccgcggggcacugcggcacgcucgccaacgggguccugcagaccuucaugcggauggccuggggcggcuccuacaucgcccuggacagcgggcgcggcaacugggacugcaucaugaccuccuaccaguaccucaucauccagaacaccacgugggacgaccacugccaguucagccggcccucccccaucggguaccugggccugcucagccagcgcacccgggacaucuacaucagccgccggcugcugggcaccuucaccuggacgcucuccgacagcgaggggaacgagaccccgggcggguacugccugacccgcuggaugcugaucgaggcggagcucaagugcuucggcaacaccgccguggccaagugcaacgagaagcacgacgaggaguucugcgacaugcugcggcuguucgacuucugcaagcaggccauccgccggcucaagacgcccgcccagauguccauccagcugaucaacaaggcggugaacgcccugaucaacgaccagcucaucaugaagaaccaccuccgcgacaucauggggauccccuacugcaacuacagccgguacugcuaccugaaccacaccuccaccggcaagaccagccugccccgcugcugccugaucuccaacggcagcuaccugaacgagacgaaguucuccgacgacaucgagcagcaggccgacaacaugaucaccgagaugcuccagaaggaguacaucgaccggcaggggaagacgccccugggccuggucgaccuguucguguucagcaccuccuucuaccucaucagcaucuuccugcaccuggugaagaucccgacccaccgccacaucgucgggaagcccugccccaagccccaccggcucaaccacaugggcaucugcuccugcgggcuguacaagcagccgggcgugcccgugcgcuggaagcggugaggacuagucccuguucccagagcccacuuuuuuuucuuuuuuugaaauaaaauagccugucuuucagaucucaaaggcucuuuucagagccaccaaaaaaaaaaaaaaaaaaaaaaaaaaaaaaaaaaaaaaaaaaaaaaaaaaaaaaaaaaaaaaaaagaauu

SEQ ID NO: 33673 - RNA, 1736 nt, Artificial Sequence
  mRNA product Design a-2 (hSL-A64-N5) comprising derived and/or modified sequence from LASV(AV;Clade V)__CCA30314__GPCmut8 (opt1)
aggagaguccgcucagccagguugcagaagcggcuuagcguguguccuaaucuucucucugcguguagguaggccugugccgcaaacaagcuuaccaugggccagaucgugaccuucuuccaggaggucccccacgugaucgaggaggugaugaacaucguccugaucgcccucagcauccuggccgugcugaaggggcucuacaacaucgcgaccugcggccugaucgggcugaucacguuccuccugcugugcggccgcuccugcagcuccaaccucuacaaggggguguacgagcugcagagccuggaccucaacauggagacccugaacaugugcaugccgcuguccugcaccaagaacaacagccaccacuacauccgggucggcaacgacacgggccucgagcugacccugaccaacaccuccauccucaaccacaaguucugcaaccugagcgacgcccacaagaaggaccuguacgaccacgcccucauguccaucaucagcacguuccaccuguccauccccaacuucaaccaguacgaggccaugagcugcgacuucaacgggggcaagaucuccgugcaguacaaccugagccacuccuacgccaucgacgcggccaaccacugcgggaccguggccaacggcauccuccagaccuucaugcgcauggccuggggcgggagcuacaucgcgcuggacuccggccgggggaacugggacugcaucaugaccagcuaccaguaccugaucauccagaacacgaccugggagaaccacugccaguucucccgccccagccccaucggcuaccucgggcugcugagccagcggacccgcgacaucuacaucucccggcgccuccugggcaccuucacguggacccugagcgacuccgagggcaacgccacccccgggggcuacugccucacccgguggaugcugaucgaggccgagcugaagugcuucgggaacacggccgucgccaagugcaacgagaagcacgacgaggaguucugcgacaugcuccgccuguucgacuucugcaagcaggcgaucagccggcugaagucccccgcccagaugagcauccagcucaucaacaaggccgugaacgcccugaucaacgaccagcugaucaugaagaaccaccuccgcgacaucaugggcauccccuacugcaacuacuccaaguacugcuaccugaaccacaccaucaccgggaagaccagccugcccaagugcugccucguguccaacggcagcuaccugaacgagacgcacuucuccgacgacaucgagcagcaggccgacaacaugaucaccgagaugcugcagaaggaguacauggagcggcagggcaagaccccgcucgggcuggucgaccuguucguguucagcaccuccuucuaccugaucagcaucuuccuccgccuggugaagaucccgacgcaccggcacaucgucggcaagcccugccccaagccccaccgccugaaccacauggggaucugcuccugcggccucuacaagcagccgggggugcccgugcgguggaagcgcugaggacuagucccuguucccagagcccacuuuuuuuucuuuuuuugaaauaaaauagccugucuuucagaucucaaaggcucuuuucagagccaccaaaaaaaaaaaaaaaaaaaaaaaaaaaaaaaaaaaaaaaaaaaaaaaaaaaaaaaaaaaaaaaaagaauu

SEQ ID NO: 33674 - RNA, 1733 nt, Artificial Sequence
  mRNA product Design a-2 (hSL-A64-N5) comprising derived and/or modified sequence from LASV(Togo/2016/7082;Clade VI)__AMR44577__GPCmut8 (opt1)
aggagaguccgcucagccagguugcagaagcggcuuagcguguguccuaaucuucucucugcguguagguaggccugugccgcaaacaagcuuaccaugggccagaucaucaccuucuuccaggaggugccccacgucaucgaggaggugaugaacaucgugcugaucgcccucagccugcuggccauccucaagggggucuacaacguggcgaccugcggcaucaucgggcuggugacguuccuguuccucugcggccgcuccugcagccugaucuacaagggguccuacgagcugcagacccucgagcugaacauggagacccugaacaugugcaugccgcucagcugcacgaagaacuccagccaccacuacauccgggucggcaacgagaccggccuggagcugacccucaccaacacguccaucaucaaccacaaguucugcaaccugagcgacgcccacaagcgcaaccuguacgaccacgcccucauguccauccugagcaccuuccaccuguccauccccaacuucaaccaguacgaggccaugagcugcgacuucaacgggggcaagaucuccgugcaguacaaccucagccacgccuacgcgguggacgccgccgagcacugcgggaccgucgccaacggcgugcugcagaccuucaugcggauggcguggggcggguccuacaucgcccuggacagcggccgcgggaacugggacugcaucaugacguccuaccaguaccucaucauccagaacaccaccugggaggaccacugccaguucagccggcccucccccaucggcuaccuggggcugcucagccagcgcacccgggacaucuacaucagccgccggcugcugggcacguucaccuggacccucuccgacagcgagggcaacgagacccccgggggcuacugccugacgcgcuggaugcugaucgaggccgagcucaagugcuucgggaacaccgccguggccaagugcaacgagaagcacgacgaggaguucugcgacaugcugcggcuguucgacuucugcaagcaggcgauccagcgccucaagucccccgcccagaugagcauccagcugaucaacaaggccgucaacgcccugaucaacgaccagcucaucaugaagaaccaccuccgggacaugaugggcauccccuacugcaacuacuccaaguacugcuaccugaaccacaccagcuccgggcgcaccagccugcccaagugcugccugguguccaacggcagcuaccugaacgagacgcacuucuccgacgacaucgagcagcaggccgacaacaugaucaccgagaugcuccagaaggaguacaucgaccggcagggcaagaccccgcuggggcugguggaccucuucgucuucagcaccuccuucuaccugaucagcaucuuccugcaccugaucaagaucccgacgcaccgccacaucgugggcaagcccugccccaagccccaccggcucaaccacauggggaucugcuccugcggccuguacaagcagccgggggugcccacccgcuggaagcggugaggacuagucccuguucccagagcccacuuuuuuuucuuuuuuugaaauaaaauagccugucuuucagaucucaaaggcucuuuucagagccaccaaaaaaaaaaaaaaaaaaaaaaaaaaaaaaaaaaaaaaaaaaaaaaaaaaaaaaaaaaaaaaaaagaauu

SEQ ID NO: 33675 - RNA, 1733 nt, Artificial Sequence
  mRNA product Design a-2 (hSL-A64-N5) comprising derived and/or modified sequence from LASV(KAK-428;Clade n.d. (VII))__ANH09740__GPCmut8 (opt1)
aggagaguccgcucagccagguugcagaagcggcuuagcguguguccuaaucuucucucugcguguagguaggccugugccgcaaacaagcuuaccaugggccagaucgugaccuucuuccaggaggucccccacgugaucgaggaggugaugaacaucguccugaucgcccucagccugcuggccauccucaaggggcuguacaacuucgcgaccugcggcgugaucgggcugaucacguuccuccugcugugcggccgcuccugcagcgccaccuacaaggggcaguacgagcuccagacccuggagcugaacauggagucccucaacaugugcaugccgcugagcugcacgaagaacaacucccaccacuacauccgggccggcaacaacaccggccuggagcucacccugaccaacacgagcaucaucucccacaaguucugcaaccugagcgacgcccacaagaagaaccucuacgaccacacccugauguccaucaucaccaccuuccaccugagcauccccaacuucaaccaguacgaggccauguccugcgacuucaacgggggcaagaucagcauccaguacaaccucucccacagcuacgcgggggacgccgcccagcacugcggcacgguggccaacgggguccugcagaccuucaugcgcauggcguggggcggcuccuaccuggcccucgacagcgggcggcgcggcugggacugcaucaucuccagcuaccaguaccugaucauccagaacaccaccugggacgaccacugccaguucucccggcccagccccaucggguaccugggcuucgugagccagaagacgcgcgacaucuacaucucccggcgccuccugggcaccuucaccuggacccugagcgacuccgaggggcacgacaugccgggcggguacugccucacgcgguggaugcugaucgaggccgaccugaagugcuucggcaacaccgccguggccaagugcaacgagaagcacgacgaggaguucugcgacauguggcgccucuucgacuucugcaagcaggcgauccagcggcugaaggcccccgcccagaugaacauccagcugaucaacaaggccgucaacgcccucaucaacgaccagcugaugaugaagaaccaccuccgcgacaucauggggauccccuacugcaacuacagcaaguucugcuaccugaacaacaccaccacgggccggaccucccugccccgcugcugccugaucagcaacggcuccuaccucaacgagacccacuucagcgacgacaucgagcagcaggcggacaacaugaucaccgagaugcugcagaaggaguacauggaccggcaggggaagacgccccugggccucguggaccuguucguguucuccaccagcuucuaccugaucaccaucuuccuccaccuggucaagaucccgacccaccgccacaucguggggaagcccugccccaagccccaccggcugaaccacaugggcaucugcuccugcgggcuguacaagcagccgggcgugcccguccgcuggaagcggugaggacuagucccuguucccagagcccacuuuuuuuucuuuuuuugaaauaaaauagccugucuuucagaucucaaaggcucuuuucagagccaccaaaaaaaaaaaaaaaaaaaaaaaaaaaaaaaaaaaaaaaaaaaaaaaaaaaaaaaaaaaaaaaaagaauu

SEQ ID NO: 33676 - RNA, 1733 nt, Artificial Sequence; identical to SEQ ID NO: 33670
  mRNA product Design a-2 (hSL-A64-N5) comprising derived and/or modified sequence from LASV(Pinneo-NIG-1969;Clade I)__AIT17836__GPCmut8 (opt1)

SEQ ID NO: 33677 - RNA, 1733 nt, Artificial Sequence
  mRNA product Design a-2 (hSL-A64-N5) comprising derived and/or modified sequence from LASV(ISTH0009-NIG-2011;Clade II)__AIT17404__GPCmut8 (opt1)
aggagaguccgcucagccagguugcagaagcggcuuagcguguguccuaaucuucucucugcguguagguaggccugugccgcaaacaagcuuaccaugggccagaucaucaccuucuuccaggaggugccccacgucaucgaggaggugaugaacaucgugcugaucgcccucagccugcuggccauccucaaggggaucuacaacgucgcgaccugcggccuguucgggcugguguccuuccuccugcugugcggccgcagcugcuccacgaccuacaaggggguguacgagcuccagacccuggagcuggacauggccagccucaacaugugcaugccgcuguccugcacgaagaacaacagccaccacuacaucauggucggcaacgagaccggccuggagcucacccugaccaacacguccaucaucaaccacaaguucugcaaccugagcgacgcccacaagaagaaccucuacgaccacgcccugauguccaucaucagcaccuuccaccuguccauccccaacuucaaccaguacgaggccaugagcugcgacuucaacgggggcaagaucuccgugcaguacaaccucagccacgcguacgccguggacgccgccaaccacugcgggaccaucgcgaacggcguccugcagaccuucaugcggauggccuggggcggguccuacaucgcccuggacagcggcaagggguccugggacugcaucaugacgagcuaccaguaccucaucauccagaacaccaccugggaggaccacugccaguucucccgccccagccccaucggcuaccuggggcugcucagccagcggacccgcgacaucuacaucucccggcgccugcugggcacguucaccuggacccucagcgacuccgagggcaacgagacccccgggggcuacugccugacgcgguggaugcugaucgaggccgagcucaagugcuucgggaacaccgccguggcgaagugcaacgagaagcacgacgaggaguucugcgacaugcugcgccuguucgacuucugcaagcaggccauccggcgccucaagacccccgcccagaugagcauccagcugaucaacaaggccgugaacgcccugaucaacgaccagcucaucaugaagaaccaccuccgggacaucaugggcaucccguacugcaacuacuccaaguacugcuaccugaaccacaccgucacggggaagaccagccugccccgcugcugccugguguccaacggcagcuaccugaacgagacccacuucuccgacgacaucgagcagcaggcggacaacaugaucaccgagcuccugcagaaggaguacauggaccggcagggcaagacgccccuggggcucguggaccuguucgucuucagcaccuccuucuaccugaucagcaucuuccugcaccucaucaagaucccgacccaccgccacaucaccggcaagcccugccccaagccccaccggcugaaccacauggggaucugcuccugcggccuguacaagcacccgggggugcccgugaaguggaagcgcugaggacuagucccuguucccagagcccacuuuuuuuucuuuuuuugaaauaaaauagccugucuuucagaucucaaaggcucuuuucagagccaccaaaaaaaaaaaaaaaaaaaaaaaaaaaaaaaaaaaaaaaaaaaaaaaaaaaaaaaaaaaaaaaaagaauu

SEQ ID NO: 33678 - RNA, 1733 nt, Artificial Sequence
  mRNA product Design a-2 (hSL-A64-N5) comprising derived and/or modified sequence from LASV(ISTH2010-NIG-2012;Clade II)__AIT17482__GPCmut8 (opt1)
aggagaguccgcucagccagguugcagaagcggcuuagcguguguccuaaucuucucucugcguguagguaggccugugccgcaaacaagcuuaccaugggccagaucaucaccuucuuccaggaggugccccacgucaucgaggaggugaugaacaucgugcugaucgcccucagccugcuggccauccucaaggggaucuacaacgucgcgaccugcggccuguucgggcugguguccuuccuccugcugugcggccgcagcugcuccacgaccuacaaggggguguacgagcuccagacccuggagcuggacauggccagccucaacaugugcaugccgcuguccugcacgaagaacaacagccaccacuacaucauggucggcaacgagaccggccuggagcucacccugaccaacacguccaucaucaaccacaaguucugcaaccugagcgacgcccacaagaagaaccucuacgaccacgcccugauguccaucaucagcaccuuccaccuguccauccccaacuucaaccaguacgaggccaugagcugcgacuucaacgggggcaagaucuccgugcaguacaaccucagccacgcguacgccguggacgccgccaaccacugcgggaccaucgcgaacggcguccugcagaccuucaugcggauggccuggggcggguccuacaucgcccuggacagcggcaagggguccugggacugcaucaugacgagcuaccaguaccucaucauccagaacaucaccugggaggaccacugccaguucucccgccccagccccaucggcuaccuggggcugcucagccagcggacccgcgacaucuacaucucccggcgccugcugggcaccuucacguggacccucagcgacuccgagggcaacgagacccccgggggcuacugccugacccgguggaugcugaucgaggccgagcucaagugcuucgggaacacggccguggcgaagugcaacgagaagcacgacgaggaguucugcgacaugcugcgccuguucgacuucugcaagcaggccauccggcgccucaagacccccgcccagaugagcauccagcugaucaacaaggccgugaacgcccugaucaacgaccagcucaucaugaagaaccaccuccgggacaucaugggcauccccuacugcaacuacuccaaguacugcuaccugaaccacaccgucaccgggaagacgagccugccccgcugcugccugguguccaacggcagcuaccugaacgagacccacuucuccgacgacaucgagcagcaggcggacaacaugaucaccgagcuccugcagaaggaguacaucgaccggcagggcaagaccccgcuggggcucguggaccuguucgucuucagcacguccuucuaccugaucagcaucuuccugcaccucgugaagaucccgacccaccgccacguggucggcaagcccugccccaagccccaccggcugaaccacauggggaucugcuccugcggccuguacaagcacccgggggugcccgugaaguggaagcgcugaggacuagucccuguucccagagcccacuuuuuuuucuuuuuuugaaauaaaauagccugucuuucagaucucaaaggcucuuuucagagccaccaaaaaaaaaaaaaaaaaaaaaaaaaaaaaaaaaaaaaaaaaaaaaaaaaaaaaaaaaaaaaaaaagaauu

SEQ ID NO: 33679 - RNA, 1733 nt, Artificial Sequence
  mRNA product Design a-2 (hSL-A64-N5) comprising derived and/or modified sequence from LASV(Lassa virus/H.sapiens-wt/NGA/2015/ISTH_0543;Clade II)__AVO03639__GPCmut8 (opt1)
aggagaguccgcucagccagguugcagaagcggcuuagcguguguccuaaucuucucucugcguguagguaggccugugccgcaaacaagcuuaccaugggccagaucaucaccuucuuccaggaggugccccacgucaucgaggaggugaugaacaucgugcugaucgcccucagccugcuggccauccucaaggggaucuacaacgucgcgaccugcggccuguucgggcugguguccuuccuccugcugugcggccgcagcugcuccacgaccuacaaggggguguacgagcuccagacccuggagcuggacauggccaaccucaacaugugcaugccgcugagcugcacgaagaacaacucccaccacuacaucauggucggcaacgagaccggccuggagcucacccugaccaacacgagcaucaucaaccacaaguucugcaaccuguccgacgcccacaagaagaaccucuacgaccacgcccugaugagcaucaucuccaccuuccaccugagcauccccaacuucaaccaguacgaggccauguccugcgacuucaacgggggcaagaucagcgugcaguacaaccucucccacaccuacgcgguggacgccgccaaccacugcgggaccaucgccaacggcguccugcagacguucaugcggauggcguggggcgggagcuacaucgcccuggacuccggcaaggggagcugggacugcaucaugaccuccuaccaguaccucgugauccagaacaccaccugggaggaccacugccaguucagccgccccucccccaucggcuaccuggggcugcucagccagcggacgcgcgacaucuacaucagccggcgccugcugggcaccuucaccuggacccucuccgacagcgagggcaacgagacgcccgggggcuacugccugacccgguggaugcugaucgaggccgagcucaagugcuucgggaacaccgccguggccaagugcaacgagaagcacgacgaggaguucugcgacaugcugcgccuguucgacuucugcaagcaggcgauccggcgccucaagacccccgcccagauguccauccagcugaucaacaaggccgucaacgcccugaucaacgaccagcucaucaugaagaaccaccuccgggacaucaugggcauccccuacugcaacuacagcaaguacugcuaccugaaccacacggugaccgggaagaccucccugccccgcugcugccuggugagcaacggcuccuaccugaacgagacccacuucagcgacgacaucgagcagcaggccgacaacaugaucacggagcuccugcagaaggaguacaucgaccggcagggcaagaccccgcuggggcucgucgaccuguucguguucuccaccagcuucuaccugaucuccaucuuccugcaccucgugaagaucccgacccaccgccacaucacgggcaagcccugccccaagccccaccggcugaaccacauggggaucugcagcugcggccuguacaagcacccggggguccccgugaaguggaagcgcugaggacuagucccuguucccagagcccacuuuuuuuucuuuuuuugaaauaaaauagccugucuuucagaucucaaaggcucuuuucagagccaccaaaaaaaaaaaaaaaaaaaaaaaaaaaaaaaaaaaaaaaaaaaaaaaaaaaaaaaaaaaaaaaaagaauu

SEQ ID NO: 33680 - RNA, 1733 nt, Artificial Sequence
  mRNA product Design a-2 (hSL-A64-N5) comprising derived and/or modified sequence from LASV(Lassa virus/H.sapiens-wt/NGA/2016/ISTH_0009;Clade II)__AVO03571__GPCmut8 (opt1)
aggagaguccgcucagccagguugcagaagcggcuuagcguguguccuaaucuucucucugcguguagguaggccugugccgcaaacaagcuuaccaugggccagaucaucaccuucuuccaggaggugccccacgucaucgaggaggugaugaacaucgugcugaucgcccucagccugcuggccauccucaaggggaucuacaacgucgcgaccugcggccugcuggggcucguguccuuccugcugcucugcggccgcagcugcuccacgaccuacaaggggguguacgagcugcagacccuggagcucgacauggccagccugaacaugugcaugccgcuguccugcacgaagaacaacagccaccacuacaucauggucggcaacgagaccggccucgagcugacccugaccaacacguccaucaucaaccacaaguucugcaaccucagcgacgcccacaagaagaaccuguacgaccacgcccugauguccaucaucagcaccuuccaccucuccauccccaacuucaaccaguacgaggccaugagcugcgacuucaacgggggccggaucuccgugcaguacaaccugagccacuccuacgcgguggacgccgccaaccacugcgggaccaucgccaacggcguccugcagaccuucaugcgcauggcguggggcgggagcuacaucgcccucgacuccggcaaggggagcugggacugcaucaugacguccuaccaguaccugaucauccagaacaccaccugggaggaccacugccaguucagccggcccagccccaucggcuaccuggggcuccugucccagcgcacccgggacaucuacaucagccgccggcugcucggcacguucaccuggacccuguccgacagcgagggcaacgagacccccgggggcuacugccugacgcgcuggaugcucaucgaggccgagcugaagugcuucgggaacaccgccguggccaagugcaacgagaagcacgacgaggaguucugcgacaugcugcggcuguucgacuucugcaagcaggcgauccgccggcugaagacccccgcccagauguccauccagcugaucaacaaggccgugaacgcccucaucaacgaccagcugaucaugaagaaccaccuccgcgacaucaugggcaucccguacugcaacuacagcaaguacugcuaccucaaccacaccgucacggggaagaccucccugccccggugcugccuggugagcaacggcuccuaccucaacgagacccacuucagcgacgacaucgagcagcaggccgacaacaugaucaccgagcugcugcagaaggaguacaucgaccgccagggcaagacgccccucgggcugguggaccuguucgucuucuccaccagcuucuaccugaucuccaucuuccuccaccuggugaagaucccgacccaccggcacaucaccggcaagcccugccccaagccccaccgccugaaccacauggggaucugcagcugcggccucuacaaccacccgggggugcccgucaaguggaagcggugaggacuagucccuguucccagagcccacuuuuuuuucuuuuuuugaaauaaaauagccugucuuucagaucucaaaggcucuuuucagagccaccaaaaaaaaaaaaaaaaaaaaaaaaaaaaaaaaaaaaaaaaaaaaaaaaaaaaaaaaaaaaaaaaagaauu

SEQ ID NO: 33681 - RNA, 1733 nt, Artificial Sequence
  mRNA product Design a-2 (hSL-A64-N5) comprising derived and/or modified sequence from LASV(Lassa virus/H.sapiens-wt/NGA/2016/ISTH_0017;Clade II)__AVO03567__GPCmut8 (opt1)
aggagaguccgcucagccagguugcagaagcggcuuagcguguguccuaaucuucucucugcguguagguaggccugugccgcaaacaagcuuaccaugggccagaucaucaccuucuuccaggaggugccccacgucaucgaggaggugaugaacaucgugcugaucgcccucagccugcuggccauccucaaggggaucuacaacgucgcgaccugcggccuguucgggcugguguccuuccuccugcugugcggccgcagcugcuccacgaccuacaaggggguguacgagcuccagacccuggagcuggacauggccagccucaacaugugcaugccgcuguccugcacgaagaacaacagccaccacuacaucauggucggcaacgagaccggccuggagcucacccugaccaacacguccaucaucaaccacaaguucugcaaccugagcgacgcccacaagaagaaccucuacgaccacgcccugauguccaucaucagcaccuuccaccuguccauccccaacuucaaccaguacgaggccaugagcugcgacuucaacgggggcaagaucuccgugcaguacaaccucagccacaccuacgcgaucgacgccgccaaccacugcgggaccaucgccaacggcgugcugcagacguucaugcggauggcguggggcggguccuacaucgcccuggacagcggcaagggguccugggacugcaucaugaccagcuaccaguaccucaucauccagaacaccaccugggaggaccacugccaguucucccgccccagccccaucggcuaccuggggcugcucagccagcggacgcgcgacaucuacaucucccggcgccugcugggcaccuucaccuggacccucagcgacuccgagggcaacgagacgcccgggggcuacugccugacccgguggaugcugaucgaggccgagcucaagugcuucgggaacaccgccgucgccaagugcaacgagaagcacgacgaggaguucugcgacaugcugcgccuguucgacuucugcaagcaggcgauccggcgccucaagacccccgcccagaugagcauccagcugaucaacaaggccgugaacgcccugaucaacgaccagcucaucaugaagaaccaccuccgggacaucaugggcauccccuacugcaacuacuccaaguacugcuaccugaaccacacggugaccgggaagaccagccugccccgcugcugccuggucuccaacggcagcuaccugaacgagacccacuucuccgacgacaucgagcagcaggccgacaacaugaucacggagcuccugcagaaggaguacauggaccggcagggcaagaccccgcuggggcucguggaccuguucguguucagcaccuccuucuaccugaucagcaucuuccugcaccucguccgcaucccgacccaccggcacgugaucggcaagcccugccccaagccccaccgccugaaccacauggggaucugcuccugcggccuguacaagcacccgggggugcccgucaaguggaagcggugaggacuagucccuguucccagagcccacuuuuuuuucuuuuuuugaaauaaaauagccugucuuucagaucucaaaggcucuuuucagagccaccaaaaaaaaaaaaaaaaaaaaaaaaaaaaaaaaaaaaaaaaaaaaaaaaaaaaaaaaaaaaaaaaagaauu

SEQ ID NO: 33682 - RNA, 1733 nt, Artificial Sequence
  mRNA product Design a-2 (hSL-A64-N5) comprising derived and/or modified sequence from LASV(Lassa virus/H.sapiens-wt/NGA/2018/ISTH_0959;Clade II)__AVV65099__GPCmut8 (opt1)
aggagaguccgcucagccagguugcagaagcggcuuagcguguguccuaaucuucucucugcguguagguaggccugugccgcaaacaagcuuaccaugggccagaucaucaccuucuuccaggaggugccccacgucaucgaggaggugaugaacaucgugcugaucgcccucagccugcuggccauccucaaggggaucuacaacgucgugaccugcggccuguucgggcugguguccuuccuccugcugugcggccgcagcugcuccacgaccuacaagggggucuacgagcuccagacccuggagcuggacauggcgagccucaacaugugcaugccgcuguccugcacgaagaacaacagccaccacuacaucauggugggcaacgagaccggccuggagcucacccugaccaacacguccaucaucaaccacaaguucugcaaccugagcgacgcccacaagaagaaccucuacgaccacgcccugauguccaucaucagcaccuuccaccuguccauccccaacuucaaccaguacgaggccaugagcugcgacuucaacgggggcaagaucuccgugcaguacaaccucagccacgccuacgcgaucgacgccgccaaccacugcgggaccaucgccaacggcguccugcagaccuucaugcggauggcguggggcggguccuacaucgcccuggacagcggcaagggguccugggacugcaucaugacgagcuaccaguaccucaucauccagaacaccaccugggaggaccacugccaguucucccgccccagccccaucggcuaccuggggcugcucagccagcggacccgcgacaucuacaucucccggcgccugcugggcacguucaccuggacccucagcgacuccgagggcaacgagacccccgggggcuacugccugacgcgguggaugcugaucgaggccgagcucaagugcuucgggaacaccgccguggccaagugcaacgagaagcacgacgaggaguucugcgacaugcugcgccuguucgacuucugcaagcaggcgauccggcgccucaagacccccgcccagaugagcauccagcugaucaacaaggccgugaacgcccugaucaacgaccagcucaucaugaagaaccaccuccgggacaucaugggcaucccguacugcaacuacuccaaguacugcuaccugaaccacaccgucacggggaagaccagccugccccgcugcugccugguguccaacggcagcuaccugaacgagacccacuucuccgacgacaucgagcagcaggccgacaacaugaucaccgagcuccugcagaaggaguacaucgaccggcagggcaagacgccccuggggcucguggaccuguucgucuucagcaccuccuucuaccugaucagcaucuuccugcaccucgugaagaucccgacccaccgccacgugaucggcaagcccugccccaagccccaccggcugaaccacauggggaucugcuccugcggccuguacaagcacccggggguccccgugaaguggaagcgcugaggacuagucccuguucccagagcccacuuuuuuuucuuuuuuugaaauaaaauagccugucuuucagaucucaaaggcucuuuucagagccaccaaaaaaaaaaaaaaaaaaaaaaaaaaaaaaaaaaaaaaaaaaaaaaaaaaaaaaaaaaaaaaaaagaauu

SEQ ID NO: 33683 - RNA, 1733 nt, Artificial Sequence
  mRNA product Design a-2 (hSL-A64-N5) comprising derived and/or modified sequence from LASV(LASV003-NIG-2008;Clade II)__AIT17580__GPCmut8 (opt1)
aggagaguccgcucagccagguugcagaagcggcuuagcguguguccuaaucuucucucugcguguagguaggccugugccgcaaacaagcuuaccaugggccagaucaucaccuucuuccaggaggugccccacgucaucgaggaggugaugaacaucgugcugaucgcccucagccugcuggccauccucaaggggaucuacaacgucgcgaccugcggccuguucgggcugguguccuuccuccugcugugcggccgcagcugcuccacgaccuacaaggggguguacgagcuccagacccuggagcuggacauggccagccucaacaugugcaugccgcuguccugcacgaagaacaacagccaccacuacaucauggucggcaacgagaccggccuggagcucacccugaccaacacguccaucaucaaccacaaguucugcaaccugagcgacgcccacaagaagaaccucuacgaccacgcccugauguccaucaucagcaccuuccaccuguccauccccaacuucaaccaguacgaggccaugagcugcgacuucaacgggggcaagaucuccgugcaguacaaccucagccacaccuacgcgguggacgccgccaaccacugcgggaccaucgccaacggcguccugcagacguucaugcggauggcguggggcggguccuacaucgcccuggacagcggcaagggguccugggacugcaucaugaccagcuaccaguaccucaucauccagaacaccaccugggaggaccacugccaguucucccgccccagccccaucggcuaccuggggcugcucagccagcggacgcgcgacaucuacaucucccggcgccugcugggcaccuucaccuggacccucagcgacuccgagagcaacgagacgccgggcggguacugccugacccgguggaugcugaucgaggccgagcucaagugcuucggcaacaccgccguggccaagugcaacgagaagcacgacgaggaguucugcgacaugcugcgccuguucgacuucugcaagcaggcgauccggcgccucaaggcccccgcccagauguccauccagcugaucaacaaggccgugaacgcccugaucaacgaccagcucaucaugaagaaccaccuccgggacaucauggggauccccuacugcaacuacagcaaguacugcuaccugaaccacaccgucacgggccgcaccucccugccccggugcugccuggugagcaacggguccuaccugaacgagacccacuucagcgacgacaucgagcagcaggcggacaacaugaucaccgagcuccugcagaaggaguacauggaccgccagggcaagacgccccugggccucguggaccuguucgucuucuccaccagcuucuaccugaucuccaucuuccugcaccucgugaagaucccgacccaccggcacgugaucgggaagcccugccccaagccccaccgccugaaccacaugggcaucugcagcugcgggcuguacaagcacccgggcguccccgugaaguggaagcggugaggacuagucccuguucccagagcccacuuuuuuuucuuuuuuugaaauaaaauagccugucuuucagaucucaaaggcucuuuucagagccaccaaaaaaaaaaaaaaaaaaaaaaaaaaaaaaaaaaaaaaaaaaaaaaaaaaaaaaaaaaaaaaaaagaauu

SEQ ID NO: 33684 - RNA, 1733 nt, Artificial Sequence
  mRNA product Design a-2 (hSL-A64-N5) comprising derived and/or modified sequence from LASV(LASV035-NIG-2009;Clade II)__AIT17588__GPCmut8 (opt1)
aggagaguccgcucagccagguugcagaagcggcuuagcguguguccuaaucuucucucugcguguagguaggccugugccgcaaacaagcuuaccaugggccagaucaucaccuucuuccaggaggugccccacgucaucgaggaggugaugaacaucgugcugaucgcccucagccugcuggccauccucaaggggaucuacaacgucgcgaccugcggccuguucgggcugguguccuuccuccugcugugcggccgcagcugcuccacgaccuacaaggggguguacgagcuccagacccuggagcuggacauggccagccucaacaugugcaugccgcuguccugcacgaagaacaacagccaccacuacaucauggucggcaacgagaccggccuggagcucacccugaccaacacguccaucaucaaccacaaguucugcaaccugagcgacgcccacaagaagaaccucuacgaccacgcccugauguccaucaucagcaccuuccaccuguccauccccaacuucaaccaguacgaggccaugagcugcgacuucaacgggggcaagaucuccgugcaguacaaccucagccacgcguacgccguggacgccgccaaccacugcgggaccaucgcgaacggcguccugcagaccuucaugcggauggccuggggcggguccuacaucgcccuggacagcggcaagggguccugggacugcaucaugacgagcuaccaguaccucaucauccagaacaccaccugggaggaccacugccaguucucccgccccagccccaucggcuaccuggggcugcucagccagcggacccgcgacaucuacaucucccggcgccugcugggcacguucaccuggacccucagcgacuccgagggcaacgagacccccgggggcuacugccugacgcgguggaugcugaucgaggccgagcucaagugcuucgggaacaccgccguggcgaagugcaacgagaagcacgacgaggaguucugcgacaugcugcgccuguucgacuucugcaagcaggccauccggcgccucaaggcccccgcccagaugagcauccagcugaucaacaaggccgugaacgcgcugaucaacgaccagcucaucaugaagaaccaccuccgggacaucaugggcauccccuacugcaacuacuccaaguacugcuaccugaaccacaccgucaccgggaagacgagccugccccgcugcugccugguguccaacggcagcuaccugaacgagacccacuucuccgacgacaucgagcagcaggccgacaacaugaucaccgagcuccugcagaaggaguacaucgaccggcagggcaagaccccgcuggggcucguggaccuguucgucuucagcacguccuucuaccugaucagcaucuuccugcaccucgugaagaucccgacccaccgccacgugaucggcaagcccugccccaagccccaccggcugaaccacauggggaucugcuccugcggccuguacaagcacccggggguccccgugaaguggaagcgcugaggacuagucccuguucccagagcccacuuuuuuuucuuuuuuugaaauaaaauagccugucuuucagaucucaaaggcucuuuucagagccaccaaaaaaaaaaaaaaaaaaaaaaaaaaaaaaaaaaaaaaaaaaaaaaaaaaaaaaaaaaaaaaaaagaauu

SEQ ID NO: 33685 - RNA, 1733 nt, Artificial Sequence
  mRNA product Design a-2 (hSL-A64-N5) comprising derived and/or modified sequence from LASV(LASV1000-NIG-2009;Clade II)__AIT17782__GPCmut8 (opt1)
aggagaguccgcucagccagguugcagaagcggcuuagcguguguccuaaucuucucucugcguguagguaggccugugccgcaaacaagcuuaccaugggccagaucaucaccuucuuccaggaggugccccacgucaucgaggaggugaugaacaucgugcugaucgcccucagccugcuggccauccucaaggggaucuacaacgucgcgaccugcggccuguucgggcugguguccuuccuccugcugugcggccgcagcugcuccacgaccuacaaggggguguacgagcuccagacccuggagcuggacauggccagccucaacaugugcaugccgcuguccugcacgaagaacaacagccaccacuacaucauggucggcaacgagaccggccuggagcucacccugaccaacacguccaucaucaaccacaaguucugcaaccugagcgacgcccacaagaagaaccucuacgaccacgcccugauguccaucaucagcaccuuccaccuguccauccccaacuucaaccaguacgaggccaugagcugcgacuucaacgggggcaagaucuccgugcaguacaaccucagccacaccuacgcgguggacgccgccaaccacugcgggaccaucgccaacggcguccugcagacguucaugcggauggcguggggcggguccuacaucgcccuggacagcggcaagggguccugggacugcaucaugaccagcuaccaguaccucaucauccagaacaccaccugggaggaccacugccaguucucccgccccagccccaucggcuaccuggggcugcucagccagcggacgcgcgacaucuacaucucccggcgccugcugggcaccuucaccuggacccucagcgacuccgagggcaacgagacgcccgggggcuacugccugacccgguggaugcugaucgaggccgagcucaagugcuucgggaacaccgccguggccaagugcaacgagaagcacgacgaggaguucugcgacaugcugcgccuguucgacuucugcaagcaggcgaucaagcggcucaagacccccgcccagaugagcauccagcugaucaacaaggccgugaacgcccugaucaacgaccagcucaucaugaagaaccaccuccgcgacaucaugggcauccccuacugcaacuacuccaaguacugcuaccugaaccacacggucaccgggaagaccagccugccccggugcugccugguguccaacggcagcuaccugaacgagacccacuucuccgacgacaucgagcagcaggccgacaacaugaucacggagcuccugcagaaggaguacaucgaccgccagggcaagaccccgcuggggcucguggaccuguucgucuucagcaccuccuucuaccugaucagcaucuuccugcaccucgugaagaucccgacccaccggcacguggucggcaagcccugccccaagccccaccgccugaaccacauggggaucugcuccugcggccuguacaagcacccgggggugcccgugaaguggaagcggugaggacuagucccuguucccagagcccacuuuuuuuucuuuuuuugaaauaaaauagccugucuuucagaucucaaaggcucuuuucagagccaccaaaaaaaaaaaaaaaaaaaaaaaaaaaaaaaaaaaaaaaaaaaaaaaaaaaaaaaaaaaaaaaaagaauu

SEQ ID NO: 33686 - RNA, 1733 nt, Artificial Sequence
  mRNA product Design a-2 (hSL-A64-N5) comprising derived and/or modified sequence from LASV(LASV221-NIG-2010;Clade II)__AIT17624__GPCmut8 (opt1)
aggagaguccgcucagccagguugcagaagcggcuuagcguguguccuaaucuucucucugcguguagguaggccugugccgcaaacaagcuuaccaugggccagaucaucaccuucuuccaggaggugccccacgucaucgaggaggugaugaacaucgugcugaucgcccucagccugcuggccauccucaaggggaucuacaacgucgcgaccugcggccuguucgggcugguguccuuccuccugcugugcggccgcagcugcuccacgaccuacaaggggguguacgagcuccagacccuggagcuggacauggccagccucaacaugugcaugccgcuguccugcacgaagaacaacagccaccacuacaucauggucggcaacgagaccggccuggagcucacccugaccaacacguccaucaucaaccacaaguucugcaaccugagcgacgcccacaagaagaaccucuacgaccacgcccugauguccaucaucagcaccuuccaccuguccauccccaacuucaaccaguacgaggccaugagcugcgacuucaacgggggcaagaucuccgugcaguacaaccucagccacaccuacgcgaucgacgccgccaaccacugcgggaccaucgccaacggcgugcugcagacguucaugcggauggcguggggcggguccuacaucgcccuggacagcggcaagggguccugggacugcaucaugaccagcuaccaguaccucaucauccagaacaccaccugggaggaccacugccaguucucccgccccagccccaucggcuaccuggggcugcucagccagcggacgcgcgacaucuacaucucccggcgccugcugggcaccuucaccuggacccucagcgacuccgagggcaacgagacgcccgggggcuacugccugacccgguggaugcugaucgaggccgagcucaagugcuucgggaacaccgccgucgccaagugcaacgagaagcacgacgaggaguucugcgacaugcugcgccuguucgacuucugcaagcaggcgauccggcgccucaagacccccgcccagaugagcauccagcugaucaacaaggccgugaacgcccugaucaacgaccagcucaucaugaagaaccaccuccgggacaucaugggcauccccuacugcaacuacuccaaguacugcuaccugaaccacacggugaccgggaagaccagccugccccgcugcugccuggucuccaacggcagcuaccugaacgagacccacuucuccgacgacaucgagcagcaggccgacaacaugaucacggagaugcuccagaaggaguacauggaccggcagggcaagaccccgcuggggcugguggaccucuucguguucagcaccuccuucuaccugaucagcaucuuccugcaccuggucaagaucccgacccaccgccacgugaucggcaagcccugccccaagccccaccggcucaaccacauggggaucugcuccugcggccuguacaagcacccgggggugcccgucaaguggaagcgcugaggacuagucccuguucccagagcccacuuuuuuuucuuuuuuugaaauaaaauagccugucuuucagaucucaaaggcucuuuucagagccaccaaaaaaaaaaaaaaaaaaaaaaaaaaaaaaaaaaaaaaaaaaaaaaaaaaaaaaaaaaaaaaaaagaauu

SEQ ID NO: 33687 - RNA, 1733 nt, Artificial Sequence
  mRNA product Design a-2 (hSL-A64-N5) comprising derived and/or modified sequence from LASV(LASV237-NIG-2010;Clade II)__AIT17638__GPCmut8 (opt1)
aggagaguccgcucagccagguugcagaagcggcuuagcguguguccuaaucuucucucugcguguagguaggccugugccgcaaacaagcuuaccaugggccagaucaucaccuucuuccaggaggugccccacgucaucgaggaggugaugaacaucgugcugaucgcccucagccugcuggccauccucaaggggaucuacaacgucgcgaccugcggccuguucgggcugguguccuuccuccugcugugcggccgcagcugcuccacgaccuacaaggggguguacgagcuccagacccuggagcuggacauggccagccucaacaugugcaugccgcuguccugcacgaagaacaacagccaccacuacaucauggucggcaacgagaccggccuggagcucacccugaccaacacguccaucaucaaccacaaguucugcaaccugagcgacgcccacaagaaggaccucuacgaccacgcccugauguccaucaucagcaccuuccaccuguccauccccaacuucaaccaguacgaggccaugagcugcgacuucaacgggggcaagaucuccgugcaguacaaccucagccacaccuacgcgguggacgccgccaaccacugcgggaccaucgccaacggcguccugcagacguucaugcggauggcguggggcggguccuacaucgcccuggacagcggcaagggguccugggacugcaucaugaccagcuaccaguaccucaucauccagaacaccaccugggaggaccacugccaguucucccgccccagccccaucggcuaccuggggcugcucagccagcggacgcgcgacaucuacaucucccggcgccugcugggcaccuucaccuggacccucagcgacuccgagggcaacgagacgcccgggggcuacugccugacccgguggaugcugaucgaggccgagcucaagugcuucgggaacaccgccguggccaagugcaacgagaagcacgacgaggaguucugcgacaugcugcgccuguucgacuucugcaagcaggcgauccggcgccucaagacccccgcccagaugagcauccagcugaucaacaaggccgugaacgcccugaucaacgaccagcucaucaugaagaaccaccuccgggacaucaugggcauccccuacugcaacuacuccaaguacugcuaccugaaccacacggucaccgggaagaccagccugccccgcugcugccugguguccaacggcagcuaccugaacgagacccacuucuccgacgacaucgagcagcaggccgacaacaugaucacggagcuccugcagaaggaguacauggaccggcagggcaagaccccgcuggggcucguggaccuguucgucuucagcaccuccuucuaccugaucagcaucuuccugcaccucaucaagaucccgacccaccgccacaucacgggcaagcccugccccaagccccaccggcugaaccacauggggaucugcuccugcggccuguacaagcacccgggggugcccgugaaguggaagcgcugaggacuagucccuguucccagagcccacuuuuuuuucuuuuuuugaaauaaaauagccugucuuucagaucucaaaggcucuuuucagagccaccaaaaaaaaaaaaaaaaaaaaaaaaaaaaaaaaaaaaaaaaaaaaaaaaaaaaaaaaaaaaaaaaagaauu

SEQ ID NO: 33688 - RNA, 1733 nt, Artificial Sequence
  mRNA product Design a-2 (hSL-A64-N5) comprising derived and/or modified sequence from LASV(LASV253-NIG-2011;Clade II)__AIT17670__GPCmut8 (opt1)
aggagaguccgcucagccagguugcagaagcggcuuagcguguguccuaaucuucucucugcguguagguaggccugugccgcaaacaagcuuaccaugggccagaucaucaccuucuuccaggaggugccccacgucaucgaggaggugaugaacaucgugcugaucgcccucagccugcuggccauccucaaggggaucuacaacgucgcgaccugcggccuguucgggcugguguccuuccuccugcugugcggccgcagcugcuccacgaccuacaaggggguguacgagcuccagacccuggagcuggacauggccagccucaacaugugcaugccgcuguccugcacgaagaacaacagccaccacuacaucauggucggcaacgagaccggccuggagcucacccugaccaacacguccaucaucaaccacaaguucugcaaccugagcgacgcccacaagaagaaccucuacgaccacgcccugauguccaucaucagcaccuuccaccuguccauccccaacuucaaccaguacgaggccaugagcugcgacuucaacgggggcaagaucuccgugcaguacaaccucagccacaccuacgcgguggacgccgccaaccacugcgggaccaucgccaacggcguccugcagacguucaugcggauggcguggggcggguccuacaucgcccuggacagcggcaagggguccugggacugcaucaugaccagcuaccaguaccucaucauccagaacaccaccugggaggaccacugccaguucucccgccccagccccaucggcuaccuggggcugcucagccagcggacgcgcgacaucuacaucucccggcgccugcugggcaccuucaccuggacccucagcgacuccgagggcaacgagacgcccgggggcuacugccugacccgguggaugcugaucgaggccgagcucaagugcuucgggaacaccgccguggccaagugcaacgagaagcacgacgaggaguucugcgacaugcugcgccuguucgacuucugcaagcaggcgauccggcgccucaaggcccccgcccagaugagcauccagcugaucaacaaggccgugaacgcccugaucaacgaccagcucaucaugaagaaccaccuccgggacaucaugggcaucccguacugcaacuacuccaaguacugcuaccugaaccacaccgucacggggcgcaccagccugccccggugcugccugguguccaacggcagcuaccugaacgagacccacuucuccgacgacaucgagcagcaggcggacaacaugaucaccgagcuccugcagaaggaguacaucgaccgccagggcaagacgccccuggggcucguggaccuguucgucuucagcaccuccuucuaccugaucagcaucuuccugcaccucgugaagaucccgacccaccggcacaucaucggcaagcccugccccaagccccaccgccugaaccacauggggaucugcuccugcggccuguacaagcacccgggggugcccgucaaguggaagcggugaggacuagucccuguucccagagcccacuuuuuuuucuuuuuuugaaauaaaauagccugucuuucagaucucaaaggcucuuuucagagccaccaaaaaaaaaaaaaaaaaaaaaaaaaaaaaaaaaaaaaaaaaaaaaaaaaaaaaaaaaaaaaaaaagaauu

SEQ ID NO: 33689 - RNA, 1733 nt, Artificial Sequence
  mRNA product Design a-2 (hSL-A64-N5) comprising derived and/or modified sequence from LASV(LASV254-NIG-2011;Clade II)__AIT17674__GPCmut8 (opt1)
aggagaguccgcucagccagguugcagaagcggcuuagcguguguccuaaucuucucucugcguguagguaggccugugccgcaaacaagcuuaccaugggccagaucaucaccuucuuccaggaggugccccacgucaucgaggaggugaugaacaucgugcugaucgcccucagccugcuggccauccucaaggggaucuacaacgucgcgaccugcggccuguucgggcugguguccuuccuccugcugugcggccgcagcugcuccacgaccuacaaggggguguacgagcuccagacccuggagcuggacaugaccaaccucaacaugugcaugccgcugagcugcaccaagaacaacucccaccacuacaucauggucggcaacgagaccggccuggagcucacccugacgaacaccagcaucaucaaccacaaguucugcaaccuguccgacgcccacaagaagaaccucuacaaccacgcccugaugagcaucaucuccaccuuccaccugagcauccccaacuucaaccaguacgaggccauguccugcgacuucaacgggggcaagaucagcgugcaguacaaccucucccacagcuacgccguggacgcggccaaccacugcgggaccaucgccaacggcguccugcagacguucaugcggauggccuggggcggguccuacaucgcgcuggacagcggcaaggggaacugggacugcaucaugaccuccuaccaguaccucaucauccagaacaccaccugggaggaccacugccaguucagccgccccucccccaucggcuaccuggggcugcucagccagcggacgcgcgacaucuacaucagccggcgccugcugggcaccuucaccuggacccucuccgacagcgagggcaacgagacgcccgggggcuacugccugacccgguggaugcugaucgaggccgagcucaagugcuucgggaacaccgccguggccaagugcaacgagaagcacgacgaggaguucugcgacaugcugcgccuguucgacuucugcaagcaggccauccggcgccucaagacccccgcgcaggccaacauccagcugaucaacaaggccgugaacgcccugaucaacgaccagcucaucaugaagaaccaccuccgggacaucaugggcauccccuacugcaacuacuccaaguacugcuaccugaaccacacggucaccgggaagaccagccugccccgcugcugccugguguccaacggcagcuaccugaacgagacccacuucuccgacgacaucgagcagcaggccgacaacaugaucacggagcuccugcagaaggaguacauggaccggcagggcaagaccccgcuggggcucguggaccuguucgucuucagcaccuccuucuaccugaucagcaucuuccugcaccucgugaagaucccgacccaccgccacgugaucggcaagcccugccccaagccccaccggcugaaccacauggggaucugcuccugcggccuguacaagcacccggggguccccgugaaguggaagcgcugaggacuagucccuguucccagagcccacuuuuuuuucuuuuuuugaaauaaaauagccugucuuucagaucucaaaggcucuuuucagagccaccaaaaaaaaaaaaaaaaaaaaaaaaaaaaaaaaaaaaaaaaaaaaaaaaaaaaaaaaaaaaaaaaagaauu

SEQ ID NO: 33690 - RNA, 1733 nt, Artificial Sequence
  mRNA product Design a-2 (hSL-A64-N5) comprising derived and/or modified sequence from LASV(Nig08-A19;Clade III)__ADU56618__GPCmut8 (opt1)
aggagaguccgcucagccagguugcagaagcggcuuagcguguguccuaaucuucucucugcguguagguaggccugugccgcaaacaagcuuaccaugggccagaucgugaccuucuuccaggaggucccccacgugaucgaggaggugaugaacaucguccugaucgcccucagcauccuggccauccugaaggggcucuacaacaucgcgaccugcggccugaucgggcuggugacguuccuccugcuguccggccgcagcugcuccaugaccuacaaggggguguacgagcuccagacccuggagcugaacaugaacacccucaacaugugcaugccgcugagcugcaccaagaacaacucccaccacuacaucauggucggcaacgagaccggccuggagcucacccugacgaacaccagccugcuccaccacaaguucugcaaccuguccgacgcccacaagaagaaccuguacgaccacacccucaugagcaucaucuccaccuuccaccugagcauccccaacuucaaccaguacgaggccauguccugcgacuucaacgggggcaagaucacggugcaguacaaccugagccacuccuacgccaucgacgccgcgaaccacugcgggaccguggccaacggcguccuccagaccuucaugcggauggccuggggcgggagcuacaucgcccuggacuccggccgcgggaagugggacugcaucaugaccagcuaccaguaccugaucauccagaacacgaccugggaggaccacugccaguucucccggcccagccccaucggcuaccucgggcugcugucccagcgcacccgggacaucuacaucagccgccggcuccugggcaccuucacguggacccugagcgacuccgagggcaacgagacccccgggggcuacugccucacccgcuggaugcugaucgaggcggagcugaagugcuucgggaacacggccguggccaagugcaacgagaagcacgacgaggaguucugcgacaugcuccggcuguucgacuucugcaagcaggccauccgccggcugaaggcccccgcgcagaugagcauccagcucaucaacaaggccgugaacgcccugaucaacgaccagcugaucaugaagaaccaccuccgcgacaucaugggcauccccuacugcaacuacuccaaguacugcuaccugaaccacaccagcaccgggcggaccucccugccccgcugcugccucgucagcaacggcuccuaccugaacgagacgcacuucagcgacgacaucgagcagcaggccgacaacaugaucaccgagaugcugcagaaggaguaccucgaccggcagggcaagaccccgcuggggcugguggaccuguucguguucuccaccagcuucuaccucaucuccaucuuccugcaccuggucaagaucccgacgcaccgccacaucgugggcaagcccugccccaagccccaccggcucaaccacauggggaucugcagcugcggccuguacaagcagccgggggugcccguccgcuggaagcggugaggacuagucccuguucccagagcccacuuuuuuuucuuuuuuugaaauaaaauagccugucuuucagaucucaaaggcucuuuucagagccaccaaaaaaaaaaaaaaaaaaaaaaaaaaaaaaaaaaaaaaaaaaaaaaaaaaaaaaaaaaaaaaaaagaauu

SEQ ID NO: 33691 - RNA, 1736 nt, Artificial Sequence
  mRNA product Design a-2 (hSL-A64-N5) comprising derived and/or modified sequence from LASV(G1180-SLE-2010;Clade IV)__AIT17168__GPCmut8 (opt1)
aggagaguccgcucagccagguugcagaagcggcuuagcguguguccuaaucuucucucugcguguagguaggccugugccgcaaacaagcuuaccaugggccagaucgugaccuucuuccaggaggucccccacgugaucgaggaggugaugaacaucguccugaucgcccucagcauccuggccgugcugaaggggcucuacaacuucgcgaccugcggccugguggggcugcucaccuuccugcugcucugcggccgcuccugcaccgccagccgguacaagggggucuacgagcugcagacccuggagcucaacauggagacccugaacaugugcaugccgcuguccugcaccaagaacaacagccaccacuacaucauggugggcaacgagaccggccucgagcugacccugacgaacaccuccaucaucaaccacaaguucugcaaccucagcgacgcccacaagaagaaccuguacgaccacgcccugauguccaucaucagcaccuuccaccucuccauccccaacuucaaccaguacgaggccaugagcugcgacuucaacgggggcaagaucuccgugcaguacaaccugagccacuccuacgcgggggacgccgccaaccacugcggcaccgucgccaacggggugcugcagacguucaugcgcauggcguggggcggcagcuacaucgcccucgacuccgggcacggcagcugggacugcaucaugaccuccuaccaguaccugaucauccagaacaccaccugggaggaccacugccaguucagccggcccucccccaucggguaccugggccuccugagccagcgcacgcgggacaucuacaucagccgccggcugcucggcaccuucaccuggacccuguccgacagcgaggggaaggacacgccgggcggguacugccugacccgcuggaugcucaucgaggccgagcugaagugcuucggcaacaccgccguggccaagugcaacgagaagcacgacgaggaguucugcgacaugcugcggcuguucgacuucugcaagcaggcgauccagcgccugaaggcccccgcccagauguccauccagcugaucaacaaggccgucaacgcccucaucaacgaccagcugaucaugaagaaccaccuccgggacaucauggggauccccuacugcaacuacagcaaguacugcuaccucaaccacaccacgaccggcaagaccucccugcccaagugcugccuggugagcaacggcuccuaccucaacgagacccacuucagcgacgacaucgagcagcaggcggacaacaugaucacggagaugcugcagaaggaguacauggagcgccaggggaagacgccccugggccucguggaccuguucgucuucuccaccagcuucuaccugaucuccaucuuccugcaccucgugaagaucccgacccaccggcacaucgugggcaagagcugccccaagccccaccgccugaaccacauggggaucugcuccugcgggcuguacaagcagcccggcgucccggugaaguggaagcggugaggacuagucccuguucccagagcccacuuuuuuuucuuuuuuugaaauaaaauagccugucuuucagaucucaaaggcucuuuucagagccaccaaaaaaaaaaaaaaaaaaaaaaaaaaaaaaaaaaaaaaaaaaaaaaaaaaaaaaaaaaaaaaaaagaauu

SEQ ID NO: 33692 - RNA, 1736 nt, Artificial Sequence
  mRNA product Design a-2 (hSL-A64-N5) comprising derived and/or modified sequence from LASV(G1442-SLE-2011;Clade IV)__AIT17180__GPCmut8 (opt1)
aggagaguccgcucagccagguugcagaagcggcuuagcguguguccuaaucuucucucugcguguagguaggccugugccgcaaacaagcuuaccaugggccagaucgugaccuucuuccaggaggucccccacgugaucgaggaggugaugaacaucguccugaucgcccucagcauccuggccgugcugaaggggcucuacaacguggcgaccugcggccugaucgggcuggucacguuccuccugcugugcggccgcuccugcaccaccacccucuacaaggggguguacgagcugcagacgcuggagcucaacauggagacccugaacaugugcaugccgcugagcugcaccaagaacaacucccaccacuacauccgggugggcaacgagacgggccucgagcugacccugaccaacaccagcaucaucaaccacaaguucugcaaccucuccgacgcccacaagaagaaccuguacgaccacgcccugaugagcaucaucuccacguuccaccucagcauccccaacuucaaccaguacgaggccauguccugcgacuucaacgggggcaagaucagcguccaguacaaccugucccacagcuacgccggggacgcggccaaccacugcggcaccguggccaacggggugcugcagaccuucaugcgcauggccuggggcggcuccuacaucgcgcucgacagcgggcggggcaacugggacugcaucaugaccuccuaccaguaccugaucauccagaacacgaccugggacgaccacugccaguucagccgccccucccccaucggguaccugggccuccugagccagcggacccgcgacgucuacaucucccggcgccugcucggcaccuucacguggacccugagcgacagcgaggggaaggacaccccgggcggguacugccugacccgguggaugcucaucgaggccgagcugaagugcuucggcaacacggccguggccaagugcaacgagaagcacgacgaggaguucugcgacaugcugcgccucuucgacuucugcaagcaggccauccagcggcugaaggcgcccgcccagauguccauccagcugaucaacaaggccgugaacgcccucaucaacgaccagcugaucaugaagaaccaccuccgcgacaucauggggauccccuacugcaacuacagcaaguacugcuaccugaacaacaccgccaccggcaagaccucccugcccaagugcugccugaucagcaacggcuccuaccucaacgagacgcacuucagcgacgacaucgagcaggaggcggacaacaugaucaccgagaugcugcagaaggaguacauggagcggcaggggaagacgccccugggccucgucgaccuguucguguucuccaccagcuucuaccugaucuccaucuuccugcaccucgugaagaucccgacccaccgccacaucgucggcaagagcugccccaagccccaccggcugaaccacauggggaucugcuccugcgggcuguacaagcagcccggcgugccggugcgcuggaagcggugaggacuagucccuguucccagagcccacuuuuuuuucuuuuuuugaaauaaaauagccugucuuucagaucucaaaggcucuuuucagagccaccaaaaaaaaaaaaaaaaaaaaaaaaaaaaaaaaaaaaaaaaaaaaaaaaaaaaaaaaaaaaaaaaagaauu

SEQ ID NO: 33693 - RNA, 1736 nt, Artificial Sequence
  mRNA product Design a-2 (hSL-A64-N5) comprising derived and/or modified sequence from LASV(G3010-SLE-2013;Clade IV)__AIT17344__GPCmut8 (opt1)
aggagaguccgcucagccagguugcagaagcggcuuagcguguguccuaaucuucucucugcguguagguaggccugugccgcaaacaagcuuaccaugggccagaucgugaccuucuuccaggaggucccccacgugaucgaggaggugaugaacaucguccugaucgcccucagcauccuggccgugcugaaggggcucuacaacuucgcgaccugcggccugguggggcuggucacguuccuccugcugugcggccgcuccugcaccaccagccucuacaaggggguguacgagcugcagacccuggagcucaacauggagacgcugaacaugugcaugccgcuguccugcaccaagaacaacagccaccacuacaucauggugggcaacgagaccggccucgagcugacgcugaccaacaccuccaucaucaaccacaaguucugcaaccucagcgacgcccacaagaagaaccuguacaaccacgcccugauguccaucaucagcaccuuccaccucuccauccccaacuucaaccaguacgaggccaugagcugcgacuucaacgggggcaagaucuccguccaguacaaccugagccacuccuacgccggggacgcggccagccacugcggcacgguggccaacggggugcugcagaccuucaugcggauggccuggggcggcuccuacaucgcgcucgacagcggguacggcaagugggacugcaucaugaccuccuaccaguaccugaucauccagaacaccacgugggaggaccacugccaguucagccgccccucccccaucggguaccugggccuccugagccagcggacccgcgacaucuacaucagccggcgccugcucggcaccuucaccuggacgcuguccgacagcgaggggaaggacaccccgggcggguacugccugacccgguggaugcucaucgaggccgagcugaagugcuucggcaacaccgccgucgccaagugcaacgagaagcacgacgaggaguucugcgacaugcugcgccucuucgacuucugcaagcaggccauccagcggcugaagacgcccgcgcagauguccauccagcugaucaacaaggccgugaacgcccucaucaacgaccagcugaucaugaagaaccaccuccgcgacaucauggggauccccuacugcaacuacagcaaguacugcuaccugaaccacaccaccaccggcaagacgucccugcccaagugcugccuggugagcaacggcuccuaccucaacgagacccacuucagcgacgacaucgagcagcaggccgacaacaugaucaccgagaugcugcagaaggaguacauggagcggcaggggaagacgccccugggccucgucgaccuguucguguucuccaccagcuucuaccugaucuccaucuuccugcaccucgugaagaucccgacccaccgccacaucgucggcaagagcugccccaagccccaccggcugaaccacauggggaucugcuccugcgggcuguacaagcagcccggcgugccggugcgcuggaagcggugaggacuagucccuguucccagagcccacuuuuuuuucuuuuuuugaaauaaaauagccugucuuucagaucucaaaggcucuuuucagagccaccaaaaaaaaaaaaaaaaaaaaaaaaaaaaaaaaaaaaaaaaaaaaaaaaaaaaaaaaaaaaaaaaagaauu

SEQ ID NO: 33694 - RNA, 1736 nt, Artificial Sequence
  mRNA product Design a-2 (hSL-A64-N5) comprising derived and/or modified sequence from LASV(G502-SLE-2009;Clade IV)__AIT17126__GPCmut8 (opt1)
aggagaguccgcucagccagguugcagaagcggcuuagcguguguccuaaucuucucucugcguguagguaggccugugccgcaaacaagcuuaccaugggccagaucgugaccuucuuccaggaggucccccacgugaucgaggaggugaugaacaucguccugaucgcccucagcauccuggccgugcugaaggggcucuacaacuucgcgaccugcggccugguggggcugcucacguuccugcugcucugcggccgcuccugcaccaccgggcuguacaagggcgucuacgagcugcagacccucgagcugaacauggagacgcugaacaugugcaugccgcucagcugcaccaagaacaacucccaccacuacaucauggugggcaacgagaccgggcuggagcugacgcucaccaacaccagcaucaucaaccacaaguucugcaaccuguccgacgcccacaagaagaaccuguacgaccacgcccucaugagcaucaucuccaccuuccaccugagcauccccaacuucaaccaguacgaggccauguccugcgacuucaacggcgggaagaucagcgugcaguacaaccugucccacagcuacgccggcgacgcggccgaccacugcgggacggucgccaacggcgugcuccagaccuucaugcggauggccuggggcggguccuacaucgcgcuggacagcggccgcgggcggugggacugcaucaugaccuccuaccaguaccugaucauccagaacaccacgugggaggaccacugccaguucagccgccccucccccaucggcuaccucggccugcugagccagcggacccgcgacaucuacaucucccggcgccuccuggggaccuucaccuggacgcugagcgacagcgagggcaaggacacccccgggggcuacugccucacccgguggaugcugaucgaggccgagcugaagugcuucgggaacaccgccguggccaagugcaacgagaagcacgacgaggaguucugcgacaugcuccgccuguucgacuucugcaagcaggccauccagcggcugaaggcgcccgcccagauguccauccagcucaucaacaaggccgucaacgcccugaucaacgaccagcuggugaugaagaaccaccuccgcgacaucaugggcauccccuacugcaacuacagccgguacugcuaccugaaccacacgaccaccggccgcaccucccugcccaagugcugccucgugagcaacggguccuaccugaacgagacgcacuucagcgacgacaucgagcagcaggccgacaacaugaucaccgagaugcugcagaaggaguacauggagcggcagggcaagaccccgcucgggcuggucgaccuguucguguucuccaccagcuucuaccugaucuccaucuuccuccaccuggugaagaucccgacgcaccgccacaucgucggcaagagcugccccaagccccaccggcugaaccacauggggaucugcuccugcggccucuacaagcagcccggcgugccggugaaguggaagcgcugaggacuagucccuguucccagagcccacuuuuuuuucuuuuuuugaaauaaaauagccugucuuucagaucucaaaggcucuuuucagagccaccaaaaaaaaaaaaaaaaaaaaaaaaaaaaaaaaaaaaaaaaaaaaaaaaaaaaaaaaaaaaaaaaagaauu

SEQ ID NO: 33695 - RNA, 1736 nt, Artificial Sequence
  mRNA product Design a-2 (hSL-A64-N5) comprising derived and/or modified sequence from LASV(G733-SLE-2010;Clade IV)__AIT17154__GPCmut8 (opt1)
aggagaguccgcucagccagguugcagaagcggcuuagcguguguccuaaucuucucucugcguguagguaggccugugccgcaaacaagcuuaccaugggccagaucgugaccuucuuccaggaggucccccacgugaucgaggaggugaugaacaucguccugaucgcccucagcauccuggccgugcugaaggggcucuacaacuucgcgaccugcggcaucguggggcuggucuccuuccugcuccugugcggccgcagcugcacgaccucccuguacaaggggguguacgagcuccagacccuggagcugaacauggagacccucaacaugugcaugccgcugagcugcaccaagaacaacucccaccacuacaucauggugggcaacgagaccggccuggagcucacccugacgaacaccagcaucaucaaccacaaguucugcaaccuguccgacgcccacaagaagaaccucuacgaccacgcccugaugagcaucaucuccaccuuccaccugagcauccccaacuucaaccaguacgaggccauguccugcgacuucaacgggggcaagaucagcguccaguacaaccucucccacagcuacgccggggacgcggccaaccacugcggcaccaucgccaacggggugcugcagacguucaugcggauggccuggggcggcuccuacaucgcgcuggacagcgggcgcgaccggugggacugcaucaugaccuccuaccaguaccucaucauccagaacaccaccugggaggaccacugccaguucagccgccccucccccaucggcuaccuggggcugcucagccagcggacgcgcgacaucuacaucagccggcgccugcugggcaccuucaccuggacccucuccgacagcgagggcaaggacacgcccgggggcuacugccugacccgguggaugcugaucgaggccgagcucaagugcuucgggaacaccgccguggccaagugcaacgagaagcacgacgaggaguucugcgacaugcugcgccuguucgacuucugcaagcaggccauccagcggcucaaggcgcccgcccagauguccauccagcugaucaacaaggccgucaacgcccugaucaacgaccagcucaucaugaagaaccaccuccgcgacaucaugggcauccccuacugcaacuacagcaaguacugcuaccugaaccacaccacgaccgggaagaccucccugcccaagugcugccuggugagcaacggcuccuaccugaacgagacccacuucagcgacgacaucgagcagcaggccgacaacaugaucacggagaugcuccagaaggaguacauggagcggcagggcaagaccccgcuggggcugguggaccucuucgucuucuccaccagcuucuaccugaucuccaucuuccugcaccuggugaagaucccgacccaccgccacguggucggcaagagcugccccaagccccaccggcucaaccacauggggaucugcuccugcggccuguacgggcagcccggcgugccggugaaguggaagcgcugaggacuagucccuguucccagagcccacuuuuuuuucuuuuuuugaaauaaaauagccugucuuucagaucucaaaggcucuuuucagagccaccaaaaaaaaaaaaaaaaaaaaaaaaaaaaaaaaaaaaaaaaaaaaaaaaaaaaaaaaaaaaaaaaagaauu

SEQ ID NO: 33696 - RNA, 1736 nt, Artificial Sequence
  mRNA product Design a-2 (hSL-A64-N5) comprising derived and/or modified sequence from MOPV/LASV reassortant(IGS-1;Clade IV)__AFY05576__GPCmut8 (opt1)
aggagaguccgcucagccagguugcagaagcggcuuagcguguguccuaaucuucucucugcguguagguaggccugugccgcaaacaagcuuaccaugggccagaucgugaccuucuuccaggaggucccccacgugaucgaggaggugaugaacaucguccugaucgcccucagcgugcuggccgugcugaaggggcucuacaacuucgcgaccugcggccuggucgggcuggugacguuccuccugcugugcggccgcuccugcaccaccagccucuacaaggggguguacgagcugcagacccuggagcucaacauggagacgcugaacaugugcaugccgcuguccugcaccaagaacaacagccaccacuacaucauggucggcaacgagaccggccucgagcugacgcugaccaacaccuccaucaucaaccacaaguucugcaaccucagcgacgcccacaagaagaaccuguacgaccacgcccugauguccaucaucagcaccuuccaccucuccauccccaacuucaaccaguacgaggccaugagcugcgacuucaacgggggcaagaucuccgugcaguacaaccugagccacuccuacgccggggacgcggccaaccacugcggcacgguggccaacgggguccugcagaccuucaugcggauggccuggggcggcagcuacaucgcgcucgacuccgggcgcggcaacugggacugcaucaugaccagcuaccaguaccugaucauccagaacaccacgugggaggaccacugccaguucucccggcccagccccaucggguaccugggccuccugucccagcgcacccgggacaucuacaucagccgccggcugcucggcaccuucaccuggacgcugagcgacuccgagggggaggacaccccgggcggguacugccugacccgcuggaugcucaucgaggccgagcugaagugcuucggcaacaccgccguggccaagugcaacgagaagcacgacgaggaguucugcgacaugcugcggcuguucgacuucugcaagcaggccauccagcgccugaaggcgcccgcccagaugagcauccagcugaucaacaaggccgugaacgcccucaucaacgaccagcugaucaugaagaaccaccuccgggacaucauggggauccccuacugcaacuacuccaaguacugcuaccucaaccacacgaccaccggccgcaccagccugcccaagugcugccuggucuccaacggcagcuaccucaacgagacgcacuucuccgacgacaucgagcagcaggccgacaacaugaucaccgagaugcugcagaaggaguacauggagcggcaggggaagacgccccugggccucguggaccuguucguguucagcaccuccuucuaccugaucagcaucuuccugcaccucgucaagaucccgacccaccgccacaucguggggaaguccugccccaagccccaccggcugaaccacaugggcaucugcagcugcgggcuguacaagcagcccggcgugccggucaaguggaagcgcugaggacuagucccuguucccagagcccacuuuuuuuucuuuuuuugaaauaaaauagccugucuuucagaucucaaaggcucuuuucagagccaccaaaaaaaaaaaaaaaaaaaaaaaaaaaaaaaaaaaaaaaaaaaaaaaaaaaaaaaaaaaaaaaaagaauu

SEQ ID NO: 33697 - RNA, 1736 nt, Artificial Sequence
  mRNA product Design a-2 (hSL-A64-N5) comprising derived and/or modified sequence from LASV(LM765-SLE-2012;Clade IV)__AIT17814__GPCmut8 (opt1)
aggagaguccgcucagccagguugcagaagcggcuuagcguguguccuaaucuucucucugcguguagguaggccugugccgcaaacaagcuuaccaugggccagaucgugaccuucuuccaggaggucccccacgugaucgaggaggugaugaacaucguccugaucgcccucagcauccuggccgugcugaaggggcucuacaacuucgcgaccugcggccugguggggcuggucacguuccuccugcugugcggccgcuccugcaccaccagccucuacaaggggguguacgagcugcagacccuggagcucaacauggagacgcugaacaugugcaugccgcuguccugcaccaagaacaacagccaccacuacaucauggugggcaacgagaccggccucgagcugacgcugaccaacaccuccaucaucgaccacaaguucugcaaccucagcgacgcccaccggaagaaccuguacgaccacgcccugauguccaucaucagcaccuuccaccucuccauccccaacuucaaccaguacgaggccaugagcugcgacuucaacgggggcaagaucuccguccaguacaaccugagccacuccuacgccaaggacgcggccgaccacugcgggacgguggccaacggcgugcugcagaccuucaugcgcauggccuggggcgggagcuacaucgcgcucgacuccggccgggggcgcugggacugcaucaugaccagcuaccaguaccugaucauccagaacaccacgugggaggaccacugccaguucucccggcccagccccaucggcuaccuggggcuccugucccagcgcacccgggacaucuacaucagccgccggcugcucggcaccuucaccuggacgcugagcgacuccgagggcaaggacacccccgggggcuacugccugacccgcuggaugcucaucgaggccgagcugaagugcuucgggaacaccgccgucgccaagugcaacgagaagcacgacgaggaguucugcgacaugcugcggcuguucgacuucugcaagcaggccauccagcgccugaaggcgcccgcccagaugagcauccagcugaucaacaaggccgugaacgcccucaucaacgaccagcugaucaugaagaaccaccuccgggacaucaugggcauccccuacugcaacuacuccaaguacugcuaccucaaccacacgaccaccgggaagaccagccugcccaagugcugccugguguccaacggcagcuaccucaacgagacgcacuucuccgacgacaucgagcagcaggccgacaacaugaucaccgagaugcugcagaaggaguacauggagcgccagggcaagaccccgcuggggcucgucgaccuguucguguucagcaccuccuucuaccugaucagcaucuuccugcaccucgugaagaucccgacgcaccggcacaucgucggcaagcccugccccaagccccaccgccugaaccacauggggaucugcuccugcggccuguacaagcagccgggggugcccgugaaguggaagcggugaggacuagucccuguucccagagcccacuuuuuuuucuuuuuuugaaauaaaauagccugucuuucagaucucaaaggcucuuuucagagccaccaaaaaaaaaaaaaaaaaaaaaaaaaaaaaaaaaaaaaaaaaaaaaaaaaaaaaaaaaaaaaaaaagaauu

SEQ ID NO: 33698 - RNA, 1736 nt, Artificial Sequence
  mRNA product Design a-2 (hSL-A64-N5) comprising derived and/or modified sequence from LASV(LM776-SLE-2012;Clade IV)__AIT17824__GPCmut8 (opt1)
aggagaguccgcucagccagguugcagaagcggcuuagcguguguccuaaucuucucucugcguguagguaggccugugccgcaaacaagcuuaccaugggccagaucgugaccuucuuccaggaggucccccacgugaucgaggaggugaugaacaucguccugaucgcccucagcauccuggccgugcugaaggggcucuacaacuucgcgaccugcggccugguggggcuggucacguuccuccugcugugcggccgcuccugcaccaccagcguguacaaggggguguacgagcuccagacccuggagcugaacauggagacgcucaacaugugcaugccgcuguccugcaccaagaacaacagccaccacuacaucauggucggcaacgagaccggccuggagcucacgcugaccaacaccuccaucaucaaccacaaguucugcaaccugagcgacgcccacaagaagaaccucuacgaccacgcccugauguccaucaucagcaccuuccaccuguccauccccaacuucaaccaguacgaggccaugagcugcgacuucaacgggggcaagaucuccgugcaguacaaccucagccacuccuacgccggggacgcggccaaccacugcggcacgguggccaacgggguccugcagaccuucaugcggauggccuggggcggcagcuacaucgcgcuggacuccgggcacggcaagugggacugcaucaugaccagcuaccaguaccucaucauccagaacaccacgugggaggaccacugccaguucucccgccccagccccaucggguaccugggccugcucucccagcggacccgcgacaucuacaucagccggcgccugcugggcaccuucaccuggacgcucagcgacuccgaggggaaggacaccccgggcggguacugccugacccgguggaugcugaucgaggccgagcucaagugcuucggcaacaccgccguggccaagugcaacgagaagcacgacgaggaguucugcgacaugcugcgccuguucgacuucugcaagcaggccauccagcggcucaaggcgcccgcccagaugagcauccagcugaucaacaaggccgugaacgcccugaucaacgaccagcucaucaugaagaaccaccuccgcgacaucauggggauccccuacugcaacuacuccaaguacugcuaccugaaccacacgaccaccggcaagaccagccugcccaagugcugccuggucuccaacggcagcuaccugaacgagacgcacuucuccgacgacaucgagcagcaggccgacaacaugaucaccgagaugcuccagaaggaguacauggagcggcaggggaagacgccccugggccugguggaccucuucguguucagcaccuccuucuaccugaucagcaucuuccugcaccuggucaagaucccgacccaccgccacaucguggggaaguccugccccaagccccaccggcucaaccacaugggcaucugcagcugcgggcuguacaagcagcccggcgugccgguccgcuggaagcggugaggacuagucccuguucccagagcccacuuuuuuuucuuuuuuugaaauaaaauagccugucuuucagaucucaaaggcucuuuucagagccaccaaaaaaaaaaaaaaaaaaaaaaaaaaaaaaaaaaaaaaaaaaaaaaaaaaaaaaaaaaaaaaaaagaauu

SEQ ID NO: 33699 - RNA, 1736 nt, Artificial Sequence
  mRNA product Design a-2 (hSL-A64-N5) comprising derived and/or modified sequence from LASV(Mad39;Clade IV)__ANH09722__GPCmut8 (opt1)
aggagaguccgcucagccagguugcagaagcggcuuagcguguguccuaaucuucucucugcguguagguaggccugugccgcaaacaagcuuaccaugggccagaucgugaccuucuuccaggaggucccccacgugaucgaggaggugaugaacaucguccugaucgcccucagcauccuggccgugcugaaggggcucuacaacguggcgaccugcggccugaucgggcuggucacguuccuccugcugugcggccgcuccugcaccaccacccucuacaaggggguguacgagcugcaggcccuggagcucaacauggagacgcugaacaugugcaugccgcugagcugcaccaagaacaacucccaccacuacauccgggugggcaacgagaccggccucgagcugacgcugaccaacaccagccucaucaaccacaaguucugcaaccuguccgacgcccacaagaagaaccuguacgaccacgcccucaugagcaucaucuccaccuuccaccugagcauccccaacuucaaccaguacgaggccauguccugcgacuucaacgacgggaagaucagcguccaguacaaccugucccacacguacgcgggcgacaccgccaaccacugcgggaccguggccaacggcgugcuccagaccuucaugcgcauggccuggggcgggagcuacaucgcgcuggacuccggccgcgggggcugggacugcaucaugacgagcuaccaguaccugaucauccagaacaccaccugggaggaccacugccaguucucccggcccagccccaucggguaccucggccugcugucccagcggacccgcgacaucuacaucagccggcgccuccugggcacguucaccuggacccuguccgacagcgaggggaaggacaccccgggcggguacugccucacgcgguggaugcugaucgaggccgagcugaagugcuucggcaacaccgccgucgccaagugcaacgagaagcacgacgaggaguucugcgacaugcuccgccuguucgacuucugcaagcaggccauccagcggcugaaggcgcccgcccagaugagcauccagcucaucaacaaggccgugaacgcccugaucaacgaccagcugaucaugaagaaccaccuccgcgacaucauggggauccccuacugcaacuacuccaaguacugcuaccugaaccacaccgugaccggcaagacgagccugcccaagugcugccucgucuccaacggcagcuaccugaacgagacccacuucuccgacgacaucgagcagcaggccgacaacaugaucaccgagaugcugcagaaggaguacauggagcggcaggggaagacgccccucggccugguggaccuguucguguucagcaccuccuucuaccugaucagcaucuuccuccaccuggucaagaucccgacccaccgccacgugguggggaagcccugccccaagccccaccggcugaaccacaugggcaucugcuccugcggguucuacaagcagccgggcguccccgugcgcuggaagcggugaggacuagucccuguucccagagcccacuuuuuuuucuuuuuuugaaauaaaauagccugucuuucagaucucaaaggcucuuuucagagccaccaaaaaaaaaaaaaaaaaaaaaaaaaaaaaaaaaaaaaaaaaaaaaaaaaaaaaaaaaaaaaaaaagaauu

SEQ ID NO: 33700 - RNA, 1736 nt, Artificial Sequence
  mRNA product Design a-2 (hSL-A64-N5) comprising derived and/or modified sequence from LASV(Z0947-SLE-2011;Clade IV)__AIT17840__GPCmut8 (opt1)
aggagaguccgcucagccagguugcagaagcggcuuagcguguguccuaaucuucucucugcguguagguaggccugugccgcaaacaagcuuaccaugggccagaucgugaccuucuuccaggaggucccccacgugaucgaggaggugaugaacaucguccugaucgcccucagcauccuggccgugcugaaggggcucuacaacuucgcgaccugcggccugguggggcuggucacguuccuccugcugugcggccgcuccugcaccaucagccucuacaaggggguguacgagcugcagacccuggagcucaacauggagacccugaacaugugcaugccgcuguccugcaccaagaacaacagccaccacuacaucauggugggcaacgagaccggccucgagcugacccugacgaacaccuccaucaucaaccacaaguucugcaaccucagcgacgcccacaagaagaaccuguacgaccacgcccugauguccaucaucagcaccuuccaccucuccauccccaacuucaaccaguacgaggccaugagcugcgacuucaacgggggcaagaucuccguccaguacaaccugagccacuccuacgccggggacgcggccaaccacugcggcaccguggccaacggggugcugcagacguucaugcggauggccuggggcggcagcuacaucgcgcucgacuccgggcgcgaccggugggacugcaucaugaccagcuaccaguaccugaucauccagaacaccaccugggaggaccacugccaguucucccgccccagccccaucggcuaccuggggcuccugucccagcggacgcgcgacaucuacaucagccggcgccugcucggcaccuucaccuggacccugagcgacuccgagggcaaggacacgcccgggggcuacugccugacccgguggaugcucaucgaggccgagcugaagugcuucgggaacaccgccgucgccaagugcaacgagaagcacgacgaggaguucugcgacaugcugcgccucuucgacuucugcaagcaggccauccagcggcugaaggcgcccgcccagaugagcauccagcugaucaacaaggccgugaacgcccucaucaacgaccagcugaucaugaagaaccaccuccgcgacaucaugggcauccccuacugcaacuacuccaaguacugcuaccugaaccacaccacgaccgggaagaccagccugcccaagugcugccugguguccaacggcagcuaccucaacgagacccacuucuccgacgacaucgagcagcaggccgacaacaugaucacggagaugcugcagaaggaguacauggagcggcagggcaagaccccgcuggggcucgucgaccuguucguguucagcaccuccuucuaccugaucagcaucuuccugcaccucgugaagaucccgacccaccgccacaucgucggcaagcccugccccaagccccaccggcugaaccacauggggaucugcuccugcggccuguacaagcagccgggggugcccgugaaguggaagcgcugaggacuagucccuguucccagagcccacuuuuuuuucuuuuuuugaaauaaaauagccugucuuucagaucucaaaggcucuuuucagagccaccaaaaaaaaaaaaaaaaaaaaaaaaaaaaaaaaaaaaaaaaaaaaaaaaaaaaaaaaaaaaaaaaagaauu

SEQ ID NO: 33701 - RNA, 1736 nt, Artificial Sequence
  mRNA product Design a-2 (hSL-A64-N5) comprising derived and/or modified sequence from LASV(Josiah;Clade IV)__NP_694870__GPCmut8 (opt1)
aggagaguccgcucagccagguugcagaagcggcuuagcguguguccuaaucuucucucugcguguagguaggccugugccgcaaacaagcuuaccaugggccagaucgugaccuucuuccaggaggucccccacgugaucgaggaggugaugaacaucguccugaucgcccucagcgugcuggccgugcugaaggggcucuacaacuucgcgaccugcggccuggucgggcuggugacguuccuccugcugugcggccgcuccugcaccaccagccucuacaaggggguguacgagcugcagacccuggagcucaacauggagacgcugaacaugugcaugccgcuguccugcaccaagaacaacagccaccacuacaucauggucggcaacgagaccggccucgagcugacccugacgaacaccuccaucaucaaccacaaguucugcaaccucagcgacgcccacaagaagaaccuguacgaccacgcccugauguccaucaucagcaccuuccaccucuccauccccaacuucaaccaguacgaggccaugagcugcgacuucaacgggggcaagaucuccgugcaguacaaccugagccacuccuacgccggggacgcggccaaccacugcggcaccguggccaacgggguccugcagacguucaugcggauggccuggggcggcagcuacaucgcgcucgacuccgggcgcggcaacugggacugcaucaugaccagcuaccaguaccugaucauccagaacaccaccugggaggaccacugccaguucucccggcccagccccaucggguaccugggccuccugucccagcgcacgcgggacaucuacaucagccgccggcugcucggcaccuucaccuggacccugagcgacuccgaggggaaggacacgccgggcggguacugccugacccgcuggaugcucaucgaggccgagcugaagugcuucggcaacaccgccguggccaagugcaacgagaagcacgacgaggaguucugcgacaugcugcggcuguucgacuucugcaagcaggccauccagcgccugaaggcgcccgcccagaugagcauccagcugaucaacaaggccgugaacgcccucaucaacgaccagcugaucaugaagaaccaccuccgggacaucauggggauccccuacugcaacuacuccaaguacugcuaccucaaccacaccacgaccggccgcaccagccugcccaagugcugccuggucuccaacggcagcuaccucaacgagacccacuucuccgacgacaucgagcagcaggccgacaacaugaucacggagaugcugcagaaggaguacauggagcggcaggggaagaccccgcugggccugguggaccucuucguguucagcaccuccuucuaccugaucagcaucuuccugcaccucgucaagauccccacccaccgccacaucguggggaaguccugccccaagccccaccggcugaaccacaugggcaucugcagcugcgggcuguacaagcagccgggcgugcccgucaaguggaagcgcugaggacuagucccuguucccagagcccacuuuuuuuucuuuuuuugaaauaaaauagccugucuuucagaucucaaaggcucuuuucagagccaccaaaaaaaaaaaaaaaaaaaaaaaaaaaaaaaaaaaaaaaaaaaaaaaaaaaaaaaaaaaaaaaaagaauu

SEQ ID NO: 33702 - RNA, 1733 nt, Artificial Sequence
  mRNA product Design a-2 (hSL-A64-N5) comprising derived and/or modified sequence from LASV(LP;Clade I)__AAF86701__GPCmut8 (opt1)
aggagaguccgcucagccagguugcagaagcggcuuagcguguguccuaaucuucucucugcguguagguaggccugugccgcaaacaagcuuaccaugggccagaucaucaccuucuuccaggaggugccccacgucaucgaggaggugaugaacaucgugcugaucgcccucagccugcuggccauccucaaggggcuguacaacaucgcgaccugcggcaucaucgggcuggucgccuuccucuuccugugcggcaaguccugcagccugacgcucaagggcggguacgagcugcagacccuggagcucaacauggagacccugaacaugugcaugccgcuguccugcaccaagaacagcucccaccacuacauccgcgugggcaacgagacggggcucgagcugacccugaccaacaccagcaucaucaaccacaaguucugcaaccucuccgacgcccacaagaagaaccuguacgaccacgcccugaugagcaucaucuccacguuccaccucagcauccccaacuucaaccaguacgaggccauguccugcgacuucaacggcgggaagaucagcgugcaguacaaccugucccacagcuacgcgggcgacgccgccgagcacugcgggaccgucgccaacggcgugcugcagaccuucaugcggauggcguggggcgggcgcuacaucgcccucgacuccggcaaggggaacugggacugcaucaugaccagcuaccaguaccugaucauccagaacacgaccugggaggaccacugccaguucucccggcccagccccaucggcuaccugggccuccugucccagcgcacccgggacaucuacaucagccgccggcugcucgggaccuucacguggacccugagcgacuccgagggcaacgagacccccgggggcuacugccugacccgcuggaugcucaucgaggccgagcugaagugcuucgggaacacggccguggccaagugcaacgagaagcacgacgaggaguucugcgacaugcugcggcuguucgacuucugcaagcaggcgauccgccggcugaaggccccggcccagaugagcauccagcugaucaacaaggccgucaacgcccucaucaacgaccagcugaucaugaagaaccaccuccgcgacaucaugggcauccccuacugcaacuacuccaaguacugcuaccucaaccacaccagcuccggccggaccagccugcccaagugcugccugaucuccaacgggagcuaccucaacgagacccaguucuccgacgacaucgagcagcaggcggacaacaugaucacggagaugcugcagaaggaguacaucgagcgccagggcaagaccccgcuggggcugguggacaucuucaucuucagcaccuccuucuaccucaucagcaucuuccugcaccugaucaagauccccacccaccggcacaucgugggcaagcccugccccaagccgcaccgccucaaccacaugggggucugcuccugcggccuguacaagcaccccggcgugcccacgaaguggaagcggugaggacuagucccuguucccagagcccacuuuuuuuucuuuuuuugaaauaaaauagccugucuuucagaucucaaaggcucuuuucagagccaccaaaaaaaaaaaaaaaaaaaaaaaaaaaaaaaaaaaaaaaaaaaaaaaaaaaaaaaaaaaaaaaaagaauu

SEQ ID NO: 33703 - RNA, 1733 nt, Artificial Sequence
  mRNA product Design a-2 (hSL-A64-N5) comprising derived and/or modified sequence from LASV(803213;Clade II)__AAF86703__GPCmut8 (opt1)
aggagaguccgcucagccagguugcagaagcggcuuagcguguguccuaaucuucucucugcguguagguaggccugugccgcaaacaagcuuaccaugggccagaucaucaccuucuuccaggaggugccccacgucaucgaggaggugaugaacaucgugcugaucgcccucagccugcuggccauccucaaggggaucuacaacgucgcgaccugcggccuguucgggcugaucuccuuccuccugcugugcggccgcagcugcuccgugacguacaaggggguguacgagcuccagacccuggagcugaacauggccaaccucaacaugugcaugccgcugagcugcaccaagaacaacucccaccacuacaucauggucggcaacgagaccggccuggagcucacgcugaccaacaccagcaucaucaaccacaaguucugcaaccuguccgacgcccacaagaagaaccucuacgaccacgcccugaugagcaucaucuccaccuuccaccugagcauccccaacuucaaccaguacgaggccauguccugcgacuucaacgggggcaagaucagcgugcaguacaaccucucccacagcuucgcgguggacgccgccaaccacugcgggacgaucgccaacggcguccugcagaccuucaugcggauggcguggggcggguccuacaucgcccuggacagcggcaaggggaacugggacugcaucaugaccuccuaccaguaccucaucauccagaacaccacgugggaggaccacugccaguucagccgccccucccccaucggcuaccuggggcugcucagccagcggacccgcgacaucuacaucagccggcgccugcugggcaccuucaccuggacgcucuccgacagcgagggcaacgaggcccccgggggcuacugccugacccgguggaugcugaucgaggccgagcucaagugcuucgggaacaccgccguggcgaagugcaacgagaagcacgacgaggaguucugcgacaugcugcgccuguucgacuucugcaagcaggccaucaagcggcucaagaccccggcccagauguccauccagcugaucaacaaggccgugaacgcccugaucaacgaccagcucaucaugaagaaccaccuccgcgacaucaugggcauccccuacugcaacuacagccgguacugcuaccugaaccacacggucaccgggaagaccucccugccccgcugcugccuggugagcaacggcuccuaccugaacgagacccacuucagcgacgacaucgagcagcaggcggacaacaugaucacggagaugcuccagaaggaguacauggaccggcagggcaagaccccgcuggggcugguggaccuguucgucuucuccaccagcuucuaccucaucuccaucuuccugcaccuggugaagauccccacccaccgccacaucgugggcaagcccugccccaagccgcaccggcucaaccacauggggaucugcagcugcggccuguacaagcaccccgggguccccgugaaguggaagcgcugaggacuagucccuguucccagagcccacuuuuuuuucuuuuuuugaaauaaaauagccugucuuucagaucucaaaggcucuuuucagagccaccaaaaaaaaaaaaaaaaaaaaaaaaaaaaaaaaaaaaaaaaaaaaaaaaaaaaaaaaaaaaaaaaagaauu

SEQ ID NO: 33704 - RNA, 1733 nt, Artificial Sequence
  mRNA product Design a-2 (hSL-A64-N5) comprising derived and/or modified sequence from LASV(GA391;Clade III)__CAA36645__GPCmut8 (opt1)
aggagaguccgcucagccagguugcagaagcggcuuagcguguguccuaaucuucucucugcguguagguaggccugugccgcaaacaagcuuaccaugggccagaucgugaccuucuuccaggaggucccccacgugaucgaggaggugaugaacaucguccugaucgcccucagcauccuggccauccugaaggggcucuacaacguggcgaccugcggccugaucgggcuggugacguuccuccugcuguccggccgcagcugcucccucaucuacaaggggaccuacgagcugcagacccuggagcucaacauggagacccugaacaugugcaugccgcugagcugcacgaagaacaacucccaccacuacauccgggucggcaacgagaccggccucgagcugacccugaccaacacgagcauccucaaccacaaguucugcaaccuguccgacgcccacaagcgcaaccuguacgaccacagccucauguccaucaucagcaccuuccaccuguccauccccaacuucaaccaguacgaggccaugagcugcgacuucaacgggggcaagaucaccgugcaguacaaccugucccacagcuucgccguggacgccgcggggcacugcggcacccucgccaacgggguccugcagacguucaugcggauggccuggggcggcuccuacaucgcccuggacagcgggcgcggcaacugggacugcaucaugaccuccuaccaguaccucaucauccagaacaccaccugggacgaccacugccaguucagccggcccucccccaucggguaccugggccugcucagccagcgcacgcgggacaucuacaucagccgccggcugcugggcaccuucaccuggacccucuccgacagcgaggggaacgagacgccgggcggguacugccugacccgcuggaugcugaucgaggcggagcucaagugcuucggcaacaccgccguggccaagugcaacgagaagcacgacgaggaguucugcgacaugcugcggcuguucgacuucugcaagcaggccauccgccggcucaagacccccgcccagauguccauccagcugaucaacaaggcggugaacgcccugaucaacgaccagcucaucaugaagaaccaccuccgcgacaucauggggauccccuacugcaacuacagccgguacugcuaccugaaccacacguccaccggcaagaccagccugccccgcugcugccugaucuccaacggcagcuaccugaacgagaccaaguucuccgacgacaucgagcagcaggccgacaacaugaucacggagaugcugcagaaggaguacaucgaccggcaggggaagaccccgcucggccuggucgaccuguucguguucagcaccuccuucuaccucaucagcaucuuccugcaccuggugaagauccccacccaccgccacaucgucgggaagcccugccccaagccgcaccggcucaaccacaugggcaucugcuccugcgggcuguacaagcagcccggcgugcccgugcgcuggaagcggugaggacuagucccuguucccagagcccacuuuuuuuucuuuuuuugaaauaaaauagccugucuuucagaucucaaaggcucuuuucagagccaccaaaaaaaaaaaaaaaaaaaaaaaaaaaaaaaaaaaaaaaaaaaaaaaaaaaaaaaaaaaaaaaaagaauu

SEQ ID NO: 33705 - RNA, 1736 nt, Artificial Sequence
  mRNA product Design a-2 (hSL-A64-N5) comprising derived and/or modified sequence from LASV(AV;Clade V)__CCA30314__GPCmut8 (opt1)
aggagaguccgcucagccagguugcagaagcggcuuagcguguguccuaaucuucucucugcguguagguaggccugugccgcaaacaagcuuaccaugggccagaucgugaccuucuuccaggaggucccccacgugaucgaggaggugaugaacaucguccugaucgcccucagcauccuggccgugcugaaggggcucuacaacaucgcgaccugcggccugaucgggcugaucacguuccuccugcugugcggccgcuccugcagcuccaaccucuacaaggggguguacgagcugcagagccuggaccucaacauggagacccugaacaugugcaugccgcuguccugcaccaagaacaacagccaccacuacauccgggucggcaacgacaccggccucgagcugacgcugaccaacaccuccauccucaaccacaaguucugcaaccugagcgacgcccacaagaaggaccuguacgaccacgcccucauguccaucaucagcaccuuccaccuguccauccccaacuucaaccaguacgaggccaugagcugcgacuucaacgggggcaagaucuccgugcaguacaaccugagccacuccuacgccaucgacgcggccaaccacugcgggacgguggccaacggcauccuccagaccuucaugcgcauggccuggggcgggagcuacaucgcgcuggacuccggccgggggaacugggacugcaucaugaccagcuaccaguaccugaucauccagaacaccacgugggagaaccacugccaguucucccgccccagccccaucggcuaccucgggcugcugagccagcggacccgcgacaucuacaucucccggcgccuccugggcaccuucaccuggacgcugagcgacuccgagggcaacgccacccccgggggcuacugccucacccgguggaugcugaucgaggccgagcugaagugcuucgggaacaccgccgucgccaagugcaacgagaagcacgacgaggaguucugcgacaugcuccgccuguucgacuucugcaagcaggcgaucagccggcugaaguccccggcccagaugagcauccagcucaucaacaaggccgugaacgcccugaucaacgaccagcugaucaugaagaaccaccuccgcgacaucaugggcauccccuacugcaacuacuccaaguacugcuaccugaaccacacgaucaccgggaagaccagccugcccaagugcugccucguguccaacggcagcuaccugaacgagacccacuucuccgacgacaucgagcagcaggccgacaacaugaucacggagaugcugcagaaggaguacauggagcggcagggcaagaccccgcuggggcucgucgaccuguucguguucagcaccuccuucuaccugaucagcaucuuccuccgccuggugaagauccccacccaccggcacaucgucggcaagcccugccccaagccgcaccgccugaaccacauggggaucugcuccugcggccucuacaagcagcccggggugcccgugcgguggaagcgcugaggacuagucccuguucccagagcccacuuuuuuuucuuuuuuugaaauaaaauagccugucuuucagaucucaaaggcucuuuucagagccaccaaaaaaaaaaaaaaaaaaaaaaaaaaaaaaaaaaaaaaaaaaaaaaaaaaaaaaaaaaaaaaaaagaauu

SEQ ID NO: 33706 - RNA, 1733 nt, Artificial Sequence
  mRNA product Design a-2 (hSL-A64-N5) comprising derived and/or modified sequence from LASV(Togo/2016/7082;Clade VI)__AMR44577__GPCmut8 (opt1)
aggagaguccgcucagccagguugcagaagcggcuuagcguguguccuaaucuucucucugcguguagguaggccugugccgcaaacaagcuuaccaugggccagaucaucaccuucuuccaggaggugccccacgucaucgaggaggugaugaacaucgugcugaucgcccucagccugcuggccauccucaagggggucuacaacguggcgaccugcggcaucaucgggcuggugacguuccuguuccucugcggccgcuccugcagccugaucuacaagggguccuacgagcugcagacccucgagcugaacauggagacccugaacaugugcaugccgcucagcugcaccaagaacuccagccaccacuacauccgggucggcaacgagacgggccuggagcugacccucaccaacaccuccaucaucaaccacaaguucugcaaccugagcgacgcccacaagcgcaaccuguacgaccacgcccucauguccauccugagcacguuccaccuguccauccccaacuucaaccaguacgaggccaugagcugcgacuucaacgggggcaagaucuccgugcaguacaaccucagccacgccuacgcgguggacgccgccgagcacugcgggaccgucgccaacggcgugcugcagaccuucaugcggauggcguggggcggguccuacaucgcccuggacagcggccgcgggaacugggacugcaucaugaccuccuaccaguaccucaucauccagaacacgaccugggaggaccacugccaguucagccggcccucccccaucggcuaccuggggcugcucagccagcgcacccgggacaucuacaucagccgccggcugcugggcaccuucacguggacccucuccgacagcgagggcaacgagacccccgggggcuacugccugacccgcuggaugcugaucgaggccgagcucaagugcuucgggaacacggccguggccaagugcaacgagaagcacgacgaggaguucugcgacaugcugcggcuguucgacuucugcaagcaggcgauccagcgccucaaguccccggcccagaugagcauccagcugaucaacaaggccgucaacgcccugaucaacgaccagcucaucaugaagaaccaccuccgggacaugaugggcauccccuacugcaacuacuccaaguacugcuaccugaaccacaccagcuccgggcgcaccagccugcccaagugcugccugguguccaacggcagcuaccugaacgagacccacuucuccgacgacaucgagcagcaggccgacaacaugaucacggagaugcuccagaaggaguacaucgaccggcagggcaagaccccgcuggggcugguggaccuguucgucuucagcaccuccuucuaccucaucagcaucuuccugcaccugaucaagauccccacccaccgccacaucgugggcaagcccugccccaagccgcaccggcucaaccacauggggaucugcuccugcggccuguacaagcagcccggggugcccacgcgcuggaagcggugaggacuagucccuguucccagagcccacuuuuuuuucuuuuuuugaaauaaaauagccugucuuucagaucucaaaggcucuuuucagagccaccaaaaaaaaaaaaaaaaaaaaaaaaaaaaaaaaaaaaaaaaaaaaaaaaaaaaaaaaaaaaaaaaagaauu

SEQ ID NO: 33707 - RNA, 1733 nt, Artificial Sequence
  mRNA product Design a-2 (hSL-A64-N5) comprising derived and/or modified sequence from LASV(KAK-428;Clade n.d. (VII))__ANH09740__GPCmut8 (opt1)
aggagaguccgcucagccagguugcagaagcggcuuagcguguguccuaaucuucucucugcguguagguaggccugugccgcaaacaagcuuaccaugggccagaucgugaccuucuuccaggaggucccccacgugaucgaggaggugaugaacaucguccugaucgcccucagccugcuggccauccucaaggggcuguacaacuucgcgaccugcggcgugaucgggcugaucacguuccuccugcugugcggccgcuccugcagcgccaccuacaaggggcaguacgagcuccagacccuggagcugaacauggagucccucaacaugugcaugccgcugagcugcaccaagaacaacucccaccacuacauccgggccggcaacaacacgggccuggagcucacccugaccaacaccagcaucaucucccacaaguucugcaaccugagcgacgcccacaagaagaaccucuacgaccacacgcugauguccaucaucaccaccuuccaccugagcauccccaacuucaaccaguacgaggccauguccugcgacuucaacgggggcaagaucagcauccaguacaaccucucccacagcuacgcgggggacgccgcccagcacugcggcaccguggccaacgggguccugcagacguucaugcgcauggcguggggcggcuccuaccuggcccucgacagcgggcggcgcggcugggacugcaucaucuccagcuaccaguaccugaucauccagaacaccaccugggacgaccacugccaguucucccggcccagccccaucggguaccugggcuucgugagccagaagacccgcgacaucuacaucucccggcgccuccugggcacguucaccuggacccugagcgacuccgaggggcacgacaugccgggcggguacugccucacccgguggaugcugaucgaggccgaccugaagugcuucggcaacacggccguggccaagugcaacgagaagcacgacgaggaguucugcgacauguggcgccucuucgacuucugcaagcaggcgauccagcggcugaaggcccccgcccagaugaacauccagcugaucaacaaggccgucaacgcccucaucaacgaccagcugaugaugaagaaccaccuccgcgacaucauggggauccccuacugcaacuacagcaaguucugcuaccugaacaacaccaccaccggccggacgucccugccccgcugcugccugaucagcaacggcuccuaccucaacgagacccacuucagcgacgacaucgagcagcaggcggacaacaugaucaccgagaugcugcagaaggaguacauggaccggcaggggaagaccccgcugggccucguggaccuguucguguucuccacgagcuucuaccugaucaccaucuuccugcaccucgucaagauccccacccaccgccacaucguggggaagcccugccccaagccgcaccggcugaaccacaugggcaucugcuccugcgggcuguacaagcagcccggcgugcccguccgcuggaagcggugaggacuagucccuguucccagagcccacuuuuuuuucuuuuuuugaaauaaaauagccugucuuucagaucucaaaggcucuuuucagagccaccaaaaaaaaaaaaaaaaaaaaaaaaaaaaaaaaaaaaaaaaaaaaaaaaaaaaaaaaaaaaaaaaagaauu

SEQ ID NO: 33708 - RNA, 1733 nt, Artificial Sequence; identical to SEQ ID NO: 33702
  mRNA product Design a-2 (hSL-A64-N5) comprising derived and/or modified sequence from LASV(Pinneo-NIG-1969;Clade I)__AIT17836__GPCmut8 (opt1)

SEQ ID NO: 33709 - RNA, 1733 nt, Artificial Sequence
  mRNA product Design a-2 (hSL-A64-N5) comprising derived and/or modified sequence from LASV(ISTH0009-NIG-2011;Clade II)__AIT17404__GPCmut8 (opt1)
aggagaguccgcucagccagguugcagaagcggcuuagcguguguccuaaucuucucucugcguguagguaggccugugccgcaaacaagcuuaccaugggccagaucaucaccuucuuccaggaggugccccacgucaucgaggaggugaugaacaucgugcugaucgcccucagccugcuggccauccucaaggggaucuacaacgucgcgaccugcggccuguucgggcugguguccuuccuccugcugugcggccgcagcugcuccacgaccuacaaggggguguacgagcuccagacccuggagcuggacauggccagccucaacaugugcaugccgcuguccugcaccaagaacaacagccaccacuacaucauggucggcaacgagacgggccuggagcucacccugaccaacaccuccaucaucaaccacaaguucugcaaccugagcgacgcccacaagaagaaccucuacgaccacgcccugauguccaucaucagcacguuccaccuguccauccccaacuucaaccaguacgaggccaugagcugcgacuucaacgggggcaagaucuccgugcaguacaaccucagccacgcguacgccguggacgccgccaaccacugcgggaccaucgcgaacggcguccugcagaccuucaugcggauggccuggggcggguccuacaucgcccuggacagcggcaagggguccugggacugcaucaugaccagcuaccaguaccucaucauccagaacacgaccugggaggaccacugccaguucucccgccccagccccaucggcuaccuggggcugcucagccagcggacccgcgacaucuacaucucccggcgccugcugggcaccuucacguggacccucagcgacuccgagggcaacgagacccccgggggcuacugccugacccgguggaugcugaucgaggccgagcucaagugcuucgggaacacggccguggcgaagugcaacgagaagcacgacgaggaguucugcgacaugcugcgccuguucgacuucugcaagcaggccauccggcgccucaagaccccggcccagaugagcauccagcugaucaacaaggccgugaacgcccugaucaacgaccagcucaucaugaagaaccaccuccgggacaucaugggcauccccuacugcaacuacuccaaguacugcuaccugaaccacaccgucaccgggaagacgagccugccccgcugcugccugguguccaacggcagcuaccugaacgagacccacuucuccgacgacaucgagcagcaggcggacaacaugaucaccgagcuccugcagaaggaguacauggaccggcagggcaagaccccgcuggggcugguggaccucuucgucuucagcacguccuucuaccugaucagcaucuuccugcaccucaucaagauccccacccaccgccacaucaccggcaagcccugccccaagccgcaccggcugaaccacauggggaucugcuccugcggccuguacaagcaccccggggugcccgugaaguggaagcgcugaggacuagucccuguucccagagcccacuuuuuuuucuuuuuuugaaauaaaauagccugucuuucagaucucaaaggcucuuuucagagccaccaaaaaaaaaaaaaaaaaaaaaaaaaaaaaaaaaaaaaaaaaaaaaaaaaaaaaaaaaaaaaaaaagaauu

SEQ ID NO: 33710 - RNA, 1733 nt, Artificial Sequence
  mRNA product Design a-2 (hSL-A64-N5) comprising derived and/or modified sequence from LASV(ISTH2010-NIG-2012;Clade II)__AIT17482__GPCmut8 (opt1)
aggagaguccgcucagccagguugcagaagcggcuuagcguguguccuaaucuucucucugcguguagguaggccugugccgcaaacaagcuuaccaugggccagaucaucaccuucuuccaggaggugccccacgucaucgaggaggugaugaacaucgugcugaucgcccucagccugcuggccauccucaaggggaucuacaacgucgcgaccugcggccuguucgggcugguguccuuccuccugcugugcggccgcagcugcuccacgaccuacaaggggguguacgagcuccagacccuggagcuggacauggccagccucaacaugugcaugccgcuguccugcaccaagaacaacagccaccacuacaucauggucggcaacgagacgggccuggagcucacccugaccaacaccuccaucaucaaccacaaguucugcaaccugagcgacgcccacaagaagaaccucuacgaccacgcccugauguccaucaucagcacguuccaccuguccauccccaacuucaaccaguacgaggccaugagcugcgacuucaacgggggcaagaucuccgugcaguacaaccucagccacgcguacgccguggacgccgccaaccacugcgggaccaucgcgaacggcguccugcagaccuucaugcggauggccuggggcggguccuacaucgcccuggacagcggcaagggguccugggacugcaucaugaccagcuaccaguaccucaucauccagaacaucacgugggaggaccacugccaguucucccgccccagccccaucggcuaccuggggcugcucagccagcggacccgcgacaucuacaucucccggcgccugcugggcaccuucaccuggacgcucagcgacuccgagggcaacgagacccccgggggcuacugccugacccgguggaugcugaucgaggccgagcucaagugcuucgggaacaccgccguggcgaagugcaacgagaagcacgacgaggaguucugcgacaugcugcgccuguucgacuucugcaagcaggccauccggcgccucaagacgccggcccagaugagcauccagcugaucaacaaggccgugaacgcccugaucaacgaccagcucaucaugaagaaccaccuccgggacaucaugggcauccccuacugcaacuacuccaaguacugcuaccugaaccacaccgucaccgggaagaccagccugccccgcugcugccugguguccaacggcagcuaccugaacgagacgcacuucuccgacgacaucgagcagcaggcggacaacaugaucaccgagcuccugcagaaggaguacaucgaccggcagggcaagaccccgcuggggcugguggaccucuucgucuucagcaccuccuucuaccugaucagcaucuuccugcaccucgugaagauccccacgcaccgccacguggucggcaagcccugccccaagccgcaccggcugaaccacauggggaucugcuccugcggccuguacaagcaccccggggugcccgugaaguggaagcgcugaggacuagucccuguucccagagcccacuuuuuuuucuuuuuuugaaauaaaauagccugucuuucagaucucaaaggcucuuuucagagccaccaaaaaaaaaaaaaaaaaaaaaaaaaaaaaaaaaaaaaaaaaaaaaaaaaaaaaaaaaaaaaaaaagaauu

SEQ ID NO: 33711 - RNA, 1733 nt, Artificial Sequence
  mRNA product Design a-2 (hSL-A64-N5) comprising derived and/or modified sequence from LASV(Lassa virus/H.sapiens-wt/NGA/2015/ISTH_0543;Clade II)__AVO03639__GPCmut8 (opt1)
aggagaguccgcucagccagguugcagaagcggcuuagcguguguccuaaucuucucucugcguguagguaggccugugccgcaaacaagcuuaccaugggccagaucaucaccuucuuccaggaggugccccacgucaucgaggaggugaugaacaucgugcugaucgcccucagccugcuggccauccucaaggggaucuacaacgucgcgaccugcggccuguucgggcugguguccuuccuccugcugugcggccgcagcugcuccacgaccuacaaggggguguacgagcuccagacccuggagcuggacauggccaaccucaacaugugcaugccgcugagcugcaccaagaacaacucccaccacuacaucauggucggcaacgagacgggccuggagcucacccugaccaacaccagcaucaucaaccacaaguucugcaaccuguccgacgcccacaagaagaaccucuacgaccacgcccugaugagcaucaucuccacguuccaccugagcauccccaacuucaaccaguacgaggccauguccugcgacuucaacgggggcaagaucagcgugcaguacaaccucucccacaccuacgcgguggacgccgccaaccacugcgggaccaucgccaacggcguccugcagaccuucaugcggauggcguggggcgggagcuacaucgcccuggacuccggcaaggggagcugggacugcaucaugacguccuaccaguaccucgugauccagaacaccaccugggaggaccacugccaguucagccgccccucccccaucggcuaccuggggcugcucagccagcggacccgcgacaucuacaucagccggcgccugcugggcacguucaccuggacccucuccgacagcgagggcaacgagacccccgggggcuacugccugacgcgguggaugcugaucgaggccgagcucaagugcuucgggaacaccgccguggccaagugcaacgagaagcacgacgaggaguucugcgacaugcugcgccuguucgacuucugcaagcaggcgauccggcgccucaagaccccggcccagauguccauccagcugaucaacaaggccgucaacgcccugaucaacgaccagcucaucaugaagaaccaccuccgggacaucaugggcauccccuacugcaacuacagcaaguacugcuaccugaaccacaccgugacggggaagaccucccugccccgcugcugccuggugagcaacggcuccuaccugaacgagacccacuucagcgacgacaucgagcagcaggccgacaacaugaucaccgagcuccugcagaaggaguacaucgaccggcagggcaagacgccgcuggggcuggucgaccucuucguguucuccaccagcuucuaccugaucuccaucuuccugcaccucgugaagauccccacccaccgccacaucaccggcaagcccugccccaagccgcaccggcugaaccacauggggaucugcagcugcggccuguacaagcaccccgggguccccgugaaguggaagcgcugaggacuagucccuguucccagagcccacuuuuuuuucuuuuuuugaaauaaaauagccugucuuucagaucucaaaggcucuuuucagagccaccaaaaaaaaaaaaaaaaaaaaaaaaaaaaaaaaaaaaaaaaaaaaaaaaaaaaaaaaaaaaaaaaagaauu

SEQ ID NO: 33712 - RNA, 1733 nt, Artificial Sequence
  mRNA product Design a-2 (hSL-A64-N5) comprising derived and/or modified sequence from LASV(Lassa virus/H.sapiens-wt/NGA/2016/ISTH_0009;Clade II)__AVO03571__GPCmut8 (opt1)
aggagaguccgcucagccagguugcagaagcggcuuagcguguguccuaaucuucucucugcguguagguaggccugugccgcaaacaagcuuaccaugggccagaucaucaccuucuuccaggaggugccccacgucaucgaggaggugaugaacaucgugcugaucgcccucagccugcuggccauccucaaggggaucuacaacgucgcgaccugcggccugcuggggcucguguccuuccugcugcucugcggccgcagcugcuccacgaccuacaaggggguguacgagcugcagacccuggagcucgacauggccagccugaacaugugcaugccgcuguccugcaccaagaacaacagccaccacuacaucauggucggcaacgagacgggccucgagcugacccugaccaacaccuccaucaucaaccacaaguucugcaaccucagcgacgcccacaagaagaaccuguacgaccacgcccugauguccaucaucagcacguuccaccucuccauccccaacuucaaccaguacgaggccaugagcugcgacuucaacgggggccggaucuccgugcaguacaaccugagccacuccuacgcgguggacgccgccaaccacugcgggaccaucgccaacggcguccugcagaccuucaugcgcauggcguggggcgggagcuacaucgcccucgacuccggcaaggggagcugggacugcaucaugaccuccuaccaguaccugaucauccagaacacgaccugggaggaccacugccaguucagccggcccagccccaucggcuaccuggggcuccugucccagcgcacccgggacaucuacaucagccgccggcugcucggcaccuucacguggacccuguccgacagcgagggcaacgagacccccgggggcuacugccugacccgcuggaugcucaucgaggccgagcugaagugcuucgggaacacggccguggccaagugcaacgagaagcacgacgaggaguucugcgacaugcugcggcuguucgacuucugcaagcaggcgauccgccggcugaagaccccggcccagauguccauccagcugaucaacaaggccgugaacgcccucaucaacgaccagcugaucaugaagaaccaccuccgcgacaucaugggcauccccuacugcaacuacagcaaguacugcuaccucaaccacaccgucaccgggaagacgucccugccccggugcugccuggugagcaacggcuccuaccucaacgagacccacuucagcgacgacaucgagcagcaggccgacaacaugaucaccgagcugcugcagaaggaguacaucgaccgccagggcaagaccccgcuggggcucguggaccuguucgucuucuccacgagcuucuaccugaucuccaucuuccuccaccuggugaagauccccacccaccggcacaucaccggcaagcccugccccaagccgcaccgccugaaccacauggggaucugcagcugcggccucuacaaccaccccggggugcccgucaaguggaagcggugaggacuagucccuguucccagagcccacuuuuuuuucuuuuuuugaaauaaaauagccugucuuucagaucucaaaggcucuuuucagagccaccaaaaaaaaaaaaaaaaaaaaaaaaaaaaaaaaaaaaaaaaaaaaaaaaaaaaaaaaaaaaaaaaagaauu

SEQ ID NO: 33713 - RNA, 1733 nt, Artificial Sequence
  mRNA product Design a-2 (hSL-A64-N5) comprising derived and/or modified sequence from LASV(Lassa virus/H.sapiens-wt/NGA/2016/ISTH_0017;Clade II)__AVO03567__GPCmut8 (opt1)
aggagaguccgcucagccagguugcagaagcggcuuagcguguguccuaaucuucucucugcguguagguaggccugugccgcaaacaagcuuaccaugggccagaucaucaccuucuuccaggaggugccccacgucaucgaggaggugaugaacaucgugcugaucgcccucagccugcuggccauccucaaggggaucuacaacgucgcgaccugcggccuguucgggcugguguccuuccuccugcugugcggccgcagcugcuccacgaccuacaaggggguguacgagcuccagacccuggagcuggacauggccagccucaacaugugcaugccgcuguccugcaccaagaacaacagccaccacuacaucauggucggcaacgagacgggccuggagcucacccugaccaacaccuccaucaucaaccacaaguucugcaaccugagcgacgcccacaagaagaaccucuacgaccacgcccugauguccaucaucagcacguuccaccuguccauccccaacuucaaccaguacgaggccaugagcugcgacuucaacgggggcaagaucuccgugcaguacaaccucagccacaccuacgcgaucgacgccgccaaccacugcgggaccaucgccaacggcgugcugcagaccuucaugcggauggcguggggcggguccuacaucgcccuggacagcggcaagggguccugggacugcaucaugacgagcuaccaguaccucaucauccagaacaccaccugggaggaccacugccaguucucccgccccagccccaucggcuaccuggggcugcucagccagcggacccgcgacaucuacaucucccggcgccugcugggcacguucaccuggacccucagcgacuccgagggcaacgagacccccgggggcuacugccugacgcgguggaugcugaucgaggccgagcucaagugcuucgggaacaccgccgucgccaagugcaacgagaagcacgacgaggaguucugcgacaugcugcgccuguucgacuucugcaagcaggcgauccggcgccucaagaccccggcccagaugagcauccagcugaucaacaaggccgugaacgcccugaucaacgaccagcucaucaugaagaaccaccuccgggacaucaugggcauccccuacugcaacuacuccaaguacugcuaccugaaccacaccgugacggggaagaccagccugccccgcugcugccuggucuccaacggcagcuaccugaacgagacccacuucuccgacgacaucgagcagcaggccgacaacaugaucaccgagcuccugcagaaggaguacauggaccggcagggcaagacgccgcuggggcugguggaccucuucguguucagcaccuccuucuaccugaucagcaucuuccugcaccucguccgcauccccacccaccggcacgugaucggcaagcccugccccaagccgcaccgccugaaccacauggggaucugcuccugcggccuguacaagcaccccggggugcccgucaaguggaagcggugaggacuagucccuguucccagagcccacuuuuuuuucuuuuuuugaaauaaaauagccugucuuucagaucucaaaggcucuuuucagagccaccaaaaaaaaaaaaaaaaaaaaaaaaaaaaaaaaaaaaaaaaaaaaaaaaaaaaaaaaaaaaaaaaagaauu

SEQ ID NO: 33714 - RNA, 1733 nt, Artificial Sequence
  mRNA product Design a-2 (hSL-A64-N5) comprising derived and/or modified sequence from LASV(Lassa virus/H.sapiens-wt/NGA/2018/ISTH_0959;Clade II)__AVV65099__GPCmut8 (opt1)
aggagaguccgcucagccagguugcagaagcggcuuagcguguguccuaaucuucucucugcguguagguaggccugugccgcaaacaagcuuaccaugggccagaucaucaccuucuuccaggaggugccccacgucaucgaggaggugaugaacaucgugcugaucgcccucagccugcuggccauccucaaggggaucuacaacgucgugaccugcggccuguucgggcugguguccuuccuccugcugugcggccgcagcugcuccacgaccuacaagggggucuacgagcuccagacccuggagcuggacauggcgagccucaacaugugcaugccgcuguccugcaccaagaacaacagccaccacuacaucauggugggcaacgagacgggccuggagcucacccugaccaacaccuccaucaucaaccacaaguucugcaaccugagcgacgcccacaagaagaaccucuacgaccacgcccugauguccaucaucagcacguuccaccuguccauccccaacuucaaccaguacgaggccaugagcugcgacuucaacgggggcaagaucuccgugcaguacaaccucagccacgccuacgcgaucgacgccgccaaccacugcgggaccaucgccaacggcguccugcagaccuucaugcggauggcguggggcggguccuacaucgcccuggacagcggcaagggguccugggacugcaucaugaccagcuaccaguaccucaucauccagaacacgaccugggaggaccacugccaguucucccgccccagccccaucggcuaccuggggcugcucagccagcggacccgcgacaucuacaucucccggcgccugcugggcaccuucacguggacccucagcgacuccgagggcaacgagacccccgggggcuacugccugacccgguggaugcugaucgaggccgagcucaagugcuucgggaacacggccguggccaagugcaacgagaagcacgacgaggaguucugcgacaugcugcgccuguucgacuucugcaagcaggcgauccggcgccucaagaccccggcccagaugagcauccagcugaucaacaaggccgugaacgcccugaucaacgaccagcucaucaugaagaaccaccuccgggacaucaugggcauccccuacugcaacuacuccaaguacugcuaccugaaccacaccgucaccgggaagacgagccugccccgcugcugccugguguccaacggcagcuaccugaacgagacccacuucuccgacgacaucgagcagcaggccgacaacaugaucaccgagcuccugcagaaggaguacaucgaccggcagggcaagaccccgcuggggcugguggaccucuucgucuucagcacguccuucuaccugaucagcaucuuccugcaccucgugaagauccccacccaccgccacgugaucggcaagcccugccccaagccgcaccggcugaaccacauggggaucugcuccugcggccuguacaagcaccccgggguccccgugaaguggaagcgcugaggacuagucccuguucccagagcccacuuuuuuuucuuuuuuugaaauaaaauagccugucuuucagaucucaaaggcucuuuucagagccaccaaaaaaaaaaaaaaaaaaaaaaaaaaaaaaaaaaaaaaaaaaaaaaaaaaaaaaaaaaaaaaaaagaauu

SEQ ID NO: 33715 - RNA, 1733 nt, Artificial Sequence
  mRNA product Design a-2 (hSL-A64-N5) comprising derived and/or modified sequence from LASV(LASV003-NIG-2008;Clade II)__AIT17580__GPCmut8 (opt1)
aggagaguccgcucagccagguugcagaagcggcuuagcguguguccuaaucuucucucugcguguagguaggccugugccgcaaacaagcuuaccaugggccagaucaucaccuucuuccaggaggugccccacgucaucgaggaggugaugaacaucgugcugaucgcccucagccugcuggccauccucaaggggaucuacaacgucgcgaccugcggccuguucgggcugguguccuuccuccugcugugcggccgcagcugcuccacgaccuacaaggggguguacgagcuccagacccuggagcuggacauggccagccucaacaugugcaugccgcuguccugcaccaagaacaacagccaccacuacaucauggucggcaacgagacgggccuggagcucacccugaccaacaccuccaucaucaaccacaaguucugcaaccugagcgacgcccacaagaagaaccucuacgaccacgcccugauguccaucaucagcacguuccaccuguccauccccaacuucaaccaguacgaggccaugagcugcgacuucaacgggggcaagaucuccgugcaguacaaccucagccacaccuacgcgguggacgccgccaaccacugcgggaccaucgccaacggcguccugcagaccuucaugcggauggcguggggcggguccuacaucgcccuggacagcggcaagggguccugggacugcaucaugacgagcuaccaguaccucaucauccagaacaccaccugggaggaccacugccaguucucccgccccagccccaucggcuaccuggggcugcucagccagcggacccgcgacaucuacaucucccggcgccugcugggcacguucaccuggacccucagcgacuccgagagcaacgagaccccgggcggguacugccugacgcgguggaugcugaucgaggccgagcucaagugcuucggcaacaccgccguggccaagugcaacgagaagcacgacgaggaguucugcgacaugcugcgccuguucgacuucugcaagcaggcgauccggcgccucaaggcccccgcccagauguccauccagcugaucaacaaggccgugaacgcccugaucaacgaccagcucaucaugaagaaccaccuccgggacaucauggggauccccuacugcaacuacagcaaguacugcuaccugaaccacaccgucaccggccgcacgucccugccccggugcugccuggugagcaacggguccuaccugaacgagacccacuucagcgacgacaucgagcagcaggcggacaacaugaucaccgagcuccugcagaaggaguacauggaccgccagggcaagaccccgcugggccugguggaccucuucgucuucuccacgagcuucuaccugaucuccaucuuccugcaccucgugaagauccccacccaccggcacgugaucgggaagcccugccccaagccgcaccgccugaaccacaugggcaucugcagcugcgggcuguacaagcaccccggcguccccgugaaguggaagcggugaggacuagucccuguucccagagcccacuuuuuuuucuuuuuuugaaauaaaauagccugucuuucagaucucaaaggcucuuuucagagccaccaaaaaaaaaaaaaaaaaaaaaaaaaaaaaaaaaaaaaaaaaaaaaaaaaaaaaaaaaaaaaaaaagaauu

SEQ ID NO: 33716 - RNA, 1733 nt, Artificial Sequence
  mRNA product Design a-2 (hSL-A64-N5) comprising derived and/or modified sequence from LASV(LASV035-NIG-2009;Clade II)__AIT17588__GPCmut8 (opt1)
aggagaguccgcucagccagguugcagaagcggcuuagcguguguccuaaucuucucucugcguguagguaggccugugccgcaaacaagcuuaccaugggccagaucaucaccuucuuccaggaggugccccacgucaucgaggaggugaugaacaucgugcugaucgcccucagccugcuggccauccucaaggggaucuacaacgucgcgaccugcggccuguucgggcugguguccuuccuccugcugugcggccgcagcugcuccacgaccuacaaggggguguacgagcuccagacccuggagcuggacauggccagccucaacaugugcaugccgcuguccugcaccaagaacaacagccaccacuacaucauggucggcaacgagacgggccuggagcucacccugaccaacaccuccaucaucaaccacaaguucugcaaccugagcgacgcccacaagaagaaccucuacgaccacgcccugauguccaucaucagcacguuccaccuguccauccccaacuucaaccaguacgaggccaugagcugcgacuucaacgggggcaagaucuccgugcaguacaaccucagccacgcguacgccguggacgccgccaaccacugcgggaccaucgcgaacggcguccugcagaccuucaugcggauggccuggggcggguccuacaucgcccuggacagcggcaagggguccugggacugcaucaugaccagcuaccaguaccucaucauccagaacacgaccugggaggaccacugccaguucucccgccccagccccaucggcuaccuggggcugcucagccagcggacccgcgacaucuacaucucccggcgccugcugggcaccuucacguggacccucagcgacuccgagggcaacgagacccccgggggcuacugccugacccgguggaugcugaucgaggccgagcucaagugcuucgggaacacggccguggcgaagugcaacgagaagcacgacgaggaguucugcgacaugcugcgccuguucgacuucugcaagcaggccauccggcgccucaaggccccggcccagaugagcauccagcugaucaacaaggccgugaacgcgcugaucaacgaccagcucaucaugaagaaccaccuccgggacaucaugggcauccccuacugcaacuacuccaaguacugcuaccugaaccacaccgucaccgggaagaccagccugccccgcugcugccugguguccaacggcagcuaccugaacgagacgcacuucuccgacgacaucgagcagcaggccgacaacaugaucaccgagcuccugcagaaggaguacaucgaccggcagggcaagaccccgcuggggcugguggaccucuucgucuucagcaccuccuucuaccugaucagcaucuuccugcaccucgugaagauccccacgcaccgccacgugaucggcaagcccugccccaagccgcaccggcugaaccacauggggaucugcuccugcggccuguacaagcaccccgggguccccgugaaguggaagcgcugaggacuagucccuguucccagagcccacuuuuuuuucuuuuuuugaaauaaaauagccugucuuucagaucucaaaggcucuuuucagagccaccaaaaaaaaaaaaaaaaaaaaaaaaaaaaaaaaaaaaaaaaaaaaaaaaaaaaaaaaaaaaaaaaagaauu

SEQ ID NO: 33717 - RNA, 1733 nt, Artificial Sequence
  mRNA product Design a-2 (hSL-A64-N5) comprising derived and/or modified sequence from LASV(LASV1000-NIG-2009;Clade II)__AIT17782__GPCmut8 (opt1)
aggagaguccgcucagccagguugcagaagcggcuuagcguguguccuaaucuucucucugcguguagguaggccugugccgcaaacaagcuuaccaugggccagaucaucaccuucuuccaggaggugccccacgucaucgaggaggugaugaacaucgugcugaucgcccucagccugcuggccauccucaaggggaucuacaacgucgcgaccugcggccuguucgggcugguguccuuccuccugcugugcggccgcagcugcuccacgaccuacaaggggguguacgagcuccagacccuggagcuggacauggccagccucaacaugugcaugccgcuguccugcaccaagaacaacagccaccacuacaucauggucggcaacgagacgggccuggagcucacccugaccaacaccuccaucaucaaccacaaguucugcaaccugagcgacgcccacaagaagaaccucuacgaccacgcccugauguccaucaucagcacguuccaccuguccauccccaacuucaaccaguacgaggccaugagcugcgacuucaacgggggcaagaucuccgugcaguacaaccucagccacaccuacgcgguggacgccgccaaccacugcgggaccaucgccaacggcguccugcagaccuucaugcggauggcguggggcggguccuacaucgcccuggacagcggcaagggguccugggacugcaucaugacgagcuaccaguaccucaucauccagaacaccaccugggaggaccacugccaguucucccgccccagccccaucggcuaccuggggcugcucagccagcggacccgcgacaucuacaucucccggcgccugcugggcacguucaccuggacccucagcgacuccgagggcaacgagacccccgggggcuacugccugacgcgguggaugcugaucgaggccgagcucaagugcuucgggaacaccgccguggccaagugcaacgagaagcacgacgaggaguucugcgacaugcugcgccuguucgacuucugcaagcaggcgaucaagcggcucaagaccccggcccagaugagcauccagcugaucaacaaggccgugaacgcccugaucaacgaccagcucaucaugaagaaccaccuccgcgacaucaugggcauccccuacugcaacuacuccaaguacugcuaccugaaccacaccgucacggggaagaccagccugccccggugcugccugguguccaacggcagcuaccugaacgagacccacuucuccgacgacaucgagcagcaggccgacaacaugaucaccgagcuccugcagaaggaguacaucgaccgccagggcaagacgccgcuggggcugguggaccucuucgucuucagcaccuccuucuaccugaucagcaucuuccugcaccucgugaagauccccacccaccggcacguggucggcaagcccugccccaagccgcaccgccugaaccacauggggaucugcuccugcggccuguacaagcaccccggggugcccgugaaguggaagcggugaggacuagucccuguucccagagcccacuuuuuuuucuuuuuuugaaauaaaauagccugucuuucagaucucaaaggcucuuuucagagccaccaaaaaaaaaaaaaaaaaaaaaaaaaaaaaaaaaaaaaaaaaaaaaaaaaaaaaaaaaaaaaaaaagaauu

SEQ ID NO: 33718 - RNA, 1733 nt, Artificial Sequence
  mRNA product Design a-2 (hSL-A64-N5) comprising derived and/or modified sequence from LASV(LASV221-NIG-2010;Clade II)__AIT17624__GPCmut8 (opt1)
aggagaguccgcucagccagguugcagaagcggcuuagcguguguccuaaucuucucucugcguguagguaggccugugccgcaaacaagcuuaccaugggccagaucaucaccuucuuccaggaggugccccacgucaucgaggaggugaugaacaucgugcugaucgcccucagccugcuggccauccucaaggggaucuacaacgucgcgaccugcggccuguucgggcugguguccuuccuccugcugugcggccgcagcugcuccacgaccuacaaggggguguacgagcuccagacccuggagcuggacauggccagccucaacaugugcaugccgcuguccugcaccaagaacaacagccaccacuacaucauggucggcaacgagacgggccuggagcucacccugaccaacaccuccaucaucaaccacaaguucugcaaccugagcgacgcccacaagaagaaccucuacgaccacgcccugauguccaucaucagcacguuccaccuguccauccccaacuucaaccaguacgaggccaugagcugcgacuucaacgggggcaagaucuccgugcaguacaaccucagccacaccuacgcgaucgacgccgccaaccacugcgggaccaucgccaacggcgugcugcagaccuucaugcggauggcguggggcggguccuacaucgcccuggacagcggcaagggguccugggacugcaucaugacgagcuaccaguaccucaucauccagaacaccaccugggaggaccacugccaguucucccgccccagccccaucggcuaccuggggcugcucagccagcggacccgcgacaucuacaucucccggcgccugcugggcacguucaccuggacccucagcgacuccgagggcaacgagacccccgggggcuacugccugacgcgguggaugcugaucgaggccgagcucaagugcuucgggaacaccgccgucgccaagugcaacgagaagcacgacgaggaguucugcgacaugcugcgccuguucgacuucugcaagcaggcgauccggcgccucaagaccccggcccagaugagcauccagcugaucaacaaggccgugaacgcccugaucaacgaccagcucaucaugaagaaccaccuccgggacaucaugggcauccccuacugcaacuacuccaaguacugcuaccugaaccacaccgugacggggaagaccagccugccccgcugcugccuggucuccaacggcagcuaccugaacgagacccacuucuccgacgacaucgagcagcaggccgacaacaugaucaccgagaugcuccagaaggaguacauggaccggcagggcaagacgccgcuggggcugguggaccuguucguguucagcaccuccuucuaccucaucagcaucuuccugcaccuggucaagauccccacccaccgccacgugaucggcaagcccugccccaagccgcaccggcucaaccacauggggaucugcuccugcggccuguacaagcaccccggggugcccgucaaguggaagcgcugaggacuagucccuguucccagagcccacuuuuuuuucuuuuuuugaaauaaaauagccugucuuucagaucucaaaggcucuuuucagagccaccaaaaaaaaaaaaaaaaaaaaaaaaaaaaaaaaaaaaaaaaaaaaaaaaaaaaaaaaaaaaaaaaagaauu

SEQ ID NO: 33719 - RNA, 1733 nt, Artificial Sequence
  mRNA product Design a-2 (hSL-A64-N5) comprising derived and/or modified sequence from LASV(LASV237-NIG-2010;Clade II)__AIT17638__GPCmut8 (opt1)
aggagaguccgcucagccagguugcagaagcggcuuagcguguguccuaaucuucucucugcguguagguaggccugugccgcaaacaagcuuaccaugggccagaucaucaccuucuuccaggaggugccccacgucaucgaggaggugaugaacaucgugcugaucgcccucagccugcuggccauccucaaggggaucuacaacgucgcgaccugcggccuguucgggcugguguccuuccuccugcugugcggccgcagcugcuccacgaccuacaaggggguguacgagcuccagacccuggagcuggacauggccagccucaacaugugcaugccgcuguccugcaccaagaacaacagccaccacuacaucauggucggcaacgagacgggccuggagcucacccugaccaacaccuccaucaucaaccacaaguucugcaaccugagcgacgcccacaagaaggaccucuacgaccacgcccugauguccaucaucagcacguuccaccuguccauccccaacuucaaccaguacgaggccaugagcugcgacuucaacgggggcaagaucuccgugcaguacaaccucagccacaccuacgcgguggacgccgccaaccacugcgggaccaucgccaacggcguccugcagaccuucaugcggauggcguggggcggguccuacaucgcccuggacagcggcaagggguccugggacugcaucaugacgagcuaccaguaccucaucauccagaacaccaccugggaggaccacugccaguucucccgccccagccccaucggcuaccuggggcugcucagccagcggacccgcgacaucuacaucucccggcgccugcugggcacguucaccuggacccucagcgacuccgagggcaacgagacccccgggggcuacugccugacgcgguggaugcugaucgaggccgagcucaagugcuucgggaacaccgccguggccaagugcaacgagaagcacgacgaggaguucugcgacaugcugcgccuguucgacuucugcaagcaggcgauccggcgccucaagaccccggcccagaugagcauccagcugaucaacaaggccgugaacgcccugaucaacgaccagcucaucaugaagaaccaccuccgggacaucaugggcauccccuacugcaacuacuccaaguacugcuaccugaaccacaccgucacggggaagaccagccugccccgcugcugccugguguccaacggcagcuaccugaacgagacccacuucuccgacgacaucgagcagcaggccgacaacaugaucaccgagcuccugcagaaggaguacauggaccggcagggcaagacgccgcuggggcugguggaccucuucgucuucagcaccuccuucuaccugaucagcaucuuccugcaccucaucaagauccccacccaccgccacaucaccggcaagcccugccccaagccgcaccggcugaaccacauggggaucugcuccugcggccuguacaagcaccccggggugcccgugaaguggaagcgcugaggacuagucccuguucccagagcccacuuuuuuuucuuuuuuugaaauaaaauagccugucuuucagaucucaaaggcucuuuucagagccaccaaaaaaaaaaaaaaaaaaaaaaaaaaaaaaaaaaaaaaaaaaaaaaaaaaaaaaaaaaaaaaaaagaauu

SEQ ID NO: 33720 - RNA, 1733 nt, Artificial Sequence
  mRNA product Design a-2 (hSL-A64-N5) comprising derived and/or modified sequence from LASV(LASV253-NIG-2011;Clade II)__AIT17670__GPCmut8 (opt1)
aggagaguccgcucagccagguugcagaagcggcuuagcguguguccuaaucuucucucugcguguagguaggccugugccgcaaacaagcuuaccaugggccagaucaucaccuucuuccaggaggugccccacgucaucgaggaggugaugaacaucgugcugaucgcccucagccugcuggccauccucaaggggaucuacaacgucgcgaccugcggccuguucgggcugguguccuuccuccugcugugcggccgcagcugcuccacgaccuacaaggggguguacgagcuccagacccuggagcuggacauggccagccucaacaugugcaugccgcuguccugcaccaagaacaacagccaccacuacaucauggucggcaacgagacgggccuggagcucacccugaccaacaccuccaucaucaaccacaaguucugcaaccugagcgacgcccacaagaagaaccucuacgaccacgcccugauguccaucaucagcacguuccaccuguccauccccaacuucaaccaguacgaggccaugagcugcgacuucaacgggggcaagaucuccgugcaguacaaccucagccacaccuacgcgguggacgccgccaaccacugcgggaccaucgccaacggcguccugcagaccuucaugcggauggcguggggcggguccuacaucgcccuggacagcggcaagggguccugggacugcaucaugacgagcuaccaguaccucaucauccagaacaccaccugggaggaccacugccaguucucccgccccagccccaucggcuaccuggggcugcucagccagcggacccgcgacaucuacaucucccggcgccugcugggcacguucaccuggacccucagcgacuccgagggcaacgagacccccgggggcuacugccugacgcgguggaugcugaucgaggccgagcucaagugcuucgggaacaccgccguggccaagugcaacgagaagcacgacgaggaguucugcgacaugcugcgccuguucgacuucugcaagcaggcgauccggcgccucaaggccccggcccagaugagcauccagcugaucaacaaggccgugaacgcccugaucaacgaccagcucaucaugaagaaccaccuccgggacaucaugggcauccccuacugcaacuacuccaaguacugcuaccugaaccacaccgucaccgggcgcacgagccugccccggugcugccugguguccaacggcagcuaccugaacgagacccacuucuccgacgacaucgagcagcaggcggacaacaugaucaccgagcuccugcagaaggaguacaucgaccgccagggcaagaccccgcuggggcugguggaccucuucgucuucagcacguccuucuaccugaucagcaucuuccugcaccucgugaagauccccacccaccggcacaucaucggcaagcccugccccaagccgcaccgccugaaccacauggggaucugcuccugcggccuguacaagcaccccggggugcccgucaaguggaagcggugaggacuagucccuguucccagagcccacuuuuuuuucuuuuuuugaaauaaaauagccugucuuucagaucucaaaggcucuuuucagagccaccaaaaaaaaaaaaaaaaaaaaaaaaaaaaaaaaaaaaaaaaaaaaaaaaaaaaaaaaaaaaaaaaagaauu

SEQ ID NO: 33721 - RNA, 1733 nt, Artificial Sequence
  mRNA product Design a-2 (hSL-A64-N5) comprising derived and/or modified sequence from LASV(LASV254-NIG-2011;Clade II)__AIT17674__GPCmut8 (opt1)
aggagaguccgcucagccagguugcagaagcggcuuagcguguguccuaaucuucucucugcguguagguaggccugugccgcaaacaagcuuaccaugggccagaucaucaccuucuuccaggaggugccccacgucaucgaggaggugaugaacaucgugcugaucgcccucagccugcuggccauccucaaggggaucuacaacgucgcgaccugcggccuguucgggcugguguccuuccuccugcugugcggccgcagcugcuccacgaccuacaaggggguguacgagcuccagacccuggagcuggacaugaccaaccucaacaugugcaugccgcugagcugcacgaagaacaacucccaccacuacaucauggucggcaacgagaccggccuggagcucacccugaccaacacgagcaucaucaaccacaaguucugcaaccuguccgacgcccacaagaagaaccucuacaaccacgcccugaugagcaucaucuccaccuuccaccugagcauccccaacuucaaccaguacgaggccauguccugcgacuucaacgggggcaagaucagcgugcaguacaaccucucccacagcuacgccguggacgcggccaaccacugcgggaccaucgccaacggcguccugcagaccuucaugcggauggccuggggcggguccuacaucgcgcuggacagcggcaaggggaacugggacugcaucaugacguccuaccaguaccucaucauccagaacaccaccugggaggaccacugccaguucagccgccccucccccaucggcuaccuggggcugcucagccagcggacccgcgacaucuacaucagccggcgccugcugggcacguucaccuggacccucuccgacagcgagggcaacgagacccccgggggcuacugccugacgcgguggaugcugaucgaggccgagcucaagugcuucgggaacaccgccguggccaagugcaacgagaagcacgacgaggaguucugcgacaugcugcgccuguucgacuucugcaagcaggccauccggcgccucaagaccccggcgcaggccaacauccagcugaucaacaaggccgugaacgcccugaucaacgaccagcucaucaugaagaaccaccuccgggacaucaugggcauccccuacugcaacuacuccaaguacugcuaccugaaccacaccgucacggggaagaccagccugccccgcugcugccugguguccaacggcagcuaccugaacgagacccacuucuccgacgacaucgagcagcaggccgacaacaugaucaccgagcuccugcagaaggaguacauggaccggcagggcaagacgccgcuggggcugguggaccucuucgucuucagcaccuccuucuaccugaucagcaucuuccugcaccucgugaagauccccacccaccgccacgugaucggcaagcccugccccaagccgcaccggcugaaccacauggggaucugcuccugcggccuguacaagcaccccgggguccccgugaaguggaagcgcugaggacuagucccuguucccagagcccacuuuuuuuucuuuuuuugaaauaaaauagccugucuuucagaucucaaaggcucuuuucagagccaccaaaaaaaaaaaaaaaaaaaaaaaaaaaaaaaaaaaaaaaaaaaaaaaaaaaaaaaaaaaaaaaaagaauu

SEQ ID NO: 33722 - RNA, 1733 nt, Artificial Sequence
  mRNA product Design a-2 (hSL-A64-N5) comprising derived and/or modified sequence from LASV(Nig08-A19;Clade III)__ADU56618__GPCmut8 (opt1)
aggagaguccgcucagccagguugcagaagcggcuuagcguguguccuaaucuucucucugcguguagguaggccugugccgcaaacaagcuuaccaugggccagaucgugaccuucuuccaggaggucccccacgugaucgaggaggugaugaacaucguccugaucgcccucagcauccuggccauccugaaggggcucuacaacaucgcgaccugcggccugaucgggcuggugacguuccuccugcuguccggccgcagcugcuccaugaccuacaaggggguguacgagcuccagacccuggagcugaacaugaacacccucaacaugugcaugccgcugagcugcacgaagaacaacucccaccacuacaucauggucggcaacgagaccggccuggagcucacccugaccaacacgagccugcuccaccacaaguucugcaaccuguccgacgcccacaagaagaaccuguacgaccacacccucaugagcaucaucuccaccuuccaccugagcauccccaacuucaaccaguacgaggccauguccugcgacuucaacgggggcaagaucaccgugcaguacaaccugagccacuccuacgccaucgacgccgcgaaccacugcgggacgguggccaacggcguccuccagaccuucaugcggauggccuggggcgggagcuacaucgcccuggacuccggccgcgggaagugggacugcaucaugaccagcuaccaguaccugaucauccagaacaccacgugggaggaccacugccaguucucccggcccagccccaucggcuaccucgggcugcugucccagcgcacccgggacaucuacaucagccgccggcuccugggcaccuucaccuggacgcugagcgacuccgagggcaacgagacccccgggggcuacugccucacccgcuggaugcugaucgaggcggagcugaagugcuucgggaacaccgccguggccaagugcaacgagaagcacgacgaggaguucugcgacaugcuccggcuguucgacuucugcaagcaggccauccgccggcugaaggccccggcgcagaugagcauccagcucaucaacaaggccgugaacgcccugaucaacgaccagcugaucaugaagaaccaccuccgcgacaucaugggcauccccuacugcaacuacuccaaguacugcuaccugaaccacacgagcaccgggcggaccucccugccccgcugcugccucgucagcaacggcuccuaccugaacgagacccacuucagcgacgacaucgagcagcaggccgacaacaugaucacggagaugcugcagaaggaguaccuggaccggcagggcaagaccccgcucgggcugguggaccuguucguguucuccaccagcuucuaccucaucuccaucuuccugcaccuggucaagauccccacccaccgccacaucgugggcaagcccugccccaagccgcaccggcucaaccacauggggaucugcagcugcggccuguacaagcagcccggggugcccguccgcuggaagcggugaggacuagucccuguucccagagcccacuuuuuuuucuuuuuuugaaauaaaauagccugucuuucagaucucaaaggcucuuuucagagccaccaaaaaaaaaaaaaaaaaaaaaaaaaaaaaaaaaaaaaaaaaaaaaaaaaaaaaaaaaaaaaaaaagaauu

SEQ ID NO: 33723 - RNA, 1736 nt, Artificial Sequence
  mRNA product Design a-2 (hSL-A64-N5) comprising derived and/or modified sequence from LASV(G1180-SLE-2010;Clade IV)__AIT17168__GPCmut8 (opt1)
aggagaguccgcucagccagguugcagaagcggcuuagcguguguccuaaucuucucucugcguguagguaggccugugccgcaaacaagcuuaccaugggccagaucgugaccuucuuccaggaggucccccacgugaucgaggaggugaugaacaucguccugaucgcccucagcauccuggccgugcugaaggggcucuacaacuucgcgaccugcggccugguggggcugcucacguuccugcugcucugcggccgcuccugcaccgccagccgguacaagggggucuacgagcugcagacccuggagcucaacauggagacccugaacaugugcaugccgcuguccugcacgaagaacaacagccaccacuacaucauggugggcaacgagaccggccucgagcugacccugaccaacacguccaucaucaaccacaaguucugcaaccucagcgacgcccacaagaagaaccuguacgaccacgcccugauguccaucaucagcaccuuccaccucuccauccccaacuucaaccaguacgaggccaugagcugcgacuucaacgggggcaagaucuccgugcaguacaaccugagccacuccuacgcgggggacgccgccaaccacugcggcaccgucgccaacggggugcugcagaccuucaugcgcauggcguggggcggcagcuacaucgcccucgacuccgggcacggcagcugggacugcaucaugacguccuaccaguaccugaucauccagaacaccaccugggaggaccacugccaguucagccggcccucccccaucggguaccugggccuccugagccagcgcacccgggacaucuacaucagccgccggcugcucggcacguucaccuggacccuguccgacagcgaggggaaggacaccccgggcggguacugccugacgcgcuggaugcucaucgaggccgagcugaagugcuucggcaacaccgccguggccaagugcaacgagaagcacgacgaggaguucugcgacaugcugcggcuguucgacuucugcaagcaggcgauccagcgccugaaggcccccgcccagauguccauccagcugaucaacaaggccgucaacgcccucaucaacgaccagcugaucaugaagaaccaccuccgggacaucauggggauccccuacugcaacuacagcaaguacugcuaccucaaccacaccaccacgggcaagaccucccugcccaagugcugccuggugagcaacggcuccuaccucaacgagacccacuucagcgacgacaucgagcagcaggcggacaacaugaucaccgagaugcugcagaaggaguacauggagcgccaggggaagacgccgcugggccugguggaccucuucgucuucuccaccagcuucuaccugaucuccaucuuccugcaccucgugaagauccccacccaccggcacaucgugggcaagagcugccccaagccccaccgccugaaccacauggggaucugcuccugcgggcuguacaagcagccgggcguccccgugaaguggaagcggugaggacuagucccuguucccagagcccacuuuuuuuucuuuuuuugaaauaaaauagccugucuuucagaucucaaaggcucuuuucagagccaccaaaaaaaaaaaaaaaaaaaaaaaaaaaaaaaaaaaaaaaaaaaaaaaaaaaaaaaaaaaaaaaaagaauu

SEQ ID NO: 33724 - RNA, 1736 nt, Artificial Sequence
  mRNA product Design a-2 (hSL-A64-N5) comprising derived and/or modified sequence from LASV(G1442-SLE-2011;Clade IV)__AIT17180__GPCmut8 (opt1)
aggagaguccgcucagccagguugcagaagcggcuuagcguguguccuaaucuucucucugcguguagguaggccugugccgcaaacaagcuuaccaugggccagaucgugaccuucuuccaggaggucccccacgugaucgaggaggugaugaacaucguccugaucgcccucagcauccuggccgugcugaaggggcucuacaacguggcgaccugcggccugaucgggcuggucacguuccuccugcugugcggccgcuccugcaccaccacccucuacaaggggguguacgagcugcagacgcuggagcucaacauggagacccugaacaugugcaugccgcugagcugcaccaagaacaacucccaccacuacauccgggugggcaacgagaccggccucgagcugacgcugaccaacaccagcaucaucaaccacaaguucugcaaccucuccgacgcccacaagaagaaccuguacgaccacgcccugaugagcaucaucuccaccuuccaccucagcauccccaacuucaaccaguacgaggccauguccugcgacuucaacgggggcaagaucagcguccaguacaaccugucccacagcuacgccggggacgcggccaaccacugcggcacgguggccaacggggugcugcagaccuucaugcgcauggccuggggcggcuccuacaucgcgcucgacagcgggcggggcaacugggacugcaucaugaccuccuaccaguaccugaucauccagaacaccacgugggacgaccacugccaguucagccgccccucccccaucggguaccugggccuccugagccagcggacccgcgacgucuacaucucccggcgccugcucggcaccuucaccuggacgcugagcgacagcgaggggaaggacaccccgggcggguacugccugacccgguggaugcucaucgaggccgagcugaagugcuucggcaacaccgccguggccaagugcaacgagaagcacgacgaggaguucugcgacaugcugcgccucuucgacuucugcaagcaggccauccagcggcugaaggcgcccgcccagauguccauccagcugaucaacaaggccgugaacgcccucaucaacgaccagcugaucaugaagaaccaccuccgcgacaucauggggauccccuacugcaacuacagcaaguacugcuaccugaacaacacggccaccggcaagaccucccugcccaagugcugccugaucagcaacggcuccuaccucaacgagacccacuucagcgacgacaucgagcaggaggcggacaacaugaucacggagaugcugcagaaggaguacauggagcggcaggggaagaccccgcugggccuggucgaccucuucguguucuccaccagcuucuaccugaucuccaucuuccugcaccucgugaagauccccacccaccgccacaucgucggcaagagcugccccaagccccaccggcugaaccacauggggaucugcuccugcgggcuguacaagcagccgggcgugcccgugcgcuggaagcggugaggacuagucccuguucccagagcccacuuuuuuuucuuuuuuugaaauaaaauagccugucuuucagaucucaaaggcucuuuucagagccaccaaaaaaaaaaaaaaaaaaaaaaaaaaaaaaaaaaaaaaaaaaaaaaaaaaaaaaaaaaaaaaaaagaauu

SEQ ID NO: 33725 - RNA, 1736 nt, Artificial Sequence
  mRNA product Design a-2 (hSL-A64-N5) comprising derived and/or modified sequence from LASV(G3010-SLE-2013;Clade IV)__AIT17344__GPCmut8 (opt1)
aggagaguccgcucagccagguugcagaagcggcuuagcguguguccuaaucuucucucugcguguagguaggccugugccgcaaacaagcuuaccaugggccagaucgugaccuucuuccaggaggucccccacgugaucgaggaggugaugaacaucguccugaucgcccucagcauccuggccgugcugaaggggcucuacaacuucgcgaccugcggccugguggggcuggucacguuccuccugcugugcggccgcuccugcaccaccagccucuacaaggggguguacgagcugcagacccuggagcucaacauggagacgcugaacaugugcaugccgcuguccugcaccaagaacaacagccaccacuacaucauggugggcaacgagaccggccucgagcugacccugacgaacaccuccaucaucaaccacaaguucugcaaccucagcgacgcccacaagaagaaccuguacaaccacgcccugauguccaucaucagcaccuuccaccucuccauccccaacuucaaccaguacgaggccaugagcugcgacuucaacgggggcaagaucuccguccaguacaaccugagccacuccuacgccggggacgcggccagccacugcggcaccguggccaacggggugcugcagacguucaugcggauggccuggggcggcuccuacaucgcgcucgacagcggguacggcaagugggacugcaucaugaccuccuaccaguaccugaucauccagaacaccaccugggaggaccacugccaguucagccgccccucccccaucggguaccugggccuccugagccagcggacgcgcgacaucuacaucagccggcgccugcucggcaccuucaccuggacccuguccgacagcgaggggaaggacacgccgggcggguacugccugacccgguggaugcucaucgaggccgagcugaagugcuucggcaacaccgccgucgccaagugcaacgagaagcacgacgaggaguucugcgacaugcugcgccucuucgacuucugcaagcaggccauccagcggcugaagacccccgcgcagauguccauccagcugaucaacaaggccgugaacgcccucaucaacgaccagcugaucaugaagaaccaccuccgcgacaucauggggauccccuacugcaacuacagcaaguacugcuaccugaaccacacgaccaccggcaagaccucccugcccaagugcugccuggugagcaacggcuccuaccucaacgagacgcacuucagcgacgacaucgagcagcaggccgacaacaugaucaccgagaugcugcagaaggaguacauggagcggcaggggaagaccccgcugggccuggucgaccucuucguguucuccaccagcuucuaccugaucuccaucuuccugcaccucgugaagauccccacgcaccgccacaucgucggcaagagcugccccaagccccaccggcugaaccacauggggaucugcuccugcgggcuguacaagcagccgggcgugcccgugcgcuggaagcggugaggacuagucccuguucccagagcccacuuuuuuuucuuuuuuugaaauaaaauagccugucuuucagaucucaaaggcucuuuucagagccaccaaaaaaaaaaaaaaaaaaaaaaaaaaaaaaaaaaaaaaaaaaaaaaaaaaaaaaaaaaaaaaaaagaauu

SEQ ID NO: 33726 - RNA, 1736 nt, Artificial Sequence
  mRNA product Design a-2 (hSL-A64-N5) comprising derived and/or modified sequence from LASV(G502-SLE-2009;Clade IV)__AIT17126__GPCmut8 (opt1)
aggagaguccgcucagccagguugcagaagcggcuuagcguguguccuaaucuucucucugcguguagguaggccugugccgcaaacaagcuuaccaugggccagaucgugaccuucuuccaggaggucccccacgugaucgaggaggugaugaacaucguccugaucgcccucagcauccuggccgugcugaaggggcucuacaacuucgcgaccugcggccugguggggcugcucacguuccugcugcucugcggccgcuccugcaccaccgggcuguacaagggcgucuacgagcugcagacccucgagcugaacauggagacgcugaacaugugcaugccgcucagcugcaccaagaacaacucccaccacuacaucauggugggcaacgagaccgggcuggagcugacccucacgaacaccagcaucaucaaccacaaguucugcaaccuguccgacgcccacaagaagaaccuguacgaccacgcccucaugagcaucaucuccaccuuccaccugagcauccccaacuucaaccaguacgaggccauguccugcgacuucaacggcgggaagaucagcgugcaguacaaccugucccacagcuacgccggcgacgcggccgaccacugcgggaccgucgccaacggcgugcuccagacguucaugcggauggccuggggcggguccuacaucgcgcuggacagcggccgcgggcggugggacugcaucaugaccuccuaccaguaccugaucauccagaacaccaccugggaggaccacugccaguucagccgccccucccccaucggcuaccucggccugcugagccagcggacgcgcgacaucuacaucucccggcgccuccuggggaccuucaccuggacccugagcgacagcgagggcaaggacacgcccgggggcuacugccucacccgguggaugcugaucgaggccgagcugaagugcuucgggaacaccgccguggccaagugcaacgagaagcacgacgaggaguucugcgacaugcuccgccuguucgacuucugcaagcaggccauccagcggcugaaggcgccggcccagauguccauccagcucaucaacaaggccgucaacgcccugaucaacgaccagcuggugaugaagaaccaccuccgcgacaucaugggcauccccuacugcaacuacagccgguacugcuaccugaaccacaccacgaccggccgcaccucccugcccaagugcugccucgugagcaacggguccuaccugaacgagacccacuucagcgacgacaucgagcagcaggccgacaacaugaucacggagaugcugcagaaggaguacauggagcggcagggcaagaccccgcuggggcucgucgaccuguucguguucuccaccagcuucuaccugaucuccaucuuccuccaccuggugaagauccccacccaccgccacaucgucggcaagagcugccccaagccccaccggcugaaccacauggggaucugcuccugcggccucuacaagcagccgggcgugcccgugaaguggaagcgcugaggacuagucccuguucccagagcccacuuuuuuuucuuuuuuugaaauaaaauagccugucuuucagaucucaaaggcucuuuucagagccaccaaaaaaaaaaaaaaaaaaaaaaaaaaaaaaaaaaaaaaaaaaaaaaaaaaaaaaaaaaaaaaaaagaauu

SEQ ID NO: 33727 - RNA, 1736 nt, Artificial Sequence
  mRNA product Design a-2 (hSL-A64-N5) comprising derived and/or modified sequence from LASV(G733-SLE-2010;Clade IV)__AIT17154__GPCmut8 (opt1)
aggagaguccgcucagccagguugcagaagcggcuuagcguguguccuaaucuucucucugcguguagguaggccugugccgcaaacaagcuuaccaugggccagaucgugaccuucuuccaggaggucccccacgugaucgaggaggugaugaacaucguccugaucgcccucagcauccuggccgugcugaaggggcucuacaacuucgcgaccugcggcaucguggggcuggucuccuuccugcuccugugcggccgcagcugcacgaccucccuguacaaggggguguacgagcuccagacccuggagcugaacauggagacccucaacaugugcaugccgcugagcugcacgaagaacaacucccaccacuacaucauggugggcaacgagaccggccuggagcucacccugaccaacacgagcaucaucaaccacaaguucugcaaccuguccgacgcccacaagaagaaccucuacgaccacgcccugaugagcaucaucuccaccuuccaccugagcauccccaacuucaaccaguacgaggccauguccugcgacuucaacgggggcaagaucagcguccaguacaaccucucccacagcuacgccggggacgcggccaaccacugcggcaccaucgccaacggggugcugcagaccuucaugcggauggccuggggcggcuccuacaucgcgcuggacagcgggcgcgaccggugggacugcaucaugacguccuaccaguaccucaucauccagaacaccaccugggaggaccacugccaguucagccgccccucccccaucggcuaccuggggcugcucagccagcggacccgcgacaucuacaucagccggcgccugcugggcacguucaccuggacccucuccgacagcgagggcaaggacacccccgggggcuacugccugacgcgguggaugcugaucgaggccgagcucaagugcuucgggaacaccgccguggccaagugcaacgagaagcacgacgaggaguucugcgacaugcugcgccuguucgacuucugcaagcaggccauccagcggcucaaggcgccggcccagauguccauccagcugaucaacaaggccgucaacgcccugaucaacgaccagcucaucaugaagaaccaccuccgcgacaucaugggcauccccuacugcaacuacagcaaguacugcuaccugaaccacaccaccacggggaagaccucccugcccaagugcugccuggugagcaacggcuccuaccugaacgagacccacuucagcgacgacaucgagcagcaggccgacaacaugaucaccgagaugcuccagaaggaguacauggagcggcagggcaagacgccgcuggggcugguggaccuguucgucuucuccaccagcuucuaccucaucuccaucuuccugcaccuggugaagauccccacccaccgccacguggucggcaagagcugccccaagccccaccggcucaaccacauggggaucugcuccugcggccuguacgggcagccgggcgugcccgugaaguggaagcgcugaggacuagucccuguucccagagcccacuuuuuuuucuuuuuuugaaauaaaauagccugucuuucagaucucaaaggcucuuuucagagccaccaaaaaaaaaaaaaaaaaaaaaaaaaaaaaaaaaaaaaaaaaaaaaaaaaaaaaaaaaaaaaaaaagaauu

SEQ ID NO: 33728 - RNA, 1736 nt, Artificial Sequence
  mRNA product Design a-2 (hSL-A64-N5) comprising derived and/or modified sequence from MOPV/LASV reassortant(IGS-1;Clade IV)__AFY05576__GPCmut8 (opt1)
aggagaguccgcucagccagguugcagaagcggcuuagcguguguccuaaucuucucucugcguguagguaggccugugccgcaaacaagcuuaccaugggccagaucgugaccuucuuccaggaggucccccacgugaucgaggaggugaugaacaucguccugaucgcccucagcgugcuggccgugcugaaggggcucuacaacuucgcgaccugcggccuggucgggcuggugacguuccuccugcugugcggccgcuccugcaccaccagccucuacaaggggguguacgagcugcagacccuggagcucaacauggagacgcugaacaugugcaugccgcuguccugcaccaagaacaacagccaccacuacaucauggucggcaacgagaccggccucgagcugacccugacgaacaccuccaucaucaaccacaaguucugcaaccucagcgacgcccacaagaagaaccuguacgaccacgcccugauguccaucaucagcaccuuccaccucuccauccccaacuucaaccaguacgaggccaugagcugcgacuucaacgggggcaagaucuccgugcaguacaaccugagccacuccuacgccggggacgcggccaaccacugcggcaccguggccaacgggguccugcagacguucaugcggauggccuggggcggcagcuacaucgcgcucgacuccgggcgcggcaacugggacugcaucaugaccagcuaccaguaccugaucauccagaacaccaccugggaggaccacugccaguucucccggcccagccccaucggguaccugggccuccugucccagcgcacgcgggacaucuacaucagccgccggcugcucggcaccuucaccuggacccugagcgacuccgagggggaggacacgccgggcggguacugccugacccgcuggaugcucaucgaggccgagcugaagugcuucggcaacaccgccguggccaagugcaacgagaagcacgacgaggaguucugcgacaugcugcggcuguucgacuucugcaagcaggccauccagcgccugaaggcgcccgcccagaugagcauccagcugaucaacaaggccgugaacgcccucaucaacgaccagcugaucaugaagaaccaccuccgggacaucauggggauccccuacugcaacuacuccaaguacugcuaccucaaccacaccacgaccggccgcaccagccugcccaagugcugccuggucuccaacggcagcuaccucaacgagacccacuucuccgacgacaucgagcagcaggccgacaacaugaucacggagaugcugcagaaggaguacauggagcggcaggggaagaccccgcugggccugguggaccucuucguguucagcaccuccuucuaccugaucagcaucuuccugcaccucgucaagauccccacccaccgccacaucguggggaaguccugccccaagccccaccggcugaaccacaugggcaucugcagcugcgggcuguacaagcagccgggcgugcccgucaaguggaagcgcugaggacuagucccuguucccagagcccacuuuuuuuucuuuuuuugaaauaaaauagccugucuuucagaucucaaaggcucuuuucagagccaccaaaaaaaaaaaaaaaaaaaaaaaaaaaaaaaaaaaaaaaaaaaaaaaaaaaaaaaaaaaaaaaaagaauu

SEQ ID NO: 33729 - RNA, 1736 nt, Artificial Sequence
  mRNA product Design a-2 (hSL-A64-N5) comprising derived and/or modified sequence from LASV(LM765-SLE-2012;Clade IV)__AIT17814__GPCmut8 (opt1)
aggagaguccgcucagccagguugcagaagcggcuuagcguguguccuaaucuucucucugcguguagguaggccugugccgcaaacaagcuuaccaugggccagaucgugaccuucuuccaggaggucccccacgugaucgaggaggugaugaacaucguccugaucgcccucagcauccuggccgugcugaaggggcucuacaacuucgcgaccugcggccugguggggcuggucacguuccuccugcugugcggccgcuccugcaccaccagccucuacaaggggguguacgagcugcagacccuggagcucaacauggagacgcugaacaugugcaugccgcuguccugcaccaagaacaacagccaccacuacaucauggugggcaacgagaccggccucgagcugacccugacgaacaccuccaucaucgaccacaaguucugcaaccucagcgacgcccaccggaagaaccuguacgaccacgcccugauguccaucaucagcaccuuccaccucuccauccccaacuucaaccaguacgaggccaugagcugcgacuucaacgggggcaagaucuccguccaguacaaccugagccacuccuacgccaaggacgcggccgaccacugcgggaccguggccaacggcgugcugcagacguucaugcgcauggccuggggcgggagcuacaucgcgcucgacuccggccgggggcgcugggacugcaucaugaccagcuaccaguaccugaucauccagaacaccaccugggaggaccacugccaguucucccggcccagccccaucggcuaccuggggcuccugucccagcgcacgcgggacaucuacaucagccgccggcugcucggcaccuucaccuggacccugagcgacuccgagggcaaggacacgcccgggggcuacugccugacccgcuggaugcucaucgaggccgagcugaagugcuucgggaacaccgccgucgccaagugcaacgagaagcacgacgaggaguucugcgacaugcugcggcuguucgacuucugcaagcaggccauccagcgccugaaggcgccggcccagaugagcauccagcugaucaacaaggccgugaacgcccucaucaacgaccagcugaucaugaagaaccaccuccgggacaucaugggcauccccuacugcaacuacuccaaguacugcuaccucaaccacaccacgaccgggaagaccagccugcccaagugcugccugguguccaacggcagcuaccucaacgagacccacuucuccgacgacaucgagcagcaggccgacaacaugaucacggagaugcugcagaaggaguacauggagcgccagggcaagaccccgcuggggcuggucgaccucuucguguucagcaccuccuucuaccugaucagcaucuuccugcaccucgugaagauccccacccaccggcacaucgucggcaagcccugccccaagccgcaccgccugaaccacauggggaucugcuccugcggccuguacaagcagcccggggugcccgugaaguggaagcggugaggacuagucccuguucccagagcccacuuuuuuuucuuuuuuugaaauaaaauagccugucuuucagaucucaaaggcucuuuucagagccaccaaaaaaaaaaaaaaaaaaaaaaaaaaaaaaaaaaaaaaaaaaaaaaaaaaaaaaaaaaaaaaaaagaauu

SEQ ID NO: 33730 - RNA, 1736 nt, Artificial Sequence
  mRNA product Design a-2 (hSL-A64-N5) comprising derived and/or modified sequence from LASV(LM776-SLE-2012;Clade IV)__AIT17824__GPCmut8 (opt1)
aggagaguccgcucagccagguugcagaagcggcuuagcguguguccuaaucuucucucugcguguagguaggccugugccgcaaacaagcuuaccaugggccagaucgugaccuucuuccaggaggucccccacgugaucgaggaggugaugaacaucguccugaucgcccucagcauccuggccgugcugaaggggcucuacaacuucgcgaccugcggccugguggggcuggucacguuccuccugcugugcggccgcuccugcaccaccagcguguacaaggggguguacgagcuccagacccuggagcugaacauggagacgcucaacaugugcaugccgcuguccugcaccaagaacaacagccaccacuacaucauggucggcaacgagaccggccuggagcucacccugacgaacaccuccaucaucaaccacaaguucugcaaccugagcgacgcccacaagaagaaccucuacgaccacgcccugauguccaucaucagcaccuuccaccuguccauccccaacuucaaccaguacgaggccaugagcugcgacuucaacgggggcaagaucuccgugcaguacaaccucagccacuccuacgccggggacgcggccaaccacugcggcaccguggccaacgggguccugcagacguucaugcggauggccuggggcggcagcuacaucgcgcuggacuccgggcacggcaagugggacugcaucaugaccagcuaccaguaccucaucauccagaacaccaccugggaggaccacugccaguucucccgccccagccccaucggguaccugggccugcucucccagcggacgcgcgacaucuacaucagccggcgccugcugggcaccuucaccuggacccucagcgacuccgaggggaaggacacgccgggcggguacugccugacccgguggaugcugaucgaggccgagcucaagugcuucggcaacaccgccguggccaagugcaacgagaagcacgacgaggaguucugcgacaugcugcgccuguucgacuucugcaagcaggccauccagcggcucaaggcgcccgcccagaugagcauccagcugaucaacaaggccgugaacgcccugaucaacgaccagcucaucaugaagaaccaccuccgcgacaucauggggauccccuacugcaacuacuccaaguacugcuaccugaaccacaccacgaccggcaagaccagccugcccaagugcugccuggucuccaacggcagcuaccugaacgagacccacuucuccgacgacaucgagcagcaggccgacaacaugaucacggagaugcuccagaaggaguacauggagcggcaggggaagaccccgcugggccugguggaccuguucguguucagcaccuccuucuaccucaucagcaucuuccugcaccuggucaagauccccacccaccgccacaucguggggaaguccugccccaagccccaccggcucaaccacaugggcaucugcagcugcgggcuguacaagcagccgggcgugcccguccgcuggaagcggugaggacuagucccuguucccagagcccacuuuuuuuucuuuuuuugaaauaaaauagccugucuuucagaucucaaaggcucuuuucagagccaccaaaaaaaaaaaaaaaaaaaaaaaaaaaaaaaaaaaaaaaaaaaaaaaaaaaaaaaaaaaaaaaaagaauu

SEQ ID NO: 33731 - RNA, 1736 nt, Artificial Sequence
  mRNA product Design a-2 (hSL-A64-N5) comprising derived and/or modified sequence from LASV(Mad39;Clade IV)__ANH09722__GPCmut8 (opt1)
aggagaguccgcucagccagguugcagaagcggcuuagcguguguccuaaucuucucucugcguguagguaggccugugccgcaaacaagcuuaccaugggccagaucgugaccuucuuccaggaggucccccacgugaucgaggaggugaugaacaucguccugaucgcccucagcauccuggccgugcugaaggggcucuacaacguggcgaccugcggccugaucgggcuggucacguuccuccugcugugcggccgcuccugcaccaccacccucuacaaggggguguacgagcugcaggcccuggagcucaacauggagacgcugaacaugugcaugccgcugagcugcaccaagaacaacucccaccacuacauccgggugggcaacgagaccggccucgagcugacccugacgaacaccagccucaucaaccacaaguucugcaaccuguccgacgcccacaagaagaaccuguacgaccacgcccucaugagcaucaucuccaccuuccaccugagcauccccaacuucaaccaguacgaggccauguccugcgacuucaacgacgggaagaucagcguccaguacaaccugucccacaccuacgcgggcgacacggccaaccacugcgggaccguggccaacggcgugcuccagaccuucaugcgcauggccuggggcgggagcuacaucgcgcuggacuccggccgcgggggcugggacugcaucaugaccagcuaccaguaccugaucauccagaacacgaccugggaggaccacugccaguucucccggcccagccccaucggguaccucggccugcugucccagcggacccgcgacaucuacaucagccggcgccuccugggcaccuucacguggacccuguccgacagcgaggggaaggacaccccgggcggguacugccucacccgguggaugcugaucgaggccgagcugaagugcuucggcaacacggccgucgccaagugcaacgagaagcacgacgaggaguucugcgacaugcuccgccuguucgacuucugcaagcaggccauccagcggcugaaggcgcccgcccagaugagcauccagcucaucaacaaggccgugaacgcccugaucaacgaccagcugaucaugaagaaccaccuccgcgacaucauggggauccccuacugcaacuacuccaaguacugcuaccugaaccacaccgugaccggcaagaccagccugcccaagugcugccucgucuccaacggcagcuaccugaacgagacgcacuucuccgacgacaucgagcagcaggccgacaacaugaucaccgagaugcugcagaaggaguacauggagcggcaggggaagaccccgcugggccucguggaccuguucguguucagcaccuccuucuaccugaucagcaucuuccuccaccuggucaagauccccacgcaccgccacgugguggggaagcccugccccaagccgcaccggcugaaccacaugggcaucugcuccugcggguucuacaagcagcccggcguccccgugcgcuggaagcggugaggacuagucccuguucccagagcccacuuuuuuuucuuuuuuugaaauaaaauagccugucuuucagaucucaaaggcucuuuucagagccaccaaaaaaaaaaaaaaaaaaaaaaaaaaaaaaaaaaaaaaaaaaaaaaaaaaaaaaaaaaaaaaaaagaauu

SEQ ID NO: 33732 - RNA, 1736 nt, Artificial Sequence
  mRNA product Design a-2 (hSL-A64-N5) comprising derived and/or modified sequence from LASV(Z0947-SLE-2011;Clade IV)__AIT17840__GPCmut8 (opt1)
aggagaguccgcucagccagguugcagaagcggcuuagcguguguccuaaucuucucucugcguguagguaggccugugccgcaaacaagcuuaccaugggccagaucgugaccuucuuccaggaggucccccacgugaucgaggaggugaugaacaucguccugaucgcccucagcauccuggccgugcugaaggggcucuacaacuucgcgaccugcggccugguggggcuggucacguuccuccugcugugcggccgcuccugcaccaucagccucuacaaggggguguacgagcugcagacccuggagcucaacauggagacccugaacaugugcaugccgcuguccugcacgaagaacaacagccaccacuacaucauggugggcaacgagaccggccucgagcugacccugaccaacacguccaucaucaaccacaaguucugcaaccucagcgacgcccacaagaagaaccuguacgaccacgcccugauguccaucaucagcaccuuccaccucuccauccccaacuucaaccaguacgaggccaugagcugcgacuucaacgggggcaagaucuccguccaguacaaccugagccacuccuacgccggggacgcggccaaccacugcggcaccguggccaacggggugcugcagaccuucaugcggauggccuggggcggcagcuacaucgcgcucgacuccgggcgcgaccggugggacugcaucaugacgagcuaccaguaccugaucauccagaacaccaccugggaggaccacugccaguucucccgccccagccccaucggcuaccuggggcuccugucccagcggacccgcgacaucuacaucagccggcgccugcucggcacguucaccuggacccugagcgacuccgagggcaaggacacccccgggggcuacugccugacgcgguggaugcucaucgaggccgagcugaagugcuucgggaacaccgccgucgccaagugcaacgagaagcacgacgaggaguucugcgacaugcugcgccucuucgacuucugcaagcaggccauccagcggcugaaggcgccggcccagaugagcauccagcugaucaacaaggccgugaacgcccucaucaacgaccagcugaucaugaagaaccaccuccgcgacaucaugggcauccccuacugcaacuacuccaaguacugcuaccugaaccacaccaccacggggaagaccagccugcccaagugcugccugguguccaacggcagcuaccucaacgagacccacuucuccgacgacaucgagcagcaggccgacaacaugaucaccgagaugcugcagaaggaguacauggagcggcagggcaagacgccgcuggggcuggucgaccucuucguguucagcaccuccuucuaccugaucagcaucuuccugcaccucgugaagauccccacccaccgccacaucgucggcaagcccugccccaagccgcaccggcugaaccacauggggaucugcuccugcggccuguacaagcagcccggggugcccgugaaguggaagcgcugaggacuagucccuguucccagagcccacuuuuuuuucuuuuuuugaaauaaaauagccugucuuucagaucucaaaggcucuuuucagagccaccaaaaaaaaaaaaaaaaaaaaaaaaaaaaaaaaaaaaaaaaaaaaaaaaaaaaaaaaaaaaaaaaagaauu

SEQ ID NO: 33733 - RNA, 1736 nt, Artificial Sequence
  mRNA product Design a-2 (hSL-A64-N5) comprising derived and/or modified sequence from LASV(Josiah;Clade IV)__NP_694870__GPCmut8 (opt4)
aggagaguccgcucagccagguugcagaagcggcuuagcguguguccuaaucuucucucugcguguagguaggccugugccgcaaacaagcuuaccaugggccagaucgugaccuucuuccaggaggugccccacgugaucgaggaggugaugaacaucgugcugaucgcccugagcgugcuggccgugcugaagggccuguacaacuucgccaccugcggccuggugggccuggugaccuuccugcugcugugcggcagaagcugcaccaccagccuguacaagggcguguacgagcugcagacccuggagcugaacauggagacccugaacaugugcaugccccugagcugcaccaagaacaacagccaccacuacaucauggugggcaacgagaccggccuggagcugacccugaccaacaccagcaucaucaaccacaaguucugcaaccugagcgacgcccacaagaagaaccuguacgaccacgcccugaugagcaucaucagcaccuuccaccugagcauccccaacuucaaccaguacgaggccaugagcugcgacuucaacggcggcaagaucagcgugcaguacaaccugagccacagcuacgccggcgacgccgccaaccacugcggcaccguggccaacggcgugcugcagaccuucaugagaauggccuggggcggcagcuacaucgcccuggacagcggcagaggcaacugggacugcaucaugaccagcuaccaguaccugaucauccagaacaccaccugggaggaccacugccaguucagcagacccagccccaucggcuaccugggccugcugagccagagaaccagagacaucuacaucagcagaagacugcugggcaccuucaccuggacccugagcgacagcgagggcaaggacacccccggcggcuacugccugaccagauggaugcugaucgaggccgagcugaagugcuucggcaacaccgccguggccaagugcaacgagaagcacgacgaggaguucugcgacaugcugagacuguucgacuucugcaagcaggccauccagagacugaaggcccccgcccagaugagcauccagcugaucaacaaggccgugaacgcccugaucaacgaccagcugaucaugaagaaccaccugagagacaucaugggcauccccuacugcaacuacagcaaguacugcuaccugaaccacaccaccaccggcagaaccagccugcccaagugcugccuggugagcaacggcagcuaccugaacgagacccacuucagcgacgacaucgagcagcaggccgacaacaugaucaccgagaugcugcagaaggaguacauggagagacagggcaagaccccccugggccugguggaccuguucguguucagcaccagcuucuaccugaucagcaucuuccugcaccuggugaagauccccacccacagacacaucgugggcaagagcugccccaagccccacagacugaaccacaugggcaucugcagcugcggccuguacaagcagcccggcgugcccgugaaguggaagagaugaggacuagucccuguucccagagcccacuuuuuuuucuuuuuuugaaauaaaauagccugucuuucagaucucaaaggcucuuuucagagccaccaaaaaaaaaaaaaaaaaaaaaaaaaaaaaaaaaaaaaaaaaaaaaaaaaaaaaaaaaaaaaaaaagaauu

SEQ ID NO: 33734 - RNA, 1733 nt, Artificial Sequence
  mRNA product Design a-2 (hSL-A64-N5) comprising derived and/or modified sequence from LASV(LP;Clade I)__AAF86701__GPCmut8 (opt4)
aggagaguccgcucagccagguugcagaagcggcuuagcguguguccuaaucuucucucugcguguagguaggccugugccgcaaacaagcuuaccaugggccagaucaucaccuucuuccaggaggugccccacgugaucgaggaggugaugaacaucgugcugaucgcccugagccugcuggccauccugaagggccuguacaacaucgccaccugcggcaucaucggccugguggccuuccuguuccugugcggcaagagcugcagccugacccugaagggcggcuacgagcugcagacccuggagcugaacauggagacccugaacaugugcaugccccugagcugcaccaagaacagcagccaccacuacaucagagugggcaacgagaccggccuggagcugacccugaccaacaccagcaucaucaaccacaaguucugcaaccugagcgacgcccacaagaagaaccuguacgaccacgcccugaugagcaucaucagcaccuuccaccugagcauccccaacuucaaccaguacgaggccaugagcugcgacuucaacggcggcaagaucagcgugcaguacaaccugagccacagcuacgccggcgacgccgccgagcacugcggcaccguggccaacggcgugcugcagaccuucaugagaauggccuggggcggcagauacaucgcccuggacagcggcaagggcaacugggacugcaucaugaccagcuaccaguaccugaucauccagaacaccaccugggaggaccacugccaguucagcagacccagccccaucggcuaccugggccugcugagccagagaaccagagacaucuacaucagcagaagacugcugggcaccuucaccuggacccugagcgacagcgagggcaacgagacccccggcggcuacugccugaccagauggaugcugaucgaggccgagcugaagugcuucggcaacaccgccguggccaagugcaacgagaagcacgacgaggaguucugcgacaugcugagacuguucgacuucugcaagcaggccaucagaagacugaaggcccccgcccagaugagcauccagcugaucaacaaggccgugaacgcccugaucaacgaccagcugaucaugaagaaccaccugagagacaucaugggcauccccuacugcaacuacagcaaguacugcuaccugaaccacaccagcagcggcagaaccagccugcccaagugcugccugaucagcaacggcagcuaccugaacgagacccaguucagcgacgacaucgagcagcaggccgacaacaugaucaccgagaugcugcagaaggaguacaucgagagacagggcaagaccccccugggccugguggacaucuucaucuucagcaccagcuucuaccugaucagcaucuuccugcaccugaucaagauccccacccacagacacaucgugggcaagcccugccccaagccccacagacugaaccacaugggcgugugcagcugcggccuguacaagcaccccggcgugcccaccaaguggaagagaugaggacuagucccuguucccagagcccacuuuuuuuucuuuuuuugaaauaaaauagccugucuuucagaucucaaaggcucuuuucagagccaccaaaaaaaaaaaaaaaaaaaaaaaaaaaaaaaaaaaaaaaaaaaaaaaaaaaaaaaaaaaaaaaaagaauu

SEQ ID NO: 33735 - RNA, 1733 nt, Artificial Sequence
  mRNA product Design a-2 (hSL-A64-N5) comprising derived and/or modified sequence from LASV(803213;Clade II)__AAF86703__GPCmut8 (opt4)
aggagaguccgcucagccagguugcagaagcggcuuagcguguguccuaaucuucucucugcguguagguaggccugugccgcaaacaagcuuaccaugggccagaucaucaccuucuuccaggaggugccccacgugaucgaggaggugaugaacaucgugcugaucgcccugagccugcuggccauccugaagggcaucuacaacguggccaccugcggccuguucggccugaucagcuuccugcugcugugcggcagaagcugcagcgugaccuacaagggcguguacgagcugcagacccuggagcugaacauggccaaccugaacaugugcaugccccugagcugcaccaagaacaacagccaccacuacaucauggugggcaacgagaccggccuggagcugacccugaccaacaccagcaucaucaaccacaaguucugcaaccugagcgacgcccacaagaagaaccuguacgaccacgcccugaugagcaucaucagcaccuuccaccugagcauccccaacuucaaccaguacgaggccaugagcugcgacuucaacggcggcaagaucagcgugcaguacaaccugagccacagcuucgccguggacgccgccaaccacugcggcaccaucgccaacggcgugcugcagaccuucaugagaauggccuggggcggcagcuacaucgcccuggacagcggcaagggcaacugggacugcaucaugaccagcuaccaguaccugaucauccagaacaccaccugggaggaccacugccaguucagcagacccagccccaucggcuaccugggccugcugagccagagaaccagagacaucuacaucagcagaagacugcugggcaccuucaccuggacccugagcgacagcgagggcaacgaggcccccggcggcuacugccugaccagauggaugcugaucgaggccgagcugaagugcuucggcaacaccgccguggccaagugcaacgagaagcacgacgaggaguucugcgacaugcugagacuguucgacuucugcaagcaggccaucaagagacugaagacccccgcccagaugagcauccagcugaucaacaaggccgugaacgcccugaucaacgaccagcugaucaugaagaaccaccugagagacaucaugggcauccccuacugcaacuacagcagauacugcuaccugaaccacaccgugaccggcaagaccagccugcccagaugcugccuggugagcaacggcagcuaccugaacgagacccacuucagcgacgacaucgagcagcaggccgacaacaugaucaccgagaugcugcagaaggaguacauggacagacagggcaagaccccccugggccugguggaccuguucguguucagcaccagcuucuaccugaucagcaucuuccugcaccuggugaagauccccacccacagacacaucgugggcaagcccugccccaagccccacagacugaaccacaugggcaucugcagcugcggccuguacaagcaccccggcgugcccgugaaguggaagagaugaggacuagucccuguucccagagcccacuuuuuuuucuuuuuuugaaauaaaauagccugucuuucagaucucaaaggcucuuuucagagccaccaaaaaaaaaaaaaaaaaaaaaaaaaaaaaaaaaaaaaaaaaaaaaaaaaaaaaaaaaaaaaaaaagaauu

SEQ ID NO: 33736 - RNA, 1733 nt, Artificial Sequence
  mRNA product Design a-2 (hSL-A64-N5) comprising derived and/or modified sequence from LASV(GA391;Clade III)__CAA36645__GPCmut8 (opt4)
aggagaguccgcucagccagguugcagaagcggcuuagcguguguccuaaucuucucucugcguguagguaggccugugccgcaaacaagcuuaccaugggccagaucgugaccuucuuccaggaggugccccacgugaucgaggaggugaugaacaucgugcugaucgcccugagcauccuggccauccugaagggccuguacaacguggccaccugcggccugaucggccuggugaccuuccugcugcugagcggcagaagcugcagccugaucuacaagggcaccuacgagcugcagacccuggagcugaacauggagacccugaacaugugcaugccccugagcugcaccaagaacaacagccaccacuacaucagagugggcaacgagaccggccuggagcugacccugaccaacaccagcauccugaaccacaaguucugcaaccugagcgacgcccacaagagaaaccuguacgaccacagccugaugagcaucaucagcaccuuccaccugagcauccccaacuucaaccaguacgaggccaugagcugcgacuucaacggcggcaagaucaccgugcaguacaaccugagccacagcuucgccguggacgccgccggccacugcggcacccuggccaacggcgugcugcagaccuucaugagaauggccuggggcggcagcuacaucgcccuggacagcggcagaggcaacugggacugcaucaugaccagcuaccaguaccugaucauccagaacaccaccugggacgaccacugccaguucagcagacccagccccaucggcuaccugggccugcugagccagagaaccagagacaucuacaucagcagaagacugcugggcaccuucaccuggacccugagcgacagcgagggcaacgagacccccggcggcuacugccugaccagauggaugcugaucgaggccgagcugaagugcuucggcaacaccgccguggccaagugcaacgagaagcacgacgaggaguucugcgacaugcugagacuguucgacuucugcaagcaggccaucagaagacugaagacccccgcccagaugagcauccagcugaucaacaaggccgugaacgcccugaucaacgaccagcugaucaugaagaaccaccugagagacaucaugggcauccccuacugcaacuacagcagauacugcuaccugaaccacaccagcaccggcaagaccagccugcccagaugcugccugaucagcaacggcagcuaccugaacgagaccaaguucagcgacgacaucgagcagcaggccgacaacaugaucaccgagaugcugcagaaggaguacaucgacagacagggcaagaccccccugggccugguggaccuguucguguucagcaccagcuucuaccugaucagcaucuuccugcaccuggugaagauccccacccacagacacaucgugggcaagcccugccccaagccccacagacugaaccacaugggcaucugcagcugcggccuguacaagcagcccggcgugcccgugagauggaagagaugaggacuagucccuguucccagagcccacuuuuuuuucuuuuuuugaaauaaaauagccugucuuucagaucucaaaggcucuuuucagagccaccaaaaaaaaaaaaaaaaaaaaaaaaaaaaaaaaaaaaaaaaaaaaaaaaaaaaaaaaaaaaaaaaagaauu

SEQ ID NO: 33737 - RNA, 1736 nt, Artificial Sequence
  mRNA product Design a-2 (hSL-A64-N5) comprising derived and/or modified sequence from LASV(AV;Clade V)__CCA30314__GPCmut8 (opt4)
aggagaguccgcucagccagguugcagaagcggcuuagcguguguccuaaucuucucucugcguguagguaggccugugccgcaaacaagcuuaccaugggccagaucgugaccuucuuccaggaggugccccacgugaucgaggaggugaugaacaucgugcugaucgcccugagcauccuggccgugcugaagggccuguacaacaucgccaccugcggccugaucggccugaucaccuuccugcugcugugcggcagaagcugcagcagcaaccuguacaagggcguguacgagcugcagagccuggaccugaacauggagacccugaacaugugcaugccccugagcugcaccaagaacaacagccaccacuacaucagagugggcaacgacaccggccuggagcugacccugaccaacaccagcauccugaaccacaaguucugcaaccugagcgacgcccacaagaaggaccuguacgaccacgcccugaugagcaucaucagcaccuuccaccugagcauccccaacuucaaccaguacgaggccaugagcugcgacuucaacggcggcaagaucagcgugcaguacaaccugagccacagcuacgccaucgacgccgccaaccacugcggcaccguggccaacggcauccugcagaccuucaugagaauggccuggggcggcagcuacaucgcccuggacagcggcagaggcaacugggacugcaucaugaccagcuaccaguaccugaucauccagaacaccaccugggagaaccacugccaguucagcagacccagccccaucggcuaccugggccugcugagccagagaaccagagacaucuacaucagcagaagacugcugggcaccuucaccuggacccugagcgacagcgagggcaacgccacccccggcggcuacugccugaccagauggaugcugaucgaggccgagcugaagugcuucggcaacaccgccguggccaagugcaacgagaagcacgacgaggaguucugcgacaugcugagacuguucgacuucugcaagcaggccaucagcagacugaagagccccgcccagaugagcauccagcugaucaacaaggccgugaacgcccugaucaacgaccagcugaucaugaagaaccaccugagagacaucaugggcauccccuacugcaacuacagcaaguacugcuaccugaaccacaccaucaccggcaagaccagccugcccaagugcugccuggugagcaacggcagcuaccugaacgagacccacuucagcgacgacaucgagcagcaggccgacaacaugaucaccgagaugcugcagaaggaguacauggagagacagggcaagaccccccugggccugguggaccuguucguguucagcaccagcuucuaccugaucagcaucuuccugagacuggugaagauccccacccacagacacaucgugggcaagcccugccccaagccccacagacugaaccacaugggcaucugcagcugcggccuguacaagcagcccggcgugcccgugagauggaagagaugaggacuagucccuguucccagagcccacuuuuuuuucuuuuuuugaaauaaaauagccugucuuucagaucucaaaggcucuuuucagagccaccaaaaaaaaaaaaaaaaaaaaaaaaaaaaaaaaaaaaaaaaaaaaaaaaaaaaaaaaaaaaaaaaagaauu

SEQ ID NO: 33738 - RNA, 1733 nt, Artificial Sequence
  mRNA product Design a-2 (hSL-A64-N5) comprising derived and/or modified sequence from LASV(Togo/2016/7082;Clade VI)__AMR44577__GPCmut8 (opt4)
aggagaguccgcucagccagguugcagaagcggcuuagcguguguccuaaucuucucucugcguguagguaggccugugccgcaaacaagcuuaccaugggccagaucaucaccuucuuccaggaggugccccacgugaucgaggaggugaugaacaucgugcugaucgcccugagccugcuggccauccugaagggcguguacaacguggccaccugcggcaucaucggccuggugaccuuccuguuccugugcggcagaagcugcagccugaucuacaagggcagcuacgagcugcagacccuggagcugaacauggagacccugaacaugugcaugccccugagcugcaccaagaacagcagccaccacuacaucagagugggcaacgagaccggccuggagcugacccugaccaacaccagcaucaucaaccacaaguucugcaaccugagcgacgcccacaagagaaaccuguacgaccacgcccugaugagcauccugagcaccuuccaccugagcauccccaacuucaaccaguacgaggccaugagcugcgacuucaacggcggcaagaucagcgugcaguacaaccugagccacgccuacgccguggacgccgccgagcacugcggcaccguggccaacggcgugcugcagaccuucaugagaauggccuggggcggcagcuacaucgcccuggacagcggcagaggcaacugggacugcaucaugaccagcuaccaguaccugaucauccagaacaccaccugggaggaccacugccaguucagcagacccagccccaucggcuaccugggccugcugagccagagaaccagagacaucuacaucagcagaagacugcugggcaccuucaccuggacccugagcgacagcgagggcaacgagacccccggcggcuacugccugaccagauggaugcugaucgaggccgagcugaagugcuucggcaacaccgccguggccaagugcaacgagaagcacgacgaggaguucugcgacaugcugagacuguucgacuucugcaagcaggccauccagagacugaagagccccgcccagaugagcauccagcugaucaacaaggccgugaacgcccugaucaacgaccagcugaucaugaagaaccaccugagagacaugaugggcauccccuacugcaacuacagcaaguacugcuaccugaaccacaccagcagcggcagaaccagccugcccaagugcugccuggugagcaacggcagcuaccugaacgagacccacuucagcgacgacaucgagcagcaggccgacaacaugaucaccgagaugcugcagaaggaguacaucgacagacagggcaagaccccccugggccugguggaccuguucguguucagcaccagcuucuaccugaucagcaucuuccugcaccugaucaagauccccacccacagacacaucgugggcaagcccugccccaagccccacagacugaaccacaugggcaucugcagcugcggccuguacaagcagcccggcgugcccaccagauggaagagaugaggacuagucccuguucccagagcccacuuuuuuuucuuuuuuugaaauaaaauagccugucuuucagaucucaaaggcucuuuucagagccaccaaaaaaaaaaaaaaaaaaaaaaaaaaaaaaaaaaaaaaaaaaaaaaaaaaaaaaaaaaaaaaaaagaauu

SEQ ID NO: 33739 - RNA, 1733 nt, Artificial Sequence
  mRNA product Design a-2 (hSL-A64-N5) comprising derived and/or modified sequence from LASV(KAK-428;Clade n.d. (VII))__ANH09740__GPCmut8 (opt4)
aggagaguccgcucagccagguugcagaagcggcuuagcguguguccuaaucuucucucugcguguagguaggccugugccgcaaacaagcuuaccaugggccagaucgugaccuucuuccaggaggugccccacgugaucgaggaggugaugaacaucgugcugaucgcccugagccugcuggccauccugaagggccuguacaacuucgccaccugcggcgugaucggccugaucaccuuccugcugcugugcggcagaagcugcagcgccaccuacaagggccaguacgagcugcagacccuggagcugaacauggagagccugaacaugugcaugccccugagcugcaccaagaacaacagccaccacuacaucagagccggcaacaacaccggccuggagcugacccugaccaacaccagcaucaucagccacaaguucugcaaccugagcgacgcccacaagaagaaccuguacgaccacacccugaugagcaucaucaccaccuuccaccugagcauccccaacuucaaccaguacgaggccaugagcugcgacuucaacggcggcaagaucagcauccaguacaaccugagccacagcuacgccggcgacgccgcccagcacugcggcaccguggccaacggcgugcugcagaccuucaugagaauggccuggggcggcagcuaccuggcccuggacagcggcagaagaggcugggacugcaucaucagcagcuaccaguaccugaucauccagaacaccaccugggacgaccacugccaguucagcagacccagccccaucggcuaccugggcuucgugagccagaagaccagagacaucuacaucagcagaagacugcugggcaccuucaccuggacccugagcgacagcgagggccacgacaugcccggcggcuacugccugaccagauggaugcugaucgaggccgaccugaagugcuucggcaacaccgccguggccaagugcaacgagaagcacgacgaggaguucugcgacauguggagacuguucgacuucugcaagcaggccauccagagacugaaggcccccgcccagaugaacauccagcugaucaacaaggccgugaacgcccugaucaacgaccagcugaugaugaagaaccaccugagagacaucaugggcauccccuacugcaacuacagcaaguucugcuaccugaacaacaccaccaccggcagaaccagccugcccagaugcugccugaucagcaacggcagcuaccugaacgagacccacuucagcgacgacaucgagcagcaggccgacaacaugaucaccgagaugcugcagaaggaguacauggacagacagggcaagaccccccugggccugguggaccuguucguguucagcaccagcuucuaccugaucaccaucuuccugcaccuggugaagauccccacccacagacacaucgugggcaagcccugccccaagccccacagacugaaccacaugggcaucugcagcugcggccuguacaagcagcccggcgugcccgugagauggaagagaugaggacuagucccuguucccagagcccacuuuuuuuucuuuuuuugaaauaaaauagccugucuuucagaucucaaaggcucuuuucagagccaccaaaaaaaaaaaaaaaaaaaaaaaaaaaaaaaaaaaaaaaaaaaaaaaaaaaaaaaaaaaaaaaaagaauu

SEQ ID NO: 33740 - RNA, 1733 nt, Artificial Sequence; identical to SEQ ID NO: 33734
  mRNA product Design a-2 (hSL-A64-N5) comprising derived and/or modified sequence from LASV(Pinneo-NIG-1969;Clade I)__AIT17836__GPCmut8 (opt4)

SEQ ID NO: 33741 - RNA, 1733 nt, Artificial Sequence
  mRNA product Design a-2 (hSL-A64-N5) comprising derived and/or modified sequence from LASV(ISTH0009-NIG-2011;Clade II)__AIT17404__GPCmut8 (opt4)
aggagaguccgcucagccagguugcagaagcggcuuagcguguguccuaaucuucucucugcguguagguaggccugugccgcaaacaagcuuaccaugggccagaucaucaccuucuuccaggaggugccccacgugaucgaggaggugaugaacaucgugcugaucgcccugagccugcuggccauccugaagggcaucuacaacguggccaccugcggccuguucggccuggugagcuuccugcugcugugcggcagaagcugcagcaccaccuacaagggcguguacgagcugcagacccuggagcuggacauggccagccugaacaugugcaugccccugagcugcaccaagaacaacagccaccacuacaucauggugggcaacgagaccggccuggagcugacccugaccaacaccagcaucaucaaccacaaguucugcaaccugagcgacgcccacaagaagaaccuguacgaccacgcccugaugagcaucaucagcaccuuccaccugagcauccccaacuucaaccaguacgaggccaugagcugcgacuucaacggcggcaagaucagcgugcaguacaaccugagccacgccuacgccguggacgccgccaaccacugcggcaccaucgccaacggcgugcugcagaccuucaugagaauggccuggggcggcagcuacaucgcccuggacagcggcaagggcagcugggacugcaucaugaccagcuaccaguaccugaucauccagaacaccaccugggaggaccacugccaguucagcagacccagccccaucggcuaccugggccugcugagccagagaaccagagacaucuacaucagcagaagacugcugggcaccuucaccuggacccugagcgacagcgagggcaacgagacccccggcggcuacugccugaccagauggaugcugaucgaggccgagcugaagugcuucggcaacaccgccguggccaagugcaacgagaagcacgacgaggaguucugcgacaugcugagacuguucgacuucugcaagcaggccaucagaagacugaagacccccgcccagaugagcauccagcugaucaacaaggccgugaacgcccugaucaacgaccagcugaucaugaagaaccaccugagagacaucaugggcauccccuacugcaacuacagcaaguacugcuaccugaaccacaccgugaccggcaagaccagccugcccagaugcugccuggugagcaacggcagcuaccugaacgagacccacuucagcgacgacaucgagcagcaggccgacaacaugaucaccgagcugcugcagaaggaguacauggacagacagggcaagaccccccugggccugguggaccuguucguguucagcaccagcuucuaccugaucagcaucuuccugcaccugaucaagauccccacccacagacacaucaccggcaagcccugccccaagccccacagacugaaccacaugggcaucugcagcugcggccuguacaagcaccccggcgugcccgugaaguggaagagaugaggacuagucccuguucccagagcccacuuuuuuuucuuuuuuugaaauaaaauagccugucuuucagaucucaaaggcucuuuucagagccaccaaaaaaaaaaaaaaaaaaaaaaaaaaaaaaaaaaaaaaaaaaaaaaaaaaaaaaaaaaaaaaaaagaauu

SEQ ID NO: 33742 - RNA, 1733 nt, Artificial Sequence
  mRNA product Design a-2 (hSL-A64-N5) comprising derived and/or modified sequence from LASV(ISTH2010-NIG-2012;Clade II)__AIT17482__GPCmut8 (opt4)
aggagaguccgcucagccagguugcagaagcggcuuagcguguguccuaaucuucucucugcguguagguaggccugugccgcaaacaagcuuaccaugggccagaucaucaccuucuuccaggaggugccccacgugaucgaggaggugaugaacaucgugcugaucgcccugagccugcuggccauccugaagggcaucuacaacguggccaccugcggccuguucggccuggugagcuuccugcugcugugcggcagaagcugcagcaccaccuacaagggcguguacgagcugcagacccuggagcuggacauggccagccugaacaugugcaugccccugagcugcaccaagaacaacagccaccacuacaucauggugggcaacgagaccggccuggagcugacccugaccaacaccagcaucaucaaccacaaguucugcaaccugagcgacgcccacaagaagaaccuguacgaccacgcccugaugagcaucaucagcaccuuccaccugagcauccccaacuucaaccaguacgaggccaugagcugcgacuucaacggcggcaagaucagcgugcaguacaaccugagccacgccuacgccguggacgccgccaaccacugcggcaccaucgccaacggcgugcugcagaccuucaugagaauggccuggggcggcagcuacaucgcccuggacagcggcaagggcagcugggacugcaucaugaccagcuaccaguaccugaucauccagaacaucaccugggaggaccacugccaguucagcagacccagccccaucggcuaccugggccugcugagccagagaaccagagacaucuacaucagcagaagacugcugggcaccuucaccuggacccugagcgacagcgagggcaacgagacccccggcggcuacugccugaccagauggaugcugaucgaggccgagcugaagugcuucggcaacaccgccguggccaagugcaacgagaagcacgacgaggaguucugcgacaugcugagacuguucgacuucugcaagcaggccaucagaagacugaagacccccgcccagaugagcauccagcugaucaacaaggccgugaacgcccugaucaacgaccagcugaucaugaagaaccaccugagagacaucaugggcauccccuacugcaacuacagcaaguacugcuaccugaaccacaccgugaccggcaagaccagccugcccagaugcugccuggugagcaacggcagcuaccugaacgagacccacuucagcgacgacaucgagcagcaggccgacaacaugaucaccgagcugcugcagaaggaguacaucgacagacagggcaagaccccccugggccugguggaccuguucguguucagcaccagcuucuaccugaucagcaucuuccugcaccuggugaagauccccacccacagacacguggugggcaagcccugccccaagccccacagacugaaccacaugggcaucugcagcugcggccuguacaagcaccccggcgugcccgugaaguggaagagaugaggacuagucccuguucccagagcccacuuuuuuuucuuuuuuugaaauaaaauagccugucuuucagaucucaaaggcucuuuucagagccaccaaaaaaaaaaaaaaaaaaaaaaaaaaaaaaaaaaaaaaaaaaaaaaaaaaaaaaaaaaaaaaaaagaauu

SEQ ID NO: 33743 - RNA, 1733 nt, Artificial Sequence
  mRNA product Design a-2 (hSL-A64-N5) comprising derived and/or modified sequence from LASV(Lassa virus/H.sapiens-wt/NGA/2015/ISTH_0543;Clade II)__AVO03639__GPCmut8 (opt4)
aggagaguccgcucagccagguugcagaagcggcuuagcguguguccuaaucuucucucugcguguagguaggccugugccgcaaacaagcuuaccaugggccagaucaucaccuucuuccaggaggugccccacgugaucgaggaggugaugaacaucgugcugaucgcccugagccugcuggccauccugaagggcaucuacaacguggccaccugcggccuguucggccuggugagcuuccugcugcugugcggcagaagcugcagcaccaccuacaagggcguguacgagcugcagacccuggagcuggacauggccaaccugaacaugugcaugccccugagcugcaccaagaacaacagccaccacuacaucauggugggcaacgagaccggccuggagcugacccugaccaacaccagcaucaucaaccacaaguucugcaaccugagcgacgcccacaagaagaaccuguacgaccacgcccugaugagcaucaucagcaccuuccaccugagcauccccaacuucaaccaguacgaggccaugagcugcgacuucaacggcggcaagaucagcgugcaguacaaccugagccacaccuacgccguggacgccgccaaccacugcggcaccaucgccaacggcgugcugcagaccuucaugagaauggccuggggcggcagcuacaucgcccuggacagcggcaagggcagcugggacugcaucaugaccagcuaccaguaccuggugauccagaacaccaccugggaggaccacugccaguucagcagacccagccccaucggcuaccugggccugcugagccagagaaccagagacaucuacaucagcagaagacugcugggcaccuucaccuggacccugagcgacagcgagggcaacgagacccccggcggcuacugccugaccagauggaugcugaucgaggccgagcugaagugcuucggcaacaccgccguggccaagugcaacgagaagcacgacgaggaguucugcgacaugcugagacuguucgacuucugcaagcaggccaucagaagacugaagacccccgcccagaugagcauccagcugaucaacaaggccgugaacgcccugaucaacgaccagcugaucaugaagaaccaccugagagacaucaugggcauccccuacugcaacuacagcaaguacugcuaccugaaccacaccgugaccggcaagaccagccugcccagaugcugccuggugagcaacggcagcuaccugaacgagacccacuucagcgacgacaucgagcagcaggccgacaacaugaucaccgagcugcugcagaaggaguacaucgacagacagggcaagaccccccugggccugguggaccuguucguguucagcaccagcuucuaccugaucagcaucuuccugcaccuggugaagauccccacccacagacacaucaccggcaagcccugccccaagccccacagacugaaccacaugggcaucugcagcugcggccuguacaagcaccccggcgugcccgugaaguggaagagaugaggacuagucccuguucccagagcccacuuuuuuuucuuuuuuugaaauaaaauagccugucuuucagaucucaaaggcucuuuucagagccaccaaaaaaaaaaaaaaaaaaaaaaaaaaaaaaaaaaaaaaaaaaaaaaaaaaaaaaaaaaaaaaaaagaauu

SEQ ID NO: 33744 - RNA, 1733 nt, Artificial Sequence
  mRNA product Design a-2 (hSL-A64-N5) comprising derived and/or modified sequence from LASV(Lassa virus/H.sapiens-wt/NGA/2016/ISTH_0009;Clade II)__AVO03571__GPCmut8 (opt4)
aggagaguccgcucagccagguugcagaagcggcuuagcguguguccuaaucuucucucugcguguagguaggccugugccgcaaacaagcuuaccaugggccagaucaucaccuucuuccaggaggugccccacgugaucgaggaggugaugaacaucgugcugaucgcccugagccugcuggccauccugaagggcaucuacaacguggccaccugcggccugcugggccuggugagcuuccugcugcugugcggcagaagcugcagcaccaccuacaagggcguguacgagcugcagacccuggagcuggacauggccagccugaacaugugcaugccccugagcugcaccaagaacaacagccaccacuacaucauggugggcaacgagaccggccuggagcugacccugaccaacaccagcaucaucaaccacaaguucugcaaccugagcgacgcccacaagaagaaccuguacgaccacgcccugaugagcaucaucagcaccuuccaccugagcauccccaacuucaaccaguacgaggccaugagcugcgacuucaacggcggcagaaucagcgugcaguacaaccugagccacagcuacgccguggacgccgccaaccacugcggcaccaucgccaacggcgugcugcagaccuucaugagaauggccuggggcggcagcuacaucgcccuggacagcggcaagggcagcugggacugcaucaugaccagcuaccaguaccugaucauccagaacaccaccugggaggaccacugccaguucagcagacccagccccaucggcuaccugggccugcugagccagagaaccagagacaucuacaucagcagaagacugcugggcaccuucaccuggacccugagcgacagcgagggcaacgagacccccggcggcuacugccugaccagauggaugcugaucgaggccgagcugaagugcuucggcaacaccgccguggccaagugcaacgagaagcacgacgaggaguucugcgacaugcugagacuguucgacuucugcaagcaggccaucagaagacugaagacccccgcccagaugagcauccagcugaucaacaaggccgugaacgcccugaucaacgaccagcugaucaugaagaaccaccugagagacaucaugggcauccccuacugcaacuacagcaaguacugcuaccugaaccacaccgugaccggcaagaccagccugcccagaugcugccuggugagcaacggcagcuaccugaacgagacccacuucagcgacgacaucgagcagcaggccgacaacaugaucaccgagcugcugcagaaggaguacaucgacagacagggcaagaccccccugggccugguggaccuguucguguucagcaccagcuucuaccugaucagcaucuuccugcaccuggugaagauccccacccacagacacaucaccggcaagcccugccccaagccccacagacugaaccacaugggcaucugcagcugcggccuguacaaccaccccggcgugcccgugaaguggaagagaugaggacuagucccuguucccagagcccacuuuuuuuucuuuuuuugaaauaaaauagccugucuuucagaucucaaaggcucuuuucagagccaccaaaaaaaaaaaaaaaaaaaaaaaaaaaaaaaaaaaaaaaaaaaaaaaaaaaaaaaaaaaaaaaaagaauu

SEQ ID NO: 33745 - RNA, 1733 nt, Artificial Sequence
  mRNA product Design a-2 (hSL-A64-N5) comprising derived and/or modified sequence from LASV(Lassa virus/H.sapiens-wt/NGA/2016/ISTH_0017;Clade II)__AVO03567__GPCmut8 (opt4)
aggagaguccgcucagccagguugcagaagcggcuuagcguguguccuaaucuucucucugcguguagguaggccugugccgcaaacaagcuuaccaugggccagaucaucaccuucuuccaggaggugccccacgugaucgaggaggugaugaacaucgugcugaucgcccugagccugcuggccauccugaagggcaucuacaacguggccaccugcggccuguucggccuggugagcuuccugcugcugugcggcagaagcugcagcaccaccuacaagggcguguacgagcugcagacccuggagcuggacauggccagccugaacaugugcaugccccugagcugcaccaagaacaacagccaccacuacaucauggugggcaacgagaccggccuggagcugacccugaccaacaccagcaucaucaaccacaaguucugcaaccugagcgacgcccacaagaagaaccuguacgaccacgcccugaugagcaucaucagcaccuuccaccugagcauccccaacuucaaccaguacgaggccaugagcugcgacuucaacggcggcaagaucagcgugcaguacaaccugagccacaccuacgccaucgacgccgccaaccacugcggcaccaucgccaacggcgugcugcagaccuucaugagaauggccuggggcggcagcuacaucgcccuggacagcggcaagggcagcugggacugcaucaugaccagcuaccaguaccugaucauccagaacaccaccugggaggaccacugccaguucagcagacccagccccaucggcuaccugggccugcugagccagagaaccagagacaucuacaucagcagaagacugcugggcaccuucaccuggacccugagcgacagcgagggcaacgagacccccggcggcuacugccugaccagauggaugcugaucgaggccgagcugaagugcuucggcaacaccgccguggccaagugcaacgagaagcacgacgaggaguucugcgacaugcugagacuguucgacuucugcaagcaggccaucagaagacugaagacccccgcccagaugagcauccagcugaucaacaaggccgugaacgcccugaucaacgaccagcugaucaugaagaaccaccugagagacaucaugggcauccccuacugcaacuacagcaaguacugcuaccugaaccacaccgugaccggcaagaccagccugcccagaugcugccuggugagcaacggcagcuaccugaacgagacccacuucagcgacgacaucgagcagcaggccgacaacaugaucaccgagcugcugcagaaggaguacauggacagacagggcaagaccccccugggccugguggaccuguucguguucagcaccagcuucuaccugaucagcaucuuccugcaccuggugagaauccccacccacagacacgugaucggcaagcccugccccaagccccacagacugaaccacaugggcaucugcagcugcggccuguacaagcaccccggcgugcccgugaaguggaagagaugaggacuagucccuguucccagagcccacuuuuuuuucuuuuuuugaaauaaaauagccugucuuucagaucucaaaggcucuuuucagagccaccaaaaaaaaaaaaaaaaaaaaaaaaaaaaaaaaaaaaaaaaaaaaaaaaaaaaaaaaaaaaaaaaagaauu

SEQ ID NO: 33746 - RNA, 1733 nt, Artificial Sequence
  mRNA product Design a-2 (hSL-A64-N5) comprising derived and/or modified sequence from LASV(Lassa virus/H.sapiens-wt/NGA/2018/ISTH_0959;Clade II)__AVV65099__GPCmut8 (opt4)
aggagaguccgcucagccagguugcagaagcggcuuagcguguguccuaaucuucucucugcguguagguaggccugugccgcaaacaagcuuaccaugggccagaucaucaccuucuuccaggaggugccccacgugaucgaggaggugaugaacaucgugcugaucgcccugagccugcuggccauccugaagggcaucuacaacguggugaccugcggccuguucggccuggugagcuuccugcugcugugcggcagaagcugcagcaccaccuacaagggcguguacgagcugcagacccuggagcuggacauggccagccugaacaugugcaugccccugagcugcaccaagaacaacagccaccacuacaucauggugggcaacgagaccggccuggagcugacccugaccaacaccagcaucaucaaccacaaguucugcaaccugagcgacgcccacaagaagaaccuguacgaccacgcccugaugagcaucaucagcaccuuccaccugagcauccccaacuucaaccaguacgaggccaugagcugcgacuucaacggcggcaagaucagcgugcaguacaaccugagccacgccuacgccaucgacgccgccaaccacugcggcaccaucgccaacggcgugcugcagaccuucaugagaauggccuggggcggcagcuacaucgcccuggacagcggcaagggcagcugggacugcaucaugaccagcuaccaguaccugaucauccagaacaccaccugggaggaccacugccaguucagcagacccagccccaucggcuaccugggccugcugagccagagaaccagagacaucuacaucagcagaagacugcugggcaccuucaccuggacccugagcgacagcgagggcaacgagacccccggcggcuacugccugaccagauggaugcugaucgaggccgagcugaagugcuucggcaacaccgccguggccaagugcaacgagaagcacgacgaggaguucugcgacaugcugagacuguucgacuucugcaagcaggccaucagaagacugaagacccccgcccagaugagcauccagcugaucaacaaggccgugaacgcccugaucaacgaccagcugaucaugaagaaccaccugagagacaucaugggcauccccuacugcaacuacagcaaguacugcuaccugaaccacaccgugaccggcaagaccagccugcccagaugcugccuggugagcaacggcagcuaccugaacgagacccacuucagcgacgacaucgagcagcaggccgacaacaugaucaccgagcugcugcagaaggaguacaucgacagacagggcaagaccccccugggccugguggaccuguucguguucagcaccagcuucuaccugaucagcaucuuccugcaccuggugaagauccccacccacagacacgugaucggcaagcccugccccaagccccacagacugaaccacaugggcaucugcagcugcggccuguacaagcaccccggcgugcccgugaaguggaagagaugaggacuagucccuguucccagagcccacuuuuuuuucuuuuuuugaaauaaaauagccugucuuucagaucucaaaggcucuuuucagagccaccaaaaaaaaaaaaaaaaaaaaaaaaaaaaaaaaaaaaaaaaaaaaaaaaaaaaaaaaaaaaaaaaagaauu

SEQ ID NO: 33747 - RNA, 1733 nt, Artificial Sequence
  mRNA product Design a-2 (hSL-A64-N5) comprising derived and/or modified sequence from LASV(LASV003-NIG-2008;Clade II)__AIT17580__GPCmut8 (opt4)
aggagaguccgcucagccagguugcagaagcggcuuagcguguguccuaaucuucucucugcguguagguaggccugugccgcaaacaagcuuaccaugggccagaucaucaccuucuuccaggaggugccccacgugaucgaggaggugaugaacaucgugcugaucgcccugagccugcuggccauccugaagggcaucuacaacguggccaccugcggccuguucggccuggugagcuuccugcugcugugcggcagaagcugcagcaccaccuacaagggcguguacgagcugcagacccuggagcuggacauggccagccugaacaugugcaugccccugagcugcaccaagaacaacagccaccacuacaucauggugggcaacgagaccggccuggagcugacccugaccaacaccagcaucaucaaccacaaguucugcaaccugagcgacgcccacaagaagaaccuguacgaccacgcccugaugagcaucaucagcaccuuccaccugagcauccccaacuucaaccaguacgaggccaugagcugcgacuucaacggcggcaagaucagcgugcaguacaaccugagccacaccuacgccguggacgccgccaaccacugcggcaccaucgccaacggcgugcugcagaccuucaugagaauggccuggggcggcagcuacaucgcccuggacagcggcaagggcagcugggacugcaucaugaccagcuaccaguaccugaucauccagaacaccaccugggaggaccacugccaguucagcagacccagccccaucggcuaccugggccugcugagccagagaaccagagacaucuacaucagcagaagacugcugggcaccuucaccuggacccugagcgacagcgagagcaacgagacccccggcggcuacugccugaccagauggaugcugaucgaggccgagcugaagugcuucggcaacaccgccguggccaagugcaacgagaagcacgacgaggaguucugcgacaugcugagacuguucgacuucugcaagcaggccaucagaagacugaaggcccccgcccagaugagcauccagcugaucaacaaggccgugaacgcccugaucaacgaccagcugaucaugaagaaccaccugagagacaucaugggcauccccuacugcaacuacagcaaguacugcuaccugaaccacaccgugaccggcagaaccagccugcccagaugcugccuggugagcaacggcagcuaccugaacgagacccacuucagcgacgacaucgagcagcaggccgacaacaugaucaccgagcugcugcagaaggaguacauggacagacagggcaagaccccccugggccugguggaccuguucguguucagcaccagcuucuaccugaucagcaucuuccugcaccuggugaagauccccacccacagacacgugaucggcaagcccugccccaagccccacagacugaaccacaugggcaucugcagcugcggccuguacaagcaccccggcgugcccgugaaguggaagagaugaggacuagucccuguucccagagcccacuuuuuuuucuuuuuuugaaauaaaauagccugucuuucagaucucaaaggcucuuuucagagccaccaaaaaaaaaaaaaaaaaaaaaaaaaaaaaaaaaaaaaaaaaaaaaaaaaaaaaaaaaaaaaaaaagaauu

SEQ ID NO: 33748 - RNA, 1733 nt, Artificial Sequence
  mRNA product Design a-2 (hSL-A64-N5) comprising derived and/or modified sequence from LASV(LASV035-NIG-2009;Clade II)__AIT17588__GPCmut8 (opt4)
aggagaguccgcucagccagguugcagaagcggcuuagcguguguccuaaucuucucucugcguguagguaggccugugccgcaaacaagcuuaccaugggccagaucaucaccuucuuccaggaggugccccacgugaucgaggaggugaugaacaucgugcugaucgcccugagccugcuggccauccugaagggcaucuacaacguggccaccugcggccuguucggccuggugagcuuccugcugcugugcggcagaagcugcagcaccaccuacaagggcguguacgagcugcagacccuggagcuggacauggccagccugaacaugugcaugccccugagcugcaccaagaacaacagccaccacuacaucauggugggcaacgagaccggccuggagcugacccugaccaacaccagcaucaucaaccacaaguucugcaaccugagcgacgcccacaagaagaaccuguacgaccacgcccugaugagcaucaucagcaccuuccaccugagcauccccaacuucaaccaguacgaggccaugagcugcgacuucaacggcggcaagaucagcgugcaguacaaccugagccacgccuacgccguggacgccgccaaccacugcggcaccaucgccaacggcgugcugcagaccuucaugagaauggccuggggcggcagcuacaucgcccuggacagcggcaagggcagcugggacugcaucaugaccagcuaccaguaccugaucauccagaacaccaccugggaggaccacugccaguucagcagacccagccccaucggcuaccugggccugcugagccagagaaccagagacaucuacaucagcagaagacugcugggcaccuucaccuggacccugagcgacagcgagggcaacgagacccccggcggcuacugccugaccagauggaugcugaucgaggccgagcugaagugcuucggcaacaccgccguggccaagugcaacgagaagcacgacgaggaguucugcgacaugcugagacuguucgacuucugcaagcaggccaucagaagacugaaggcccccgcccagaugagcauccagcugaucaacaaggccgugaacgcccugaucaacgaccagcugaucaugaagaaccaccugagagacaucaugggcauccccuacugcaacuacagcaaguacugcuaccugaaccacaccgugaccggcaagaccagccugcccagaugcugccuggugagcaacggcagcuaccugaacgagacccacuucagcgacgacaucgagcagcaggccgacaacaugaucaccgagcugcugcagaaggaguacaucgacagacagggcaagaccccccugggccugguggaccuguucguguucagcaccagcuucuaccugaucagcaucuuccugcaccuggugaagauccccacccacagacacgugaucggcaagcccugccccaagccccacagacugaaccacaugggcaucugcagcugcggccuguacaagcaccccggcgugcccgugaaguggaagagaugaggacuagucccuguucccagagcccacuuuuuuuucuuuuuuugaaauaaaauagccugucuuucagaucucaaaggcucuuuucagagccaccaaaaaaaaaaaaaaaaaaaaaaaaaaaaaaaaaaaaaaaaaaaaaaaaaaaaaaaaaaaaaaaaagaauu

SEQ ID NO: 33749 - RNA, 1733 nt, Artificial Sequence
  mRNA product Design a-2 (hSL-A64-N5) comprising derived and/or modified sequence from LASV(LASV1000-NIG-2009;Clade II)__AIT17782__GPCmut8 (opt4)
aggagaguccgcucagccagguugcagaagcggcuuagcguguguccuaaucuucucucugcguguagguaggccugugccgcaaacaagcuuaccaugggccagaucaucaccuucuuccaggaggugccccacgugaucgaggaggugaugaacaucgugcugaucgcccugagccugcuggccauccugaagggcaucuacaacguggccaccugcggccuguucggccuggugagcuuccugcugcugugcggcagaagcugcagcaccaccuacaagggcguguacgagcugcagacccuggagcuggacauggccagccugaacaugugcaugccccugagcugcaccaagaacaacagccaccacuacaucauggugggcaacgagaccggccuggagcugacccugaccaacaccagcaucaucaaccacaaguucugcaaccugagcgacgcccacaagaagaaccuguacgaccacgcccugaugagcaucaucagcaccuuccaccugagcauccccaacuucaaccaguacgaggccaugagcugcgacuucaacggcggcaagaucagcgugcaguacaaccugagccacaccuacgccguggacgccgccaaccacugcggcaccaucgccaacggcgugcugcagaccuucaugagaauggccuggggcggcagcuacaucgcccuggacagcggcaagggcagcugggacugcaucaugaccagcuaccaguaccugaucauccagaacaccaccugggaggaccacugccaguucagcagacccagccccaucggcuaccugggccugcugagccagagaaccagagacaucuacaucagcagaagacugcugggcaccuucaccuggacccugagcgacagcgagggcaacgagacccccggcggcuacugccugaccagauggaugcugaucgaggccgagcugaagugcuucggcaacaccgccguggccaagugcaacgagaagcacgacgaggaguucugcgacaugcugagacuguucgacuucugcaagcaggccaucaagagacugaagacccccgcccagaugagcauccagcugaucaacaaggccgugaacgcccugaucaacgaccagcugaucaugaagaaccaccugagagacaucaugggcauccccuacugcaacuacagcaaguacugcuaccugaaccacaccgugaccggcaagaccagccugcccagaugcugccuggugagcaacggcagcuaccugaacgagacccacuucagcgacgacaucgagcagcaggccgacaacaugaucaccgagcugcugcagaaggaguacaucgacagacagggcaagaccccccugggccugguggaccuguucguguucagcaccagcuucuaccugaucagcaucuuccugcaccuggugaagauccccacccacagacacguggugggcaagcccugccccaagccccacagacugaaccacaugggcaucugcagcugcggccuguacaagcaccccggcgugcccgugaaguggaagagaugaggacuagucccuguucccagagcccacuuuuuuuucuuuuuuugaaauaaaauagccugucuuucagaucucaaaggcucuuuucagagccaccaaaaaaaaaaaaaaaaaaaaaaaaaaaaaaaaaaaaaaaaaaaaaaaaaaaaaaaaaaaaaaaaagaauu

SEQ ID NO: 33750 - RNA, 1733 nt, Artificial Sequence
  mRNA product Design a-2 (hSL-A64-N5) comprising derived and/or modified sequence from LASV(LASV221-NIG-2010;Clade II)__AIT17624__GPCmut8 (opt4)
aggagaguccgcucagccagguugcagaagcggcuuagcguguguccuaaucuucucucugcguguagguaggccugugccgcaaacaagcuuaccaugggccagaucaucaccuucuuccaggaggugccccacgugaucgaggaggugaugaacaucgugcugaucgcccugagccugcuggccauccugaagggcaucuacaacguggccaccugcggccuguucggccuggugagcuuccugcugcugugcggcagaagcugcagcaccaccuacaagggcguguacgagcugcagacccuggagcuggacauggccagccugaacaugugcaugccccugagcugcaccaagaacaacagccaccacuacaucauggugggcaacgagaccggccuggagcugacccugaccaacaccagcaucaucaaccacaaguucugcaaccugagcgacgcccacaagaagaaccuguacgaccacgcccugaugagcaucaucagcaccuuccaccugagcauccccaacuucaaccaguacgaggccaugagcugcgacuucaacggcggcaagaucagcgugcaguacaaccugagccacaccuacgccaucgacgccgccaaccacugcggcaccaucgccaacggcgugcugcagaccuucaugagaauggccuggggcggcagcuacaucgcccuggacagcggcaagggcagcugggacugcaucaugaccagcuaccaguaccugaucauccagaacaccaccugggaggaccacugccaguucagcagacccagccccaucggcuaccugggccugcugagccagagaaccagagacaucuacaucagcagaagacugcugggcaccuucaccuggacccugagcgacagcgagggcaacgagacccccggcggcuacugccugaccagauggaugcugaucgaggccgagcugaagugcuucggcaacaccgccguggccaagugcaacgagaagcacgacgaggaguucugcgacaugcugagacuguucgacuucugcaagcaggccaucagaagacugaagacccccgcccagaugagcauccagcugaucaacaaggccgugaacgcccugaucaacgaccagcugaucaugaagaaccaccugagagacaucaugggcauccccuacugcaacuacagcaaguacugcuaccugaaccacaccgugaccggcaagaccagccugcccagaugcugccuggugagcaacggcagcuaccugaacgagacccacuucagcgacgacaucgagcagcaggccgacaacaugaucaccgagaugcugcagaaggaguacauggacagacagggcaagaccccccugggccugguggaccuguucguguucagcaccagcuucuaccugaucagcaucuuccugcaccuggugaagauccccacccacagacacgugaucggcaagcccugccccaagccccacagacugaaccacaugggcaucugcagcugcggccuguacaagcaccccggcgugcccgugaaguggaagagaugaggacuagucccuguucccagagcccacuuuuuuuucuuuuuuugaaauaaaauagccugucuuucagaucucaaaggcucuuuucagagccaccaaaaaaaaaaaaaaaaaaaaaaaaaaaaaaaaaaaaaaaaaaaaaaaaaaaaaaaaaaaaaaaaagaauu

SEQ ID NO: 33751 - RNA, 1733 nt, Artificial Sequence
  mRNA product Design a-2 (hSL-A64-N5) comprising derived and/or modified sequence from LASV(LASV237-NIG-2010;Clade II)__AIT17638__GPCmut8 (opt4)
aggagaguccgcucagccagguugcagaagcggcuuagcguguguccuaaucuucucucugcguguagguaggccugugccgcaaacaagcuuaccaugggccagaucaucaccuucuuccaggaggugccccacgugaucgaggaggugaugaacaucgugcugaucgcccugagccugcuggccauccugaagggcaucuacaacguggccaccugcggccuguucggccuggugagcuuccugcugcugugcggcagaagcugcagcaccaccuacaagggcguguacgagcugcagacccuggagcuggacauggccagccugaacaugugcaugccccugagcugcaccaagaacaacagccaccacuacaucauggugggcaacgagaccggccuggagcugacccugaccaacaccagcaucaucaaccacaaguucugcaaccugagcgacgcccacaagaaggaccuguacgaccacgcccugaugagcaucaucagcaccuuccaccugagcauccccaacuucaaccaguacgaggccaugagcugcgacuucaacggcggcaagaucagcgugcaguacaaccugagccacaccuacgccguggacgccgccaaccacugcggcaccaucgccaacggcgugcugcagaccuucaugagaauggccuggggcggcagcuacaucgcccuggacagcggcaagggcagcugggacugcaucaugaccagcuaccaguaccugaucauccagaacaccaccugggaggaccacugccaguucagcagacccagccccaucggcuaccugggccugcugagccagagaaccagagacaucuacaucagcagaagacugcugggcaccuucaccuggacccugagcgacagcgagggcaacgagacccccggcggcuacugccugaccagauggaugcugaucgaggccgagcugaagugcuucggcaacaccgccguggccaagugcaacgagaagcacgacgaggaguucugcgacaugcugagacuguucgacuucugcaagcaggccaucagaagacugaagacccccgcccagaugagcauccagcugaucaacaaggccgugaacgcccugaucaacgaccagcugaucaugaagaaccaccugagagacaucaugggcauccccuacugcaacuacagcaaguacugcuaccugaaccacaccgugaccggcaagaccagccugcccagaugcugccuggugagcaacggcagcuaccugaacgagacccacuucagcgacgacaucgagcagcaggccgacaacaugaucaccgagcugcugcagaaggaguacauggacagacagggcaagaccccccugggccugguggaccuguucguguucagcaccagcuucuaccugaucagcaucuuccugcaccugaucaagauccccacccacagacacaucaccggcaagcccugccccaagccccacagacugaaccacaugggcaucugcagcugcggccuguacaagcaccccggcgugcccgugaaguggaagagaugaggacuagucccuguucccagagcccacuuuuuuuucuuuuuuugaaauaaaauagccugucuuucagaucucaaaggcucuuuucagagccaccaaaaaaaaaaaaaaaaaaaaaaaaaaaaaaaaaaaaaaaaaaaaaaaaaaaaaaaaaaaaaaaaagaauu

SEQ ID NO: 33752 - RNA, 1733 nt, Artificial Sequence
  mRNA product Design a-2 (hSL-A64-N5) comprising derived and/or modified sequence from LASV(LASV253-NIG-2011;Clade II)__AIT17670__GPCmut8 (opt4)
aggagaguccgcucagccagguugcagaagcggcuuagcguguguccuaaucuucucucugcguguagguaggccugugccgcaaacaagcuuaccaugggccagaucaucaccuucuuccaggaggugccccacgugaucgaggaggugaugaacaucgugcugaucgcccugagccugcuggccauccugaagggcaucuacaacguggccaccugcggccuguucggccuggugagcuuccugcugcugugcggcagaagcugcagcaccaccuacaagggcguguacgagcugcagacccuggagcuggacauggccagccugaacaugugcaugccccugagcugcaccaagaacaacagccaccacuacaucauggugggcaacgagaccggccuggagcugacccugaccaacaccagcaucaucaaccacaaguucugcaaccugagcgacgcccacaagaagaaccuguacgaccacgcccugaugagcaucaucagcaccuuccaccugagcauccccaacuucaaccaguacgaggccaugagcugcgacuucaacggcggcaagaucagcgugcaguacaaccugagccacaccuacgccguggacgccgccaaccacugcggcaccaucgccaacggcgugcugcagaccuucaugagaauggccuggggcggcagcuacaucgcccuggacagcggcaagggcagcugggacugcaucaugaccagcuaccaguaccugaucauccagaacaccaccugggaggaccacugccaguucagcagacccagccccaucggcuaccugggccugcugagccagagaaccagagacaucuacaucagcagaagacugcugggcaccuucaccuggacccugagcgacagcgagggcaacgagacccccggcggcuacugccugaccagauggaugcugaucgaggccgagcugaagugcuucggcaacaccgccguggccaagugcaacgagaagcacgacgaggaguucugcgacaugcugagacuguucgacuucugcaagcaggccaucagaagacugaaggcccccgcccagaugagcauccagcugaucaacaaggccgugaacgcccugaucaacgaccagcugaucaugaagaaccaccugagagacaucaugggcauccccuacugcaacuacagcaaguacugcuaccugaaccacaccgugaccggcagaaccagccugcccagaugcugccuggugagcaacggcagcuaccugaacgagacccacuucagcgacgacaucgagcagcaggccgacaacaugaucaccgagcugcugcagaaggaguacaucgacagacagggcaagaccccccugggccugguggaccuguucguguucagcaccagcuucuaccugaucagcaucuuccugcaccuggugaagauccccacccacagacacaucaucggcaagcccugccccaagccccacagacugaaccacaugggcaucugcagcugcggccuguacaagcaccccggcgugcccgugaaguggaagagaugaggacuagucccuguucccagagcccacuuuuuuuucuuuuuuugaaauaaaauagccugucuuucagaucucaaaggcucuuuucagagccaccaaaaaaaaaaaaaaaaaaaaaaaaaaaaaaaaaaaaaaaaaaaaaaaaaaaaaaaaaaaaaaaaagaauu

SEQ ID NO: 33753 - RNA, 1733 nt, Artificial Sequence
  mRNA product Design a-2 (hSL-A64-N5) comprising derived and/or modified sequence from LASV(LASV254-NIG-2011;Clade II)__AIT17674__GPCmut8 (opt4)
aggagaguccgcucagccagguugcagaagcggcuuagcguguguccuaaucuucucucugcguguagguaggccugugccgcaaacaagcuuaccaugggccagaucaucaccuucuuccaggaggugccccacgugaucgaggaggugaugaacaucgugcugaucgcccugagccugcuggccauccugaagggcaucuacaacguggccaccugcggccuguucggccuggugagcuuccugcugcugugcggcagaagcugcagcaccaccuacaagggcguguacgagcugcagacccuggagcuggacaugaccaaccugaacaugugcaugccccugagcugcaccaagaacaacagccaccacuacaucauggugggcaacgagaccggccuggagcugacccugaccaacaccagcaucaucaaccacaaguucugcaaccugagcgacgcccacaagaagaaccuguacaaccacgcccugaugagcaucaucagcaccuuccaccugagcauccccaacuucaaccaguacgaggccaugagcugcgacuucaacggcggcaagaucagcgugcaguacaaccugagccacagcuacgccguggacgccgccaaccacugcggcaccaucgccaacggcgugcugcagaccuucaugagaauggccuggggcggcagcuacaucgcccuggacagcggcaagggcaacugggacugcaucaugaccagcuaccaguaccugaucauccagaacaccaccugggaggaccacugccaguucagcagacccagccccaucggcuaccugggccugcugagccagagaaccagagacaucuacaucagcagaagacugcugggcaccuucaccuggacccugagcgacagcgagggcaacgagacccccggcggcuacugccugaccagauggaugcugaucgaggccgagcugaagugcuucggcaacaccgccguggccaagugcaacgagaagcacgacgaggaguucugcgacaugcugagacuguucgacuucugcaagcaggccaucagaagacugaagacccccgcccaggccaacauccagcugaucaacaaggccgugaacgcccugaucaacgaccagcugaucaugaagaaccaccugagagacaucaugggcauccccuacugcaacuacagcaaguacugcuaccugaaccacaccgugaccggcaagaccagccugcccagaugcugccuggugagcaacggcagcuaccugaacgagacccacuucagcgacgacaucgagcagcaggccgacaacaugaucaccgagcugcugcagaaggaguacauggacagacagggcaagaccccccugggccugguggaccuguucguguucagcaccagcuucuaccugaucagcaucuuccugcaccuggugaagauccccacccacagacacgugaucggcaagcccugccccaagccccacagacugaaccacaugggcaucugcagcugcggccuguacaagcaccccggcgugcccgugaaguggaagagaugaggacuagucccuguucccagagcccacuuuuuuuucuuuuuuugaaauaaaauagccugucuuucagaucucaaaggcucuuuucagagccaccaaaaaaaaaaaaaaaaaaaaaaaaaaaaaaaaaaaaaaaaaaaaaaaaaaaaaaaaaaaaaaaaagaauu

SEQ ID NO: 33754 - RNA, 1733 nt, Artificial Sequence
  mRNA product Design a-2 (hSL-A64-N5) comprising derived and/or modified sequence from LASV(Nig08-A19;Clade III)__ADU56618__GPCmut8 (opt4)
aggagaguccgcucagccagguugcagaagcggcuuagcguguguccuaaucuucucucugcguguagguaggccugugccgcaaacaagcuuaccaugggccagaucgugaccuucuuccaggaggugccccacgugaucgaggaggugaugaacaucgugcugaucgcccugagcauccuggccauccugaagggccuguacaacaucgccaccugcggccugaucggccuggugaccuuccugcugcugagcggcagaagcugcagcaugaccuacaagggcguguacgagcugcagacccuggagcugaacaugaacacccugaacaugugcaugccccugagcugcaccaagaacaacagccaccacuacaucauggugggcaacgagaccggccuggagcugacccugaccaacaccagccugcugcaccacaaguucugcaaccugagcgacgcccacaagaagaaccuguacgaccacacccugaugagcaucaucagcaccuuccaccugagcauccccaacuucaaccaguacgaggccaugagcugcgacuucaacggcggcaagaucaccgugcaguacaaccugagccacagcuacgccaucgacgccgccaaccacugcggcaccguggccaacggcgugcugcagaccuucaugagaauggccuggggcggcagcuacaucgcccuggacagcggcagaggcaagugggacugcaucaugaccagcuaccaguaccugaucauccagaacaccaccugggaggaccacugccaguucagcagacccagccccaucggcuaccugggccugcugagccagagaaccagagacaucuacaucagcagaagacugcugggcaccuucaccuggacccugagcgacagcgagggcaacgagacccccggcggcuacugccugaccagauggaugcugaucgaggccgagcugaagugcuucggcaacaccgccguggccaagugcaacgagaagcacgacgaggaguucugcgacaugcugagacuguucgacuucugcaagcaggccaucagaagacugaaggcccccgcccagaugagcauccagcugaucaacaaggccgugaacgcccugaucaacgaccagcugaucaugaagaaccaccugagagacaucaugggcauccccuacugcaacuacagcaaguacugcuaccugaaccacaccagcaccggcagaaccagccugcccagaugcugccuggugagcaacggcagcuaccugaacgagacccacuucagcgacgacaucgagcagcaggccgacaacaugaucaccgagaugcugcagaaggaguaccuggacagacagggcaagaccccccugggccugguggaccuguucguguucagcaccagcuucuaccugaucagcaucuuccugcaccuggugaagauccccacccacagacacaucgugggcaagcccugccccaagccccacagacugaaccacaugggcaucugcagcugcggccuguacaagcagcccggcgugcccgugagauggaagagaugaggacuagucccuguucccagagcccacuuuuuuuucuuuuuuugaaauaaaauagccugucuuucagaucucaaaggcucuuuucagagccaccaaaaaaaaaaaaaaaaaaaaaaaaaaaaaaaaaaaaaaaaaaaaaaaaaaaaaaaaaaaaaaaaagaauu

SEQ ID NO: 33755 - RNA, 1736 nt, Artificial Sequence
  mRNA product Design a-2 (hSL-A64-N5) comprising derived and/or modified sequence from LASV(G1180-SLE-2010;Clade IV)__AIT17168__GPCmut8 (opt4)
aggagaguccgcucagccagguugcagaagcggcuuagcguguguccuaaucuucucucugcguguagguaggccugugccgcaaacaagcuuaccaugggccagaucgugaccuucuuccaggaggugccccacgugaucgaggaggugaugaacaucgugcugaucgcccugagcauccuggccgugcugaagggccuguacaacuucgccaccugcggccuggugggccugcugaccuuccugcugcugugcggcagaagcugcaccgccagcagauacaagggcguguacgagcugcagacccuggagcugaacauggagacccugaacaugugcaugccccugagcugcaccaagaacaacagccaccacuacaucauggugggcaacgagaccggccuggagcugacccugaccaacaccagcaucaucaaccacaaguucugcaaccugagcgacgcccacaagaagaaccuguacgaccacgcccugaugagcaucaucagcaccuuccaccugagcauccccaacuucaaccaguacgaggccaugagcugcgacuucaacggcggcaagaucagcgugcaguacaaccugagccacagcuacgccggcgacgccgccaaccacugcggcaccguggccaacggcgugcugcagaccuucaugagaauggccuggggcggcagcuacaucgcccuggacagcggccacggcagcugggacugcaucaugaccagcuaccaguaccugaucauccagaacaccaccugggaggaccacugccaguucagcagacccagccccaucggcuaccugggccugcugagccagagaaccagagacaucuacaucagcagaagacugcugggcaccuucaccuggacccugagcgacagcgagggcaaggacacccccggcggcuacugccugaccagauggaugcugaucgaggccgagcugaagugcuucggcaacaccgccguggccaagugcaacgagaagcacgacgaggaguucugcgacaugcugagacuguucgacuucugcaagcaggccauccagagacugaaggcccccgcccagaugagcauccagcugaucaacaaggccgugaacgcccugaucaacgaccagcugaucaugaagaaccaccugagagacaucaugggcauccccuacugcaacuacagcaaguacugcuaccugaaccacaccaccaccggcaagaccagccugcccaagugcugccuggugagcaacggcagcuaccugaacgagacccacuucagcgacgacaucgagcagcaggccgacaacaugaucaccgagaugcugcagaaggaguacauggagagacagggcaagaccccccugggccugguggaccuguucguguucagcaccagcuucuaccugaucagcaucuuccugcaccuggugaagauccccacccacagacacaucgugggcaagagcugccccaagccccacagacugaaccacaugggcaucugcagcugcggccuguacaagcagcccggcgugcccgugaaguggaagagaugaggacuagucccuguucccagagcccacuuuuuuuucuuuuuuugaaauaaaauagccugucuuucagaucucaaaggcucuuuucagagccaccaaaaaaaaaaaaaaaaaaaaaaaaaaaaaaaaaaaaaaaaaaaaaaaaaaaaaaaaaaaaaaaaagaauu

SEQ ID NO: 33756 - RNA, 1736 nt, Artificial Sequence
  mRNA product Design a-2 (hSL-A64-N5) comprising derived and/or modified sequence from LASV(G1442-SLE-2011;Clade IV)__AIT17180__GPCmut8 (opt4)
aggagaguccgcucagccagguugcagaagcggcuuagcguguguccuaaucuucucucugcguguagguaggccugugccgcaaacaagcuuaccaugggccagaucgugaccuucuuccaggaggugccccacgugaucgaggaggugaugaacaucgugcugaucgcccugagcauccuggccgugcugaagggccuguacaacguggccaccugcggccugaucggccuggugaccuuccugcugcugugcggcagaagcugcaccaccacccuguacaagggcguguacgagcugcagacccuggagcugaacauggagacccugaacaugugcaugccccugagcugcaccaagaacaacagccaccacuacaucagagugggcaacgagaccggccuggagcugacccugaccaacaccagcaucaucaaccacaaguucugcaaccugagcgacgcccacaagaagaaccuguacgaccacgcccugaugagcaucaucagcaccuuccaccugagcauccccaacuucaaccaguacgaggccaugagcugcgacuucaacggcggcaagaucagcgugcaguacaaccugagccacagcuacgccggcgacgccgccaaccacugcggcaccguggccaacggcgugcugcagaccuucaugagaauggccuggggcggcagcuacaucgcccuggacagcggcagaggcaacugggacugcaucaugaccagcuaccaguaccugaucauccagaacaccaccugggacgaccacugccaguucagcagacccagccccaucggcuaccugggccugcugagccagagaaccagagacguguacaucagcagaagacugcugggcaccuucaccuggacccugagcgacagcgagggcaaggacacccccggcggcuacugccugaccagauggaugcugaucgaggccgagcugaagugcuucggcaacaccgccguggccaagugcaacgagaagcacgacgaggaguucugcgacaugcugagacuguucgacuucugcaagcaggccauccagagacugaaggcccccgcccagaugagcauccagcugaucaacaaggccgugaacgcccugaucaacgaccagcugaucaugaagaaccaccugagagacaucaugggcauccccuacugcaacuacagcaaguacugcuaccugaacaacaccgccaccggcaagaccagccugcccaagugcugccugaucagcaacggcagcuaccugaacgagacccacuucagcgacgacaucgagcaggaggccgacaacaugaucaccgagaugcugcagaaggaguacauggagagacagggcaagaccccccugggccugguggaccuguucguguucagcaccagcuucuaccugaucagcaucuuccugcaccuggugaagauccccacccacagacacaucgugggcaagagcugccccaagccccacagacugaaccacaugggcaucugcagcugcggccuguacaagcagcccggcgugcccgugagauggaagagaugaggacuagucccuguucccagagcccacuuuuuuuucuuuuuuugaaauaaaauagccugucuuucagaucucaaaggcucuuuucagagccaccaaaaaaaaaaaaaaaaaaaaaaaaaaaaaaaaaaaaaaaaaaaaaaaaaaaaaaaaaaaaaaaaagaauu

SEQ ID NO: 33757 - RNA, 1736 nt, Artificial Sequence
  mRNA product Design a-2 (hSL-A64-N5) comprising derived and/or modified sequence from LASV(G3010-SLE-2013;Clade IV)__AIT17344__GPCmut8 (opt4)
aggagaguccgcucagccagguugcagaagcggcuuagcguguguccuaaucuucucucugcguguagguaggccugugccgcaaacaagcuuaccaugggccagaucgugaccuucuuccaggaggugccccacgugaucgaggaggugaugaacaucgugcugaucgcccugagcauccuggccgugcugaagggccuguacaacuucgccaccugcggccuggugggccuggugaccuuccugcugcugugcggcagaagcugcaccaccagccuguacaagggcguguacgagcugcagacccuggagcugaacauggagacccugaacaugugcaugccccugagcugcaccaagaacaacagccaccacuacaucauggugggcaacgagaccggccuggagcugacccugaccaacaccagcaucaucaaccacaaguucugcaaccugagcgacgcccacaagaagaaccuguacaaccacgcccugaugagcaucaucagcaccuuccaccugagcauccccaacuucaaccaguacgaggccaugagcugcgacuucaacggcggcaagaucagcgugcaguacaaccugagccacagcuacgccggcgacgccgccagccacugcggcaccguggccaacggcgugcugcagaccuucaugagaauggccuggggcggcagcuacaucgcccuggacagcggcuacggcaagugggacugcaucaugaccagcuaccaguaccugaucauccagaacaccaccugggaggaccacugccaguucagcagacccagccccaucggcuaccugggccugcugagccagagaaccagagacaucuacaucagcagaagacugcugggcaccuucaccuggacccugagcgacagcgagggcaaggacacccccggcggcuacugccugaccagauggaugcugaucgaggccgagcugaagugcuucggcaacaccgccguggccaagugcaacgagaagcacgacgaggaguucugcgacaugcugagacuguucgacuucugcaagcaggccauccagagacugaagacccccgcccagaugagcauccagcugaucaacaaggccgugaacgcccugaucaacgaccagcugaucaugaagaaccaccugagagacaucaugggcauccccuacugcaacuacagcaaguacugcuaccugaaccacaccaccaccggcaagaccagccugcccaagugcugccuggugagcaacggcagcuaccugaacgagacccacuucagcgacgacaucgagcagcaggccgacaacaugaucaccgagaugcugcagaaggaguacauggagagacagggcaagaccccccugggccugguggaccuguucguguucagcaccagcuucuaccugaucagcaucuuccugcaccuggugaagauccccacccacagacacaucgugggcaagagcugccccaagccccacagacugaaccacaugggcaucugcagcugcggccuguacaagcagcccggcgugcccgugagauggaagagaugaggacuagucccuguucccagagcccacuuuuuuuucuuuuuuugaaauaaaauagccugucuuucagaucucaaaggcucuuuucagagccaccaaaaaaaaaaaaaaaaaaaaaaaaaaaaaaaaaaaaaaaaaaaaaaaaaaaaaaaaaaaaaaaaagaauu

SEQ ID NO: 33758 - RNA, 1736 nt, Artificial Sequence
  mRNA product Design a-2 (hSL-A64-N5) comprising derived and/or modified sequence from LASV(G502-SLE-2009;Clade IV)__AIT17126__GPCmut8 (opt4)
aggagaguccgcucagccagguugcagaagcggcuuagcguguguccuaaucuucucucugcguguagguaggccugugccgcaaacaagcuuaccaugggccagaucgugaccuucuuccaggaggugccccacgugaucgaggaggugaugaacaucgugcugaucgcccugagcauccuggccgugcugaagggccuguacaacuucgccaccugcggccuggugggccugcugaccuuccugcugcugugcggcagaagcugcaccaccggccuguacaagggcguguacgagcugcagacccuggagcugaacauggagacccugaacaugugcaugccccugagcugcaccaagaacaacagccaccacuacaucauggugggcaacgagaccggccuggagcugacccugaccaacaccagcaucaucaaccacaaguucugcaaccugagcgacgcccacaagaagaaccuguacgaccacgcccugaugagcaucaucagcaccuuccaccugagcauccccaacuucaaccaguacgaggccaugagcugcgacuucaacggcggcaagaucagcgugcaguacaaccugagccacagcuacgccggcgacgccgccgaccacugcggcaccguggccaacggcgugcugcagaccuucaugagaauggccuggggcggcagcuacaucgcccuggacagcggcagaggcagaugggacugcaucaugaccagcuaccaguaccugaucauccagaacaccaccugggaggaccacugccaguucagcagacccagccccaucggcuaccugggccugcugagccagagaaccagagacaucuacaucagcagaagacugcugggcaccuucaccuggacccugagcgacagcgagggcaaggacacccccggcggcuacugccugaccagauggaugcugaucgaggccgagcugaagugcuucggcaacaccgccguggccaagugcaacgagaagcacgacgaggaguucugcgacaugcugagacuguucgacuucugcaagcaggccauccagagacugaaggcccccgcccagaugagcauccagcugaucaacaaggccgugaacgcccugaucaacgaccagcuggugaugaagaaccaccugagagacaucaugggcauccccuacugcaacuacagcagauacugcuaccugaaccacaccaccaccggcagaaccagccugcccaagugcugccuggugagcaacggcagcuaccugaacgagacccacuucagcgacgacaucgagcagcaggccgacaacaugaucaccgagaugcugcagaaggaguacauggagagacagggcaagaccccccugggccugguggaccuguucguguucagcaccagcuucuaccugaucagcaucuuccugcaccuggugaagauccccacccacagacacaucgugggcaagagcugccccaagccccacagacugaaccacaugggcaucugcagcugcggccuguacaagcagcccggcgugcccgugaaguggaagagaugaggacuagucccuguucccagagcccacuuuuuuuucuuuuuuugaaauaaaauagccugucuuucagaucucaaaggcucuuuucagagccaccaaaaaaaaaaaaaaaaaaaaaaaaaaaaaaaaaaaaaaaaaaaaaaaaaaaaaaaaaaaaaaaaagaauu

SEQ ID NO: 33759 - RNA, 1736 nt, Artificial Sequence
  mRNA product Design a-2 (hSL-A64-N5) comprising derived and/or modified sequence from LASV(G733-SLE-2010;Clade IV)__AIT17154__GPCmut8 (opt4)
aggagaguccgcucagccagguugcagaagcggcuuagcguguguccuaaucuucucucugcguguagguaggccugugccgcaaacaagcuuaccaugggccagaucgugaccuucuuccaggaggugccccacgugaucgaggaggugaugaacaucgugcugaucgcccugagcauccuggccgugcugaagggccuguacaacuucgccaccugcggcaucgugggccuggugagcuuccugcugcugugcggcagaagcugcaccaccagccuguacaagggcguguacgagcugcagacccuggagcugaacauggagacccugaacaugugcaugccccugagcugcaccaagaacaacagccaccacuacaucauggugggcaacgagaccggccuggagcugacccugaccaacaccagcaucaucaaccacaaguucugcaaccugagcgacgcccacaagaagaaccuguacgaccacgcccugaugagcaucaucagcaccuuccaccugagcauccccaacuucaaccaguacgaggccaugagcugcgacuucaacggcggcaagaucagcgugcaguacaaccugagccacagcuacgccggcgacgccgccaaccacugcggcaccaucgccaacggcgugcugcagaccuucaugagaauggccuggggcggcagcuacaucgcccuggacagcggcagagacagaugggacugcaucaugaccagcuaccaguaccugaucauccagaacaccaccugggaggaccacugccaguucagcagacccagccccaucggcuaccugggccugcugagccagagaaccagagacaucuacaucagcagaagacugcugggcaccuucaccuggacccugagcgacagcgagggcaaggacacccccggcggcuacugccugaccagauggaugcugaucgaggccgagcugaagugcuucggcaacaccgccguggccaagugcaacgagaagcacgacgaggaguucugcgacaugcugagacuguucgacuucugcaagcaggccauccagagacugaaggcccccgcccagaugagcauccagcugaucaacaaggccgugaacgcccugaucaacgaccagcugaucaugaagaaccaccugagagacaucaugggcauccccuacugcaacuacagcaaguacugcuaccugaaccacaccaccaccggcaagaccagccugcccaagugcugccuggugagcaacggcagcuaccugaacgagacccacuucagcgacgacaucgagcagcaggccgacaacaugaucaccgagaugcugcagaaggaguacauggagagacagggcaagaccccccugggccugguggaccuguucguguucagcaccagcuucuaccugaucagcaucuuccugcaccuggugaagauccccacccacagacacguggugggcaagagcugccccaagccccacagacugaaccacaugggcaucugcagcugcggccuguacggccagcccggcgugcccgugaaguggaagagaugaggacuagucccuguucccagagcccacuuuuuuuucuuuuuuugaaauaaaauagccugucuuucagaucucaaaggcucuuuucagagccaccaaaaaaaaaaaaaaaaaaaaaaaaaaaaaaaaaaaaaaaaaaaaaaaaaaaaaaaaaaaaaaaaagaauu

SEQ ID NO: 33760 - RNA, 1736 nt, Artificial Sequence
  mRNA product Design a-2 (hSL-A64-N5) comprising derived and/or modified sequence from MOPV/LASV reassortant(IGS-1;Clade IV)__AFY05576__GPCmut8 (opt4)
aggagaguccgcucagccagguugcagaagcggcuuagcguguguccuaaucuucucucugcguguagguaggccugugccgcaaacaagcuuaccaugggccagaucgugaccuucuuccaggaggugccccacgugaucgaggaggugaugaacaucgugcugaucgcccugagcgugcuggccgugcugaagggccuguacaacuucgccaccugcggccuggugggccuggugaccuuccugcugcugugcggcagaagcugcaccaccagccuguacaagggcguguacgagcugcagacccuggagcugaacauggagacccugaacaugugcaugccccugagcugcaccaagaacaacagccaccacuacaucauggugggcaacgagaccggccuggagcugacccugaccaacaccagcaucaucaaccacaaguucugcaaccugagcgacgcccacaagaagaaccuguacgaccacgcccugaugagcaucaucagcaccuuccaccugagcauccccaacuucaaccaguacgaggccaugagcugcgacuucaacggcggcaagaucagcgugcaguacaaccugagccacagcuacgccggcgacgccgccaaccacugcggcaccguggccaacggcgugcugcagaccuucaugagaauggccuggggcggcagcuacaucgcccuggacagcggcagaggcaacugggacugcaucaugaccagcuaccaguaccugaucauccagaacaccaccugggaggaccacugccaguucagcagacccagccccaucggcuaccugggccugcugagccagagaaccagagacaucuacaucagcagaagacugcugggcaccuucaccuggacccugagcgacagcgagggcgaggacacccccggcggcuacugccugaccagauggaugcugaucgaggccgagcugaagugcuucggcaacaccgccguggccaagugcaacgagaagcacgacgaggaguucugcgacaugcugagacuguucgacuucugcaagcaggccauccagagacugaaggcccccgcccagaugagcauccagcugaucaacaaggccgugaacgcccugaucaacgaccagcugaucaugaagaaccaccugagagacaucaugggcauccccuacugcaacuacagcaaguacugcuaccugaaccacaccaccaccggcagaaccagccugcccaagugcugccuggugagcaacggcagcuaccugaacgagacccacuucagcgacgacaucgagcagcaggccgacaacaugaucaccgagaugcugcagaaggaguacauggagagacagggcaagaccccccugggccugguggaccuguucguguucagcaccagcuucuaccugaucagcaucuuccugcaccuggugaagauccccacccacagacacaucgugggcaagagcugccccaagccccacagacugaaccacaugggcaucugcagcugcggccuguacaagcagcccggcgugcccgugaaguggaagagaugaggacuagucccuguucccagagcccacuuuuuuuucuuuuuuugaaauaaaauagccugucuuucagaucucaaaggcucuuuucagagccaccaaaaaaaaaaaaaaaaaaaaaaaaaaaaaaaaaaaaaaaaaaaaaaaaaaaaaaaaaaaaaaaaagaauu

SEQ ID NO: 33761 - RNA, 1736 nt, Artificial Sequence
  mRNA product Design a-2 (hSL-A64-N5) comprising derived and/or modified sequence from LASV(LM765-SLE-2012;Clade IV)__AIT17814__GPCmut8 (opt4)
aggagaguccgcucagccagguugcagaagcggcuuagcguguguccuaaucuucucucugcguguagguaggccugugccgcaaacaagcuuaccaugggccagaucgugaccuucuuccaggaggugccccacgugaucgaggaggugaugaacaucgugcugaucgcccugagcauccuggccgugcugaagggccuguacaacuucgccaccugcggccuggugggccuggugaccuuccugcugcugugcggcagaagcugcaccaccagccuguacaagggcguguacgagcugcagacccuggagcugaacauggagacccugaacaugugcaugccccugagcugcaccaagaacaacagccaccacuacaucauggugggcaacgagaccggccuggagcugacccugaccaacaccagcaucaucgaccacaaguucugcaaccugagcgacgcccacagaaagaaccuguacgaccacgcccugaugagcaucaucagcaccuuccaccugagcauccccaacuucaaccaguacgaggccaugagcugcgacuucaacggcggcaagaucagcgugcaguacaaccugagccacagcuacgccaaggacgccgccgaccacugcggcaccguggccaacggcgugcugcagaccuucaugagaauggccuggggcggcagcuacaucgcccuggacagcggcagaggcagaugggacugcaucaugaccagcuaccaguaccugaucauccagaacaccaccugggaggaccacugccaguucagcagacccagccccaucggcuaccugggccugcugagccagagaaccagagacaucuacaucagcagaagacugcugggcaccuucaccuggacccugagcgacagcgagggcaaggacacccccggcggcuacugccugaccagauggaugcugaucgaggccgagcugaagugcuucggcaacaccgccguggccaagugcaacgagaagcacgacgaggaguucugcgacaugcugagacuguucgacuucugcaagcaggccauccagagacugaaggcccccgcccagaugagcauccagcugaucaacaaggccgugaacgcccugaucaacgaccagcugaucaugaagaaccaccugagagacaucaugggcauccccuacugcaacuacagcaaguacugcuaccugaaccacaccaccaccggcaagaccagccugcccaagugcugccuggugagcaacggcagcuaccugaacgagacccacuucagcgacgacaucgagcagcaggccgacaacaugaucaccgagaugcugcagaaggaguacauggagagacagggcaagaccccccugggccugguggaccuguucguguucagcaccagcuucuaccugaucagcaucuuccugcaccuggugaagauccccacccacagacacaucgugggcaagcccugccccaagccccacagacugaaccacaugggcaucugcagcugcggccuguacaagcagcccggcgugcccgugaaguggaagagaugaggacuagucccuguucccagagcccacuuuuuuuucuuuuuuugaaauaaaauagccugucuuucagaucucaaaggcucuuuucagagccaccaaaaaaaaaaaaaaaaaaaaaaaaaaaaaaaaaaaaaaaaaaaaaaaaaaaaaaaaaaaaaaaaagaauu

SEQ ID NO: 33762 - RNA, 1736 nt, Artificial Sequence
  mRNA product Design a-2 (hSL-A64-N5) comprising derived and/or modified sequence from LASV(LM776-SLE-2012;Clade IV)__AIT17824__GPCmut8 (opt4)
aggagaguccgcucagccagguugcagaagcggcuuagcguguguccuaaucuucucucugcguguagguaggccugugccgcaaacaagcuuaccaugggccagaucgugaccuucuuccaggaggugccccacgugaucgaggaggugaugaacaucgugcugaucgcccugagcauccuggccgugcugaagggccuguacaacuucgccaccugcggccuggugggccuggugaccuuccugcugcugugcggcagaagcugcaccaccagcguguacaagggcguguacgagcugcagacccuggagcugaacauggagacccugaacaugugcaugccccugagcugcaccaagaacaacagccaccacuacaucauggugggcaacgagaccggccuggagcugacccugaccaacaccagcaucaucaaccacaaguucugcaaccugagcgacgcccacaagaagaaccuguacgaccacgcccugaugagcaucaucagcaccuuccaccugagcauccccaacuucaaccaguacgaggccaugagcugcgacuucaacggcggcaagaucagcgugcaguacaaccugagccacagcuacgccggcgacgccgccaaccacugcggcaccguggccaacggcgugcugcagaccuucaugagaauggccuggggcggcagcuacaucgcccuggacagcggccacggcaagugggacugcaucaugaccagcuaccaguaccugaucauccagaacaccaccugggaggaccacugccaguucagcagacccagccccaucggcuaccugggccugcugagccagagaaccagagacaucuacaucagcagaagacugcugggcaccuucaccuggacccugagcgacagcgagggcaaggacacccccggcggcuacugccugaccagauggaugcugaucgaggccgagcugaagugcuucggcaacaccgccguggccaagugcaacgagaagcacgacgaggaguucugcgacaugcugagacuguucgacuucugcaagcaggccauccagagacugaaggcccccgcccagaugagcauccagcugaucaacaaggccgugaacgcccugaucaacgaccagcugaucaugaagaaccaccugagagacaucaugggcauccccuacugcaacuacagcaaguacugcuaccugaaccacaccaccaccggcaagaccagccugcccaagugcugccuggugagcaacggcagcuaccugaacgagacccacuucagcgacgacaucgagcagcaggccgacaacaugaucaccgagaugcugcagaaggaguacauggagagacagggcaagaccccccugggccugguggaccuguucguguucagcaccagcuucuaccugaucagcaucuuccugcaccuggugaagauccccacccacagacacaucgugggcaagagcugccccaagccccacagacugaaccacaugggcaucugcagcugcggccuguacaagcagcccggcgugcccgugagauggaagagaugaggacuagucccuguucccagagcccacuuuuuuuucuuuuuuugaaauaaaauagccugucuuucagaucucaaaggcucuuuucagagccaccaaaaaaaaaaaaaaaaaaaaaaaaaaaaaaaaaaaaaaaaaaaaaaaaaaaaaaaaaaaaaaaaagaauu

SEQ ID NO: 33763 - RNA, 1736 nt, Artificial Sequence
  mRNA product Design a-2 (hSL-A64-N5) comprising derived and/or modified sequence from LASV(Mad39;Clade IV)__ANH09722__GPCmut8 (opt4)
aggagaguccgcucagccagguugcagaagcggcuuagcguguguccuaaucuucucucugcguguagguaggccugugccgcaaacaagcuuaccaugggccagaucgugaccuucuuccaggaggugccccacgugaucgaggaggugaugaacaucgugcugaucgcccugagcauccuggccgugcugaagggccuguacaacguggccaccugcggccugaucggccuggugaccuuccugcugcugugcggcagaagcugcaccaccacccuguacaagggcguguacgagcugcaggcccuggagcugaacauggagacccugaacaugugcaugccccugagcugcaccaagaacaacagccaccacuacaucagagugggcaacgagaccggccuggagcugacccugaccaacaccagccugaucaaccacaaguucugcaaccugagcgacgcccacaagaagaaccuguacgaccacgcccugaugagcaucaucagcaccuuccaccugagcauccccaacuucaaccaguacgaggccaugagcugcgacuucaacgacggcaagaucagcgugcaguacaaccugagccacaccuacgccggcgacaccgccaaccacugcggcaccguggccaacggcgugcugcagaccuucaugagaauggccuggggcggcagcuacaucgcccuggacagcggcagaggcggcugggacugcaucaugaccagcuaccaguaccugaucauccagaacaccaccugggaggaccacugccaguucagcagacccagccccaucggcuaccugggccugcugagccagagaaccagagacaucuacaucagcagaagacugcugggcaccuucaccuggacccugagcgacagcgagggcaaggacacccccggcggcuacugccugaccagauggaugcugaucgaggccgagcugaagugcuucggcaacaccgccguggccaagugcaacgagaagcacgacgaggaguucugcgacaugcugagacuguucgacuucugcaagcaggccauccagagacugaaggcccccgcccagaugagcauccagcugaucaacaaggccgugaacgcccugaucaacgaccagcugaucaugaagaaccaccugagagacaucaugggcauccccuacugcaacuacagcaaguacugcuaccugaaccacaccgugaccggcaagaccagccugcccaagugcugccuggugagcaacggcagcuaccugaacgagacccacuucagcgacgacaucgagcagcaggccgacaacaugaucaccgagaugcugcagaaggaguacauggagagacagggcaagaccccccugggccugguggaccuguucguguucagcaccagcuucuaccugaucagcaucuuccugcaccuggugaagauccccacccacagacacguggugggcaagcccugccccaagccccacagacugaaccacaugggcaucugcagcugcggcuucuacaagcagcccggcgugcccgugagauggaagagaugaggacuagucccuguucccagagcccacuuuuuuuucuuuuuuugaaauaaaauagccugucuuucagaucucaaaggcucuuuucagagccaccaaaaaaaaaaaaaaaaaaaaaaaaaaaaaaaaaaaaaaaaaaaaaaaaaaaaaaaaaaaaaaaaagaauu

SEQ ID NO: 33764 - RNA, 1736 nt, Artificial Sequence
  mRNA product Design a-2 (hSL-A64-N5) comprising derived and/or modified sequence from LASV(Z0947-SLE-2011;Clade IV)__AIT17840__GPCmut8 (opt4)
aggagaguccgcucagccagguugcagaagcggcuuagcguguguccuaaucuucucucugcguguagguaggccugugccgcaaacaagcuuaccaugggccagaucgugaccuucuuccaggaggugccccacgugaucgaggaggugaugaacaucgugcugaucgcccugagcauccuggccgugcugaagggccuguacaacuucgccaccugcggccuggugggccuggugaccuuccugcugcugugcggcagaagcugcaccaucagccuguacaagggcguguacgagcugcagacccuggagcugaacauggagacccugaacaugugcaugccccugagcugcaccaagaacaacagccaccacuacaucauggugggcaacgagaccggccuggagcugacccugaccaacaccagcaucaucaaccacaaguucugcaaccugagcgacgcccacaagaagaaccuguacgaccacgcccugaugagcaucaucagcaccuuccaccugagcauccccaacuucaaccaguacgaggccaugagcugcgacuucaacggcggcaagaucagcgugcaguacaaccugagccacagcuacgccggcgacgccgccaaccacugcggcaccguggccaacggcgugcugcagaccuucaugagaauggccuggggcggcagcuacaucgcccuggacagcggcagagacagaugggacugcaucaugaccagcuaccaguaccugaucauccagaacaccaccugggaggaccacugccaguucagcagacccagccccaucggcuaccugggccugcugagccagagaaccagagacaucuacaucagcagaagacugcugggcaccuucaccuggacccugagcgacagcgagggcaaggacacccccggcggcuacugccugaccagauggaugcugaucgaggccgagcugaagugcuucggcaacaccgccguggccaagugcaacgagaagcacgacgaggaguucugcgacaugcugagacuguucgacuucugcaagcaggccauccagagacugaaggcccccgcccagaugagcauccagcugaucaacaaggccgugaacgcccugaucaacgaccagcugaucaugaagaaccaccugagagacaucaugggcauccccuacugcaacuacagcaaguacugcuaccugaaccacaccaccaccggcaagaccagccugcccaagugcugccuggugagcaacggcagcuaccugaacgagacccacuucagcgacgacaucgagcagcaggccgacaacaugaucaccgagaugcugcagaaggaguacauggagagacagggcaagaccccccugggccugguggaccuguucguguucagcaccagcuucuaccugaucagcaucuuccugcaccuggugaagauccccacccacagacacaucgugggcaagcccugccccaagccccacagacugaaccacaugggcaucugcagcugcggccuguacaagcagcccggcgugcccgugaaguggaagagaugaggacuagucccuguucccagagcccacuuuuuuuucuuuuuuugaaauaaaauagccugucuuucagaucucaaaggcucuuuucagagccaccaaaaaaaaaaaaaaaaaaaaaaaaaaaaaaaaaaaaaaaaaaaaaaaaaaaaaaaaaaaaaaaaagaauu

SEQ ID NO: 33765 - RNA, 1736 nt, Artificial Sequence
  mRNA product Design a-2 (hSL-A64-N5) comprising derived and/or modified sequence from LASV(Josiah;Clade IV)__NP_694870__GPCmut8 (opt5)
aggagaguccgcucagccagguugcagaagcggcuuagcguguguccuaaucuucucucugcguguagguaggccugugccgcaaacaagcuuaccaugggccagaucgugaccuucuuucaagaggucccccacguuauugaagaggugaugaacaucgugcugauugcccucagcguccuggcugugcuuaaggggcuguacaauuucgccacaugcggacucguuggccuggugacguuucuucugcucugugggagauccugcaccacaucucuguauaaaggagucuacgaacugcagacccucgagcugaacauggaaacacuuaauauguguaugccucugagcugcaccaagaacaauucccaucacuauaucauggugggcaacgagacagggcucgagcugacccuuacgaauaccucuauuaucaaccauaaauucuguaaucugagcgacgcgcacaagaaaaaccucuacgaucaugcucugauguccaucauuucuacauuucaccugagcaucccgaauuucaaccaguaugaagccauguccugcgacuuuaauggaggcaagauuagcguucaguacaaccucucucacuccuaugccggcgaugcugccaaucauugugggaccguggcuaacggaguccugcaaacauucaugcggauggccuggggcgggagcuacaucgcgcuugacucuggacgcggcaacugggauugcauuaugaccuccuaccaguaucugaucauucagaauacgacaugggaggaccacugucaguuuagcagacccucuccuaucggguaccucggacugcuuucccaacggacccgcgauaucuauauuagcagacggcugcucggcacauucaccuggacccuguccgacucugaaggcaaggauacacccgggggauacugccugacgcgcuggaugcucaucgaggccgagcugaaauguuuuggcaacaccgcuguggccaagugcaaugaaaaacaugacgaggaguucugcgauaugcuuagacuguuugacuucuguaagcaggcuauucagcggcucaaagccccugcgcagaugagcauccaacugauuaacaaggccgugaaugcucuuaucaacgaucagcugaucaugaagaaucaccuccgcgacauuauggggauccccuauugcaacuacuccaaauauuguuaccugaaucacacaaccacaggaagaaccagccugccuaagugcugucucgucucuaacggcuccuaccugaaugaaacgcauuucagcgacgauauugaacagcaagccgacaacaugaucacagagaugcuucagaaagaguauauggaacggcaggggaagaccccgcugggacucguugaucuguuuguguucucuaccagcuuuuaccugauuuccaucuuccuucaccucgugaaaauccccacacaucgccacauugucggcaagucuugcccuaaaccccauagacugaaucacaugggcaucuguagcugcgggcuguauaagcagccuggagugcccguuaaguggaaacggugaggacuagucccuguucccagagcccacuuuuuuuucuuuuuuugaaauaaaauagccugucuuucagaucucaaaggcucuuuucagagccaccaaaaaaaaaaaaaaaaaaaaaaaaaaaaaaaaaaaaaaaaaaaaaaaaaaaaaaaaaaaaaaaaagaauu

SEQ ID NO: 33766 - RNA, 1733 nt, Artificial Sequence
  mRNA product Design a-2 (hSL-A64-N5) comprising derived and/or modified sequence from LASV(LP;Clade I)__AAF86701__GPCmut8 (opt5)
aggagaguccgcucagccagguugcagaagcggcuuagcguguguccuaaucuucucucugcguguagguaggccugugccgcaaacaagcuuaccaugggccagaucauuaccuucuuucaagaggugccccacgucaucgaagagguuaugaacauugugcugaucgcccucagccugcuugcuauucugaaggggcucuacaauaucgccacaugcggaaucauuggccugguggcguuccuuuuucugugugggaaauccugcucucucacgcugaagggaggcuaugaacugcagacccucgagcugaacauggaaacacuuaauauguguaugccucugagcugcaccaaaaacuccucucaucacuacaucagagucgggaaugagacaggacucgagcugacccuuacaaacaccagcauuaucaaucauaaguucuguaaccuguccgacgcucacaaaaagaaucucuaugaucaugcccugaugucuauuaucagcacguuucaccuguccauuccgaacuucaaucaguacgaagccaugagcugcgacuuuaacggcggcaagaucucugugcaguauaaucucucccacagcuacgcuggggaugccgcugagcauuguggaaccguugccaacggcgugcugcaaacauucaugcggauggcguggggagggcgcuauaucgcccuugacucuggcaaagggaauugggauugcauuaugaccuccuaccaguaccugaucauucagaacacaaccugggaagaccacugucaguuuagcagacccucuccuaucggauaucucggccugcuuucccaacggacgcgcgauauuuacaucagcagacggcugcucggcacauucaccuggacacuguccgacucugaggggaacgagacccccggaggcuauugccugacccgcuggaugcucaucgaagcugagcugaaguguuuugggaauacagccgucgcuaaaugcaacgaaaagcaugaugaggaguucugcgacaugcuuagacuguuugauuucuguaaacaggccauucggcgccucaaggcgccugcccagaugagcauccagcugauuaauaaggcugugaacgcccuuaucaaugaccaacugauuaugaaaaaccaccucagagauaucaugggaauccccuacugcaauuauuccaaguacuguuaucugaaccacacgagcucuggccggaccucccugccuaaaugcugucucauuagcaaugggucuuaccugaacgaaacacaguucagcgacgacaucgagcagcaagcugauaauaugauuaccgaaaugcuucagaaggaguacaucgaacgccagggaaaaacaccgcugggccucguugacauuuuuaucuucuccaccucuuuuuaucugauuagcaucuuccugcaucuuaucaagauucccacgcacagacauaucgugggcaaaccuugccccaagccucaccggcucaaccauaugggggucuguuccugcggacuguacaagcaccccggcgugccgacaaaauggaagcgcugaggacuagucccuguucccagagcccacuuuuuuuucuuuuuuugaaauaaaauagccugucuuucagaucucaaaggcucuuuucagagccaccaaaaaaaaaaaaaaaaaaaaaaaaaaaaaaaaaaaaaaaaaaaaaaaaaaaaaaaaaaaaaaaaagaauu

SEQ ID NO: 33767 - RNA, 1733 nt, Artificial Sequence
  mRNA product Design a-2 (hSL-A64-N5) comprising derived and/or modified sequence from LASV(803213;Clade II)__AAF86703__GPCmut8 (opt5)
aggagaguccgcucagccagguugcagaagcggcuuagcguguguccuaaucuucucucugcguguagguaggccugugccgcaaacaagcuuaccaugggccagaucauuaccuucuuucaagaggugccccacgucaucgaagagguuaugaacauugugcugaucgcccucagccugcuugcuauucugaaggggaucuacaauguggccacaugcggacucuucggccugaucuccuuucuucugcucugugggagaucuugcagcgucacguauaaaggaguguacgaacugcagacccuggagcucaacauggcgaaucugaacauguguaugccucuuuccugcacaaagaauaacucucaucacuauauuaugguuggcaaugaaaccgggcuggagcucacacugaccaacacaagcaucauuaaucauaaauucuguaaccuuuccgacgcucacaagaaaaaucuguacgaucaugcccucaugucuaucauuagcaccuuucaccuguccaucccgaacuucaaucaguaugaggccaugagcugcgacuuuaacggaggcaagauuucugugcaguacaaucugucccacagcuucgcugucgaugccgcuaaccauuguggcacgaucgccaacggggugcuccaaaccuuuaugcggauggcguggggaggcucuuauaucgcccuggacuccgggaagggaaauugggauugcauuaugacaagcuaccaguaccuuaucauucagaacaccacaugggaagaccacugucaguucucucgccccuccccuaucggcuaucuggggcuccugagccaaagaacccgggauauuuacaucucccgcagacuucugggaacguuuacauggacccucucugacagcgagggcaaugaagcucccggcggguauugccugacacgguggaugcugaucgaggccgagcucaaauguuucggaaacaccgcuguugccaagugcaaugaaaaacaugaugaggaauuuugcgacaugcugcgccuuuucgauuucuguaagcaggcgauuaaaagacugaagaccccugcccagauguccauccagcucauuaacaaggcugugaaugcccugaucaacgaccaacuuauuaugaaaaaucaucugcgggauaucaugggcauccccuacugcaacuauagccgcuacuguuaucucaaucacacagucacggggaagaccucucugccuagaugcugucugguguccaacggaagcuaccucaaugagacacacuuuucugacgacauugaacagcaggcugauaacaugaucaccgagaugcugcaaaaagaguacauggaccggcagggcaagacaccgcuugggcugguggaucucuucgucuuuagcaccuccuucuaucugauuucuaucuuucugcaccuuguuaaaauucccacgcaucgccacaucgugggaaagccuugccccaaaccucauagacucaaucacaugggcauuuguagcugcggccuguacaagcaccccggggugccggucaaguggaaacggugaggacuagucccuguucccagagcccacuuuuuuuucuuuuuuugaaauaaaauagccugucuuucagaucucaaaggcucuuuucagagccaccaaaaaaaaaaaaaaaaaaaaaaaaaaaaaaaaaaaaaaaaaaaaaaaaaaaaaaaaaaaaaaaaagaauu

SEQ ID NO: 33768 - RNA, 1733 nt, Artificial Sequence
  mRNA product Design a-2 (hSL-A64-N5) comprising derived and/or modified sequence from LASV(GA391;Clade III)__CAA36645__GPCmut8 (opt5)
aggagaguccgcucagccagguugcagaagcggcuuagcguguguccuaaucuucucucugcguguagguaggccugugccgcaaacaagcuuaccaugggccagaucgugaccuucuuucaagaggucccccacguuauugaagaggugaugaacaucgugcugauugcccucagcauccuggcuauucuuaaggggcuguacaaugucgccacaugcggacucaucggccuggugacguuccuucugcucuccgggagaucuuguagccugaucuauaaaggaaccuacgaacugcagacacucgagcugaacauggaaacccuuaauaugugcaugccucuguccuguacaaagaacaauucucaucacuauauucggguuggcaacgagaccgggcucgagcugacacuuaccaauacgagcauccugaaccauaaauuuugcaaucucuccgacgcgcacaagcgcaaccuguacgaucauucucugaugagcauuaucuccaccuuccaccucagcauuccgaauuuuaaccaguaugaagcuaugucuugugacuucaauggaggcaaaaucacagugcaguacaaccugucccacagcuuugccgucgaugccgcuggccauugcgggacccuugccaauggagugcugcaaacauucaugagaauggcuuggggcgggucuuauauugcccucgacuccggacggggcaacugggauuguaucaugaccagcuaccaguaccugaucauucagaacacgacaugggacgaucacugccaguuuucucgccccuccccuaucggguaucuuggacugcucagccaaagaacccgggacauuuacaucucccgcagacugcugggcacauucaccuggacccucucugauagcgagggcaaugaaacacccgggggauauugucugacgcgguggaugcuuauugaggcggagcugaagugcuuuggcaacaccgccguugcuaaguguaaugaaaaacaugacgaggaguucugcgauaugcuccgccuguuugacuucugcaagcaggccaucagacggcuuaaaaccccugcucagauguccauccagcugauuaacaaggccgugaaugcgcucaucaacgaucaacugauuaugaaaaaucaucugcgcgacaucauggggauucccuacuguaacuauagcagauacugcuaucucaaucacacaucuacaggaaagaccucccugccucgguguugccuuaucagcaacggcucuuaccugaaugaaacgaaguucagcgacgauaucgaacagcaggccgacaacaugauuacagagaugcuccaaaaagaguacaucgaucgccaggggaagaccccgcugggacuggucgaccuuuuuguguucuccaccucuuuuuaucucauuagcaucuuccugcaccuggugaaaauucccacacacagacauaucgucggcaagccuugucccaaaccucaccggcucaaucauaugggcauuugcuccugugggcuguacaagcagcccggaguuccggugagauggaaacgcugaggacuagucccuguucccagagcccacuuuuuuuucuuuuuuugaaauaaaauagccugucuuucagaucucaaaggcucuuuucagagccaccaaaaaaaaaaaaaaaaaaaaaaaaaaaaaaaaaaaaaaaaaaaaaaaaaaaaaaaaaaaaaaaaagaauu

SEQ ID NO: 33769 - RNA, 1736 nt, Artificial Sequence
  mRNA product Design a-2 (hSL-A64-N5) comprising derived and/or modified sequence from LASV(AV;Clade V)__CCA30314__GPCmut8 (opt5)
aggagaguccgcucagccagguugcagaagcggcuuagcguguguccuaaucuucucucugcguguagguaggccugugccgcaaacaagcuuaccaugggccagaucgugaccuucuuucaagaggucccccacguuauugaagaggugaugaacaucgugcugauugcccucagcauccuggcuguccuuaaggggcuguacaauauugccacaugcggacucaucggccugaucacguuccuucugcucugugggagauccugcucuagcaaccuguauaaaggaguguacgaacugcagucccucgaccugaauauggagacccuuaacauguguaugccucugucuugcacaaagaauaacagccaucacuauauucggguuggcaaugauaccgggcucgaacugacacuuaccaacacauccauccugaaucauaaauuuuguaaccucucugacgcgcacaagaaagaucuguacgaccaugcucugaugagcauuaucuccaccuuccaccucagcauuccgaauuuuaaccaguaugaggccaugucuugcgauuucaauggaggcaagaucuccgugcaguacaaccugagccacucuuaugccauugacgcugccaaucauuguggcacggucgcuaacgggauccuucaaaccuuuaugcgcauggccuggggaggcuccuacaucgcgcuggauagcgggagaggaaacugggacugcauuaugacaucuuaccaguaucucaucauucagaauaccacaugggagaaccacugucaguucucccggcccagcccuaucggcuaccuggggcuucugucccaacgcaccagagauauuuauaucucucggcgccuccugggaacguuuacauggacccugagcgacuccgaaggcaaugccacacccggcggguacugccucaccagauggaugcugaucgaggcugaacuuaaguguuucggaaacaccgccguggcuaaaugcaaugagaagcaugaugaggaauuuugcgacaugcugcgccucuucgauuuuuguaaacaggccauuagccggcugaagucuccugcgcagauguccauccagcuuauuaacaaagccguuaaugcucugaucaacgaccaacucauuaugaagaaucaccugagagacaucaugggcauccccuauugcaacuacagcaaguauuguuaccugaaucacacaauuacggggaaaaccucucucccuaagugcugucuggugagcaacggauccuaccuuaaugagacacauuucucugaugacaucgaacagcaggccgauaacaugauuaccgagaugcugcaaaaagaauauauggagcggcagggcaagacaccgcucgggcuggucgaccuguucguguuuagcaccuccuucuaccuuaucagcauuuuucuccgccuggugaaaauccccacgcacagacauauugucggaaagccuugccccaaaccucaccggcugaaucauaugggcaucuguucuugcggccucuauaagcagcccgggguuccggugcgcuggaagagaugaggacuagucccuguucccagagcccacuuuuuuuucuuuuuuugaaauaaaauagccugucuuucagaucucaaaggcucuuuucagagccaccaaaaaaaaaaaaaaaaaaaaaaaaaaaaaaaaaaaaaaaaaaaaaaaaaaaaaaaaaaaaaaaaagaauu

SEQ ID NO: 33770 - RNA, 1733 nt, Artificial Sequence
  mRNA product Design a-2 (hSL-A64-N5) comprising derived and/or modified sequence from LASV(Togo/2016/7082;Clade VI)__AMR44577__GPCmut8 (opt5)
aggagaguccgcucagccagguugcagaagcggcuuagcguguguccuaaucuucucucugcguguagguaggccugugccgcaaacaagcuuaccaugggccagaucauuaccuucuuucaagaggugccccacgucaucgaagagguuaugaacauugugcugaucgcccucagccugcuugcuauucugaaggggguguacaaugucgccacaugcggaaucaucggccucgugacguuccuguuucuuugugggagauccugcucucugauuuauaaaggaagcuacgaacuccagacccuggagcugaacauggaaacacucaauauguguaugccucuguccugcaccaagaacucuagccaucacuauauccggguuggcaaugagacagggcuugagcugacccucacaaacaccuccauuaucaaucauaaauucuguaaccugucugacgcgcacaagcgcaaucuuuacgaucaugcucugaugagcauucucuccacguuucaccugagcaucccgaacuucaaucaguaugaagccaugucuugcgacuuuaacggaggcaaaauuuccgugcaguacaaucugagccacgccuaugcugucgaugccgcugagcauuguggcaccguggccaacgggguucuccaaacauucaugagaauggcguggggaggcucuuacaucgcccuggacuccgggcggggaaauugggauugcaucaugaccagcuaccaguaucuuauuauccagaacacaaccugggaagaccacugucaguuuucucgccccuccccuauuggcuaccuggggcuccugagccaaagaacgcgggauaucuauauuucccgcagacuucugggaacauucaccuggacacucucugacagcgagggcaacgagacccccggcggguacugccugacccgguggaugcugaucgaagcugagcucaaguguuuuggaaauacagccguggcuaagugcaacgaaaaacaugaugaggaguucugcgacaugcugcgccuuuuugauuucuguaagcaggccauccagagacugaaauccccugcgcagaugagcauucaacucaucaauaaggccgucaacgcucugauuaaugaccagcuuaucaugaaaaaccaucugcgggauaugaugggcauucccuauugcaauuacucuaaguauuguuaccucaaccacacguccagcgggcgcaccucucugccuaagugcugucuggugagcaauggauccuaccucaacgaaacacacuucucugacgacaucgagcagcaagccgauaauaugaucaccgaaaugcugcagaaagaguauauugacagacagggcaagacaccgcuugggcugguggaucucuuugucuucagcaccuccuuuuaccugaucagcauuuuccugcaccuuaucaaaauucccacgcaucggcacaucguuggaaagccuugccccaaaccucaucgccucaaccacaugggcauuuguucuugcggccuguauaagcagcccggggugccgacaagauggaaacggugaggacuagucccuguucccagagcccacuuuuuuuucuuuuuuugaaauaaaauagccugucuuucagaucucaaaggcucuuuucagagccaccaaaaaaaaaaaaaaaaaaaaaaaaaaaaaaaaaaaaaaaaaaaaaaaaaaaaaaaaaaaaaaaaagaauu

SEQ ID NO: 33771 - RNA, 1733 nt, Artificial Sequence
  mRNA product Design a-2 (hSL-A64-N5) comprising derived and/or modified sequence from LASV(KAK-428;Clade n.d. (VII))__ANH09740__GPCmut8 (opt5)
aggagaguccgcucagccagguugcagaagcggcuuagcguguguccuaaucuucucucugcguguagguaggccugugccgcaaacaagcuuaccaugggccagaucgugaccuucuuucaagaggucccccacguuauugaagaggugaugaacaucgugcugauugcccucagccugcuugcuauccugaaggggcucuacaauuucgccacaugcggagucauuggccugaucacguuucuucugcucugugggagauccugcucugcgaccuauaaaggacaguacgaacugcagacacuggagcucaacauggaaagccugaauauguguaugccucuuuccugcaccaagaacaauucucaucacuauauccgggcuggcaacaauacagggcuggagcucacccugacaaacaccagcauuaucucccauaaauucuguaaucuuucugacgcccacaagaaaaaccuguacgaucauacgcucaugagcauuaucaccacauuucaccuguccauuccgaauuucaaccaguaugaggccaugagcugcgacuuuaauggaggcaagaucucuauucaauacaaccugucccacagcuaugcuggcgaugccgcucagcauugugggaccguggccaauggaguucuccagacauucaugcgcauggcguggggcgggucuuaccuggcccuugacuccggaagacggggcugggauugcaucaucagcucuuaccaguaucugauuauccaaaacaccacgugggacgaucacugucaguuuucccgccccagcccuauuggguaccucggauucgugucccagaagacaagagacaucuauauuucucggcgccugcuuggcaccuuuacauggacccugagcgauuccgaaggccaugacaugcccgggggauacugccucaccagauggaugcugaucgaggcugaucugaaauguuucggcaacacagccgucgcuaagugcaaugaaaaacacgacgaggaguuuugcgauauguggcgccucuucgacuucuguaagcaggccauccaacggcugaaagcgccugcccagaugaacauucagcuuaucaauaaggcugugaacgcccugauuaaugaccaacucaugaugaagaaccaccugagagauaucauggggauucccuauugcaauuacagcaaauuuuguuaucuuaacaauacgaccacaggacggaccucucugccucgcugcugucucaucuccaacggcagcuaccugaaugaaacacauuucucugacgauaucgagcagcaggcugacaacaugauuaccgaaaugcugcagaaggaguacauggauagacaagggaaaacgccgcucggacugguugaccuuuuuguguucagcacauccuuuuaucugaucaccauuuuccuccaccuggucaagauccccacccaucggcacauugugggcaaaccuugccccaagccucaucgccugaaucacaugggcaucuguucuugcgggcuuuacaaacagcccggagugccggucagauggaagcggugaggacuagucccuguucccagagcccacuuuuuuuucuuuuuuugaaauaaaauagccugucuuucagaucucaaaggcucuuuucagagccaccaaaaaaaaaaaaaaaaaaaaaaaaaaaaaaaaaaaaaaaaaaaaaaaaaaaaaaaaaaaaaaaaagaauu

SEQ ID NO: 33772 - RNA, 1733 nt, Artificial Sequence; identical to SEQ ID NO: 33766
  mRNA product Design a-2 (hSL-A64-N5) comprising derived and/or modified sequence from LASV(Pinneo-NIG-1969;Clade I)__AIT17836__GPCmut8 (opt5)

SEQ ID NO: 33773 - RNA, 1733 nt, Artificial Sequence
  mRNA product Design a-2 (hSL-A64-N5) comprising derived and/or modified sequence from LASV(ISTH0009-NIG-2011;Clade II)__AIT17404__GPCmut8 (opt5)
aggagaguccgcucagccagguugcagaagcggcuuagcguguguccuaaucuucucucugcguguagguaggccugugccgcaaacaagcuuaccaugggccagaucauuaccuucuuucaagaggugccccacgucaucgaagagguuaugaacauugugcugaucgcccucagccugcuugcuauucugaaggggaucuacaauguggccacaugcggacucuucggccuggucuccuuucuucugcucugugggagaucuugcagcacgaccuauaaaggaguguacgaacugcagacacuggagcucgacauggcgucccugaacauguguaugccucuuucuugcaccaagaauaacagccaucacuauaucaugguuggcaaugaaacagggcuggagcucacccugacaaacaccuccauuaucaaucauaaauucuguaaccuuucugaugcucacaagaaaaaucuguacgaccaugcccucaugagcauuaucuccacguuucaccugagcauuccgaacuucaaucaguaugaggccaugucuugcgauuuuaacggaggcaagaucuccgugcaguacaaucugagccacgcuuaugccgucgacgcugccaaccauuguggcaccauugcgaauggggugcuccaaacauucaugcggauggccuggggaggcucuuacaucgcucuggauuccgggaagggaagcugggacugcaucaugaccucuuaccaguaucuuauuauccagaacacaaccugggaagaucacugucaguuuucccgccccagcccuauuggcuaccuggggcuccugucccaaagaacgcgggacaucuauauuucucgcagacuucugggaacauucaccuggacacucagcgauuccgagggcaacgaaacccccggcggguacugccugacccgguggaugcugaucgaggccgagcucaaauguuuuggaaauacagcuguugccaagugcaacgaaaaacaugacgaggaguucugcgauaugcugcgccuuuuugacuucuguaagcaggcgaucagacggcugaaaacgccugcccagaugagcauucagcucaucaauaaggcugugaacgcccugauuaaugaucaacuuaucaugaagaaccaucugcgcgacauuaugggcauccccuauugcaauuacucuaaauauuguuaccucaaccacaccgucacagggaagaccucccugccuagaugcugucuggugagcaauggaucuuaccucaacgaaacacacuucagcgacgauaucgaacagcaggcugacaauaugauuaccgagcugcuucaaaaagaguauauggaucggcagggcaagacgccgcuggggcucguggaccuguuugucuucuccacaucuuuuuaccugaucagcauuuuccuucaccucaucaaaauucccacccaucgccacaucaccggaaagccuugccccaaaccucauagacugaaccacaugggcauuuguuccugcggccuguauaagcaccccgggguuccggugaaguggaaacggugaggacuagucccuguucccagagcccacuuuuuuuucuuuuuuugaaauaaaauagccugucuuucagaucucaaaggcucuuuucagagccaccaaaaaaaaaaaaaaaaaaaaaaaaaaaaaaaaaaaaaaaaaaaaaaaaaaaaaaaaaaaaaaaaagaauu

SEQ ID NO: 33774 - RNA, 1733 nt, Artificial Sequence
  mRNA product Design a-2 (hSL-A64-N5) comprising derived and/or modified sequence from LASV(ISTH2010-NIG-2012;Clade II)__AIT17482__GPCmut8 (opt5)
aggagaguccgcucagccagguugcagaagcggcuuagcguguguccuaaucuucucucugcguguagguaggccugugccgcaaacaagcuuaccaugggccagaucauuaccuucuuucaagaggugccccacgucaucgaagagguuaugaacauugugcugaucgcccucagccugcuugcuauucugaaggggaucuacaauguggccacaugcggacucuucggccuggucuccuuucuucugcucugugggagaucuugcagcacgaccuauaaaggaguguacgaacugcagacacuggagcucgacauggcgucccugaacauguguaugccucuuucuugcaccaagaauaacagccaucacuauaucaugguuggcaaugaaacagggcuggagcucacccugacaaacaccuccauuaucaaucauaaauucuguaaccuuucugaugcucacaagaaaaaucuguacgaccaugcccucaugagcauuaucuccacguuucaccugagcauuccgaacuucaaucaguaugaggccaugucuugcgauuuuaacggaggcaagaucuccgugcaguacaaucugagccacgcuuaugccgucgacgcugccaaccauuguggcaccauugcgaauggggugcuccaaacauucaugcggauggccuggggaggcucuuacaucgcucuggauuccgggaagggaagcugggacugcaucaugaccucuuaccaguaucuuauuauccagaacauuacaugggaagaucacugucaguuuucccgccccagcccuaucggcuaccuggggcuccugucccaaagaacccgggacauuuauaucucucgcagacuucugggaacguucacauggacccucagcgauuccgagggcaacgaaacacccggcggguacugccugacccgguggaugcugaucgaggccgagcucaaauguuuuggaaauaccgcuguugccaagugcaacgaaaaacaugacgaggaguucugcgauaugcugcgccuuuuugacuucuguaagcaggcgauuagacggcugaaaacgccugcccagaugagcauccagcucauuaauaaggcugugaacgcccugaucaaugaucaacuuauuaugaagaaccaucugcgcgacaucaugggcauccccuauugcaauuacucuaaauauuguuaccucaaccacacagucaccgggaagacaucccugccuagaugcugucuggugagcaauggaucuuaccucaacgaaacccacuucagcgacgauauugaacagcaggcugacaauaugaucacagagcugcuucaaaaagaguauauugaucggcagggcaagaccccgcuggggcucguggaccuguuugucuucuccacgucuuuuuaccugaucagcauuuuccuucaccucguuaaaauccccacacaucgccacguggugggaaagccuugccccaaaccucauagacugaaccacaugggcauuuguuccugcggccuguauaagcaccccggggucccggugaaguggaaacggugaggacuagucccuguucccagagcccacuuuuuuuucuuuuuuugaaauaaaauagccugucuuucagaucucaaaggcucuuuucagagccaccaaaaaaaaaaaaaaaaaaaaaaaaaaaaaaaaaaaaaaaaaaaaaaaaaaaaaaaaaaaaaaaaagaauu

SEQ ID NO: 33775 - RNA, 1733 nt, Artificial Sequence
  mRNA product Design a-2 (hSL-A64-N5) comprising derived and/or modified sequence from LASV(Lassa virus/H.sapiens-wt/NGA/2015/ISTH_0543;Clade II)__AVO03639__GPCmut8 (opt5)
aggagaguccgcucagccagguugcagaagcggcuuagcguguguccuaaucuucucucugcguguagguaggccugugccgcaaacaagcuuaccaugggccagaucauuaccuucuuucaagaggugccccacgucaucgaagagguuaugaacauugugcugaucgcccucagccugcuugcuauucugaaggggaucuacaauguggccacaugcggacucuucggccuggucuccuuucuucugcucugugggagaucuugcagcacgaccuauaaaggaguguacgaacugcagacacuggagcucgacauggcgaaccugaauauguguaugccucuuuccugcaccaagaacaauucucaucacuauaucaugguuggcaacgaaacagggcuggagcucacccugacaaauaccagcauuaucaaccauaaauucuguaaucuuuccgaugcucacaagaaaaaccuguacgaccaugcccucaugucuauuaucagcacguuucaccuguccauuccgaauuucaaccaguaugaggccaugagcugcgauuuuaauggaggcaagaucucugugcaguacaaccugucccacaccuaugcugucgacgccgcuaaucauuguggcacaauugccaacggggugcuccaaaccuucaugcggauggcguggggaggcagcuacaucgcccuggauucugggaagggauccugggacugcaucaugacaagcuaccaguaucuuguuauucagaacaccacgugggaagaucacugucaguuuucucgccccuccccuaucggcuaccuggggcuccugagccaaagaacacgggacauuuauaucucccgcagacuucugggaaccuucacauggacccucucugauagcgagggcaaugaaacccccggcggguacugccugacacgguggaugcugauugaggcugagcucaaauguuuuggaaacacggccguggcuaagugcaaugaaaaacaugacgaggaguucugcgauaugcugcgccuuuuugacuucuguaagcaggccaucagacggcugaaaaccccugcgcagauguccauccagcucauuaacaaggccgucaaugcucugaucaacgaucaacuuauuaugaagaaucaucugcgcgacaucaugggcauucccuauugcaacuacagcaaauauuguuaccucaaucacacagugaccgggaagacaucucugccuagaugcugucugguguccaacggaagcuaccucaaugaaacccacuucucugacgauaucgaacagcaggccgacaacaugaucacggagcugcuucaaaaagaguauauugaucggcagggcaagacaccgcuggggcucgucgaccuguuuguuuucagcaccuccuuuuaccugaucucuauuuuccuucaccucgugaaaauccccacccaucgccacauuacaggaaagccuugccccaaaccucauagacugaaucacaugggcaucuguagcugcggccuguauaagcaccccggggugccggucaaguggaaacggugaggacuagucccuguucccagagcccacuuuuuuuucuuuuuuugaaauaaaauagccugucuuucagaucucaaaggcucuuuucagagccaccaaaaaaaaaaaaaaaaaaaaaaaaaaaaaaaaaaaaaaaaaaaaaaaaaaaaaaaaaaaaaaaaagaauu

SEQ ID NO: 33776 - RNA, 1733 nt, Artificial Sequence
  mRNA product Design a-2 (hSL-A64-N5) comprising derived and/or modified sequence from LASV(Lassa virus/H.sapiens-wt/NGA/2016/ISTH_0009;Clade II)__AVO03571__GPCmut8 (opt5)
aggagaguccgcucagccagguugcagaagcggcuuagcguguguccuaaucuucucucugcguguagguaggccugugccgcaaacaagcuuaccaugggccagaucauuaccuucuuucaagaggugccccacgucaucgaagagguuaugaacauugugcugaucgcccucagccugcuugcuauucugaaggggaucuacaauguggccacaugcggacuccugggccuugucuccuuccugcuccugugugggagaucuugcagcacgaccuauaaaggaguguacgaacugcagacacucgagcuggacauggcgucccuuaacauguguaugccucugucuugcaccaagaauaacagccaucacuauaucaugguuggcaaugaaacagggcucgagcugacccuuacaaacaccuccauuaucaaucauaaauuuuguaaccugucugaugcucacaagaaaaaucucuacgaccaugcccugaugagcauuaucuccacguuccaccugagcauuccgaacuuuaaucaguaugaggccaugucuugcgauuucaacggaggccggaucuccgugcaguacaaucucagccacucuuaugcugucgacgccgcuaaccauuguggcaccauugccaauggggugcugcaaacauuuaugcgcauggcguggggaggcuccuacaucgcccuugauagcgggaagggaucuugggacugcaucaugaccuccuaccaguaucugauuauccagaacacaaccugggaagaucacugucaguucagcagacccuccccuauuggcuaccucgggcugcuuucucaacggacgcgcgacaucuauauuagcagacggcugcucggaacauuuaccuggacacuguccgauagcgagggcaacgaaacccccggcggguacugccugacccgcuggaugcucaucgaggcugagcugaaguguuucggaaauacagccguugcuaaaugcaacgaaaagcaugacgaggaauuuugcgauaugcuuagacuguucgacuuuuguaaacaggccauccggcgccucaagacgccugcgcagaugucuauucagcugaucaauaaagccgugaacgcucuuauuaaugaucaacugaucaugaagaaccaccucagagacauuaugggcauccccuauugcaauuacuccaaguauuguuaccugaaccacaccgucacagggaaaaccagccugccucggugcugucucgugucuaauggaagcuaccugaacgagacacauuucuccgacgauaucgaacagcaggccgacaauaugauuaccgagcuucugcaaaaggaguauaucgaucgccagggcaaaacgccgcucgggcugguggaccuguucgucuuuucuaccagcuucuaccuuauuuccaucuuucuccaccugguuaagauucccacacauagacacaucaccggaaaaccuugccccaagccucaucggcugaaccacaugggcauuuguagcugcggccucuauaaucaccccggggugccggugaaauggaagcgcugaggacuagucccuguucccagagcccacuuuuuuuucuuuuuuugaaauaaaauagccugucuuucagaucucaaaggcucuuuucagagccaccaaaaaaaaaaaaaaaaaaaaaaaaaaaaaaaaaaaaaaaaaaaaaaaaaaaaaaaaaaaaaaaaagaauu

SEQ ID NO: 33777 - RNA, 1733 nt, Artificial Sequence
  mRNA product Design a-2 (hSL-A64-N5) comprising derived and/or modified sequence from LASV(Lassa virus/H.sapiens-wt/NGA/2016/ISTH_0017;Clade II)__AVO03567__GPCmut8 (opt5)
aggagaguccgcucagccagguugcagaagcggcuuagcguguguccuaaucuucucucugcguguagguaggccugugccgcaaacaagcuuaccaugggccagaucauuaccuucuuucaagaggugccccacgucaucgaagagguuaugaacauugugcugaucgcccucagccugcuugcuauucugaaggggaucuacaauguggccacaugcggacucuucggccuggucuccuuucuucugcucugugggagaucuugcagcacgaccuauaaaggaguguacgaacugcagacacuggagcucgacauggcgucccugaacauguguaugccucuuucuugcaccaagaauaacagccaucacuauaucaugguuggcaaugaaacagggcuggagcucacccugacaaacaccuccauuaucaaucauaaauucuguaaccuuucugaugcucacaagaaaaaucuguacgaccaugcccucaugagcauuaucuccacguuucaccugagcauuccgaacuucaaucaguaugaggccaugucuugcgauuuuaacggaggcaagaucuccgugcaguacaaucugagccacaccuaugcuauugacgccgcuaaccauuguggcacaaucgccaaugggguccuccaaaccuucaugcggauggcguggggaggcucuuacaucgcccuggauuccgggaagggaagcugggacugcauuaugacaucuuaccaguaucuuaucauucagaacaccacgugggaagaucacugucaguuuucccgccccagcccuaucggcuaccuggggcuccugucccaaagaacacgggacauuuauaucucucgcagacuucugggaaccuucacauggacccucagcgauuccgagggcaacgaaacccccggcggguacugccugacacgguggaugcugaucgaggcugagcucaaauguuuuggaaauacggccguggcuaagugcaacgaaaaacaugacgaggaguucugcgauaugcugcgccuuuuugacuucuguaagcaggccauuagacggcugaaaaccccugcgcagaugagcauccagcucauuaauaaggccguuaacgcucugaucaaugaucaacuuauuaugaagaaccaucugcgcgacaucaugggcauccccuauugcaauuacucuaaauauuguuaccucaaccacacagugaccgggaagacaucccugccuagaugcugucuggucagcaauggaucuuaccucaacgaaacccacuucagcgacgauauugaacagcaggccgacaauaugaucacggagcugcuucaaaaagaguauauggaucggcagggcaagacaccgcuggggcucguggaccuguuuguguucuccaccucuuuuuaccugauuagcaucuuccuucaccucguccgcauucccacccauagacacguuaucggaaaaccuugccccaagccucaucggcugaaccacaugggcauuuguuccugcggccuguauaaacaccccggggugccggugaaguggaagcgcugaggacuagucccuguucccagagcccacuuuuuuuucuuuuuuugaaauaaaauagccugucuuucagaucucaaaggcucuuuucagagccaccaaaaaaaaaaaaaaaaaaaaaaaaaaaaaaaaaaaaaaaaaaaaaaaaaaaaaaaaaaaaaaaaagaauu

SEQ ID NO: 33778 - RNA, 1733 nt, Artificial Sequence
  mRNA product Design a-2 (hSL-A64-N5) comprising derived and/or modified sequence from LASV(Lassa virus/H.sapiens-wt/NGA/2018/ISTH_0959;Clade II)__AVV65099__GPCmut8 (opt5)
aggagaguccgcucagccagguugcagaagcggcuuagcguguguccuaaucuucucucugcguguagguaggccugugccgcaaacaagcuuaccaugggccagaucauuaccuucuuucaagaggugccccacgucaucgaagagguuaugaacauugugcugaucgcccucagccugcuugcuauucugaaggggaucuacaauguggucacaugcggacucuucggccugguguccuuucuucugcucugugggagaucuugcagcacgaccuauaaaggaguuuacgaacugcagacacuggagcucgacauggccucccugaacauguguaugccucuuucuugcaccaagaauaacagccaucacuauaucauggugggcaaugaaacagggcuggagcucacccugacaaacaccuccauuaucaaucauaaauucuguaaccuuucugaugcgcacaagaaaaaucuguacgaccaugcucucaugagcauuaucuccacguuucaccugagcauuccgaacuucaaucaguaugaggccaugucuugcgauuuuaacggaggcaagaucuccguccaguacaaucugagccacgccuaugcuauugacgccgcuaaccauuguggcaccaucgccaauggggugcuccaaacauucaugcggauggcguggggaggcucuuacaucgcccuggauuccgggaagggaagcugggacugcauuaugaccucuuaccaguaucuuaucauucagaacacaaccugggaagaucacugucaguuuucccgccccagcccuaucggcuaccuggggcuccugucccaaagaacgcgggacauuuauaucucucgcagacuucugggaacauucaccuggacacucagcgauuccgagggcaacgaaacccccggcggguacugccugacccgguggaugcugaucgaggcugagcucaaauguuuuggaaauacagccguugcuaagugcaacgaaaaacaugacgaggaguucugcgauaugcugcgccuuuuugacuucuguaagcaggccauuagacggcugaaaacgccugcgcagaugagcauccagcucauuaauaaggccgugaacgcucugaucaaugaucaacuuauuaugaagaaccaucugcgcgacaucaugggcauccccuauugcaauuacucuaaauauuguuaccucaaccacaccgucacagggaagaccucccugccuagaugcugucuggugagcaauggaucuuaccucaacgaaacacacuucagcgacgauauugaacagcaggccgacaauaugaucaccgagcugcuucaaaaagaguauauugaucggcagggcaagacgccgcuggggcucguggaccuguuugucuucuccacaucuuuuuaccugaucagcauuuuccuucaccucguuaaaauccccacccaucgccacgugauuggaaagccuugccccaaaccucauagacugaaccacaugggcaucuguuccugcggccuguauaagcaccccggggugccggucaaguggaaacggugaggacuagucccuguucccagagcccacuuuuuuuucuuuuuuugaaauaaaauagccugucuuucagaucucaaaggcucuuuucagagccaccaaaaaaaaaaaaaaaaaaaaaaaaaaaaaaaaaaaaaaaaaaaaaaaaaaaaaaaaaaaaaaaaagaauu

SEQ ID NO: 33779 - RNA, 1733 nt, Artificial Sequence
  mRNA product Design a-2 (hSL-A64-N5) comprising derived and/or modified sequence from LASV(LASV003-NIG-2008;Clade II)__AIT17580__GPCmut8 (opt5)
aggagaguccgcucagccagguugcagaagcggcuuagcguguguccuaaucuucucucugcguguagguaggccugugccgcaaacaagcuuaccaugggccagaucauuaccuucuuucaagaggugccccacgucaucgaagagguuaugaacauugugcugaucgcccucagccugcuugcuauucugaaggggaucuacaauguggccacaugcggacucuucggccuggucuccuuucuucugcucugugggagaucuugcagcacgaccuauaaaggaguguacgaacugcagacacuggagcucgacauggcgucccugaacauguguaugccucuuucuugcaccaagaauaacagccaucacuauaucaugguuggcaaugaaacagggcuggagcucacccugacaaacaccuccauuaucaaucauaaauucuguaaccuuucugaugcucacaagaaaaaucuguacgaccaugcccucaugagcauuaucuccacguuucaccugagcauuccgaacuucaaucaguaugaggccaugucuugcgauuuuaacggaggcaagaucuccgugcaguacaaucugagccacaccuaugcugucgacgccgcuaaccauuguggcacaauugccaauggggugcuccaaaccuucaugcggauggcguggggaggcucuuacaucgcccuggauuccgggaagggaagcugggacugcaucaugacaucuuaccaguaucuuauuauccagaacaccacgugggaagaucacugucaguuuucccgccccagcccuauuggcuaccuggggcuccugucccaaagaacacgggacaucuauauuucucgcagacuucugggaaccuucacauggacccucagcgauuccgagagcaacgaaacccccggcggcuacugccugacacgguggaugcugaucgaggcugagcucaaauguuuugggaauacggccguugcuaagugcaacgaaaaacaugacgaggaguucugcgauaugcugcgccuuuuugacuucuguaagcaggccaucagacggcugaaagcgccugcccagaugucuauucagcucaucaauaaggcugugaacgcccugauuaaugaucaacuuaucaugaagaaccaucugcgcgacauuaugggaauccccuauugcaauuacuccaaauauuguuaccucaaccacaccgucacaggcagaaccagccugccucggugcugucuggugucuaaugggagcuaccucaacgaaacacacuucuccgacgauaucgaacagcaggcugacaauaugauuaccgagcugcuucaaaaggaguauauggaucgccagggaaaaacgccgcugggccucguggaccuguuugucuucucuaccagcuuuuaccugaucuccauuuuccuucaccucguuaagauccccacacauagacacgugauugggaaaccuugccccaagccucaucggcugaaccacaugggaaucuguagcugcggccuguauaaacaccccggcgugccggucaaguggaagcgcugaggacuagucccuguucccagagcccacuuuuuuuucuuuuuuugaaauaaaauagccugucuuucagaucucaaaggcucuuuucagagccaccaaaaaaaaaaaaaaaaaaaaaaaaaaaaaaaaaaaaaaaaaaaaaaaaaaaaaaaaaaaaaaaaagaauu

SEQ ID NO: 33780 - RNA, 1733 nt, Artificial Sequence
  mRNA product Design a-2 (hSL-A64-N5) comprising derived and/or modified sequence from LASV(LASV035-NIG-2009;Clade II)__AIT17588__GPCmut8 (opt5)
aggagaguccgcucagccagguugcagaagcggcuuagcguguguccuaaucuucucucugcguguagguaggccugugccgcaaacaagcuuaccaugggccagaucauuaccuucuuucaagaggugccccacgucaucgaagagguuaugaacauugugcugaucgcccucagccugcuugcuauucugaaggggaucuacaauguggccacaugcggacucuucggccuggucuccuuucuucugcucugugggagaucuugcagcacgaccuauaaaggaguguacgaacugcagacacuggagcucgacauggcgucccugaacauguguaugccucuuucuugcaccaagaauaacagccaucacuauaucaugguuggcaaugaaacagggcuggagcucacccugacaaacaccuccauuaucaaucauaaauucuguaaccuuucugaugcucacaagaaaaaucuguacgaccaugcccucaugagcauuaucuccacguuucaccugagcauuccgaacuucaaucaguaugaggccaugucuugcgauuuuaacggaggcaagaucuccgugcaguacaaucugagccacgcuuaugccgucgacgcugccaaccauuguggcaccauugcgaauggggugcuccaaacauucaugcggauggccuggggaggcucuuacaucgcucuggauuccgggaagggaagcugggacugcaucaugaccucuuaccaguaucuuauuauccagaacacaaccugggaagaucacugucaguuuucccgccccagcccuauuggcuaccuggggcuccugucccaaagaacgcgggacaucuauauuucucgcagacuucugggaacauucaccuggacacucagcgauuccgagggcaacgaaacccccggcggguacugccugacccgguggaugcugaucgaggccgagcucaaauguuuuggaaauacagcuguugccaagugcaacgaaaaacaugacgaggaguucugcgauaugcugcgccuuuuugacuucuguaagcaggcgaucagacggcugaaagccccugcucagaugagcauucagcucaucaauaaggccgugaacgcucugauuaaugaucaacuuaucaugaagaaccaucugcgcgacauuaugggcauccccuauugcaauuacucuaaauauuguuaccucaaccacacggucaccgggaagacaucccugccuagaugcugucuggugagcaauggaucuuaccucaacgaaacccacuucagcgacgauaucgaacagcaggccgacaauaugauuacagagcugcuucaaaaagaguauaucgaucggcagggcaagaccccgcuggggcucguggaccuguuugucuucuccacgucuuuuuaccugauuagcaucuuccuucaccucguuaaaauucccacacaucgccacgugaucggaaagccuugccccaaaccucauagacugaaccacaugggcauuuguuccugcggccuguauaagcaccccggggugccggucaaguggaaacggugaggacuagucccuguucccagagcccacuuuuuuuucuuuuuuugaaauaaaauagccugucuuucagaucucaaaggcucuuuucagagccaccaaaaaaaaaaaaaaaaaaaaaaaaaaaaaaaaaaaaaaaaaaaaaaaaaaaaaaaaaaaaaaaaagaauu

SEQ ID NO: 33781 - RNA, 1733 nt, Artificial Sequence
  mRNA product Design a-2 (hSL-A64-N5) comprising derived and/or modified sequence from LASV(LASV1000-NIG-2009;Clade II)__AIT17782__GPCmut8 (opt5)
aggagaguccgcucagccagguugcagaagcggcuuagcguguguccuaaucuucucucugcguguagguaggccugugccgcaaacaagcuuaccaugggccagaucauuaccuucuuucaagaggugccccacgucaucgaagagguuaugaacauugugcugaucgcccucagccugcuugcuauucugaaggggaucuacaauguggccacaugcggacucuucggccuggucuccuuucuucugcucugugggagaucuugcagcacgaccuauaaaggaguguacgaacugcagacacuggagcucgacauggcgucccugaacauguguaugccucuuucuugcaccaagaauaacagccaucacuauaucaugguuggcaaugaaacagggcuggagcucacccugacaaacaccuccauuaucaaucauaaauucuguaaccuuucugaugcucacaagaaaaaucuguacgaccaugcccucaugagcauuaucuccacguuucaccugagcauuccgaacuucaaucaguaugaggccaugucuugcgauuuuaacggaggcaagaucuccgugcaguacaaucugagccacaccuaugcugucgacgccgcuaaccauuguggcacaauugccaauggggugcuccaaaccuucaugcggauggcguggggaggcucuuacaucgcccuggauuccgggaagggaagcugggacugcaucaugacaucuuaccaguaucuuauuauccagaacaccacgugggaagaucacugucaguuuucccgccccagcccuauuggcuaccuggggcuccugucccaaagaacacgggacaucuauauuucucgcagacuucugggaaccuucacauggacccucagcgauuccgagggcaacgaaacccccggcggguacugccugacacgguggaugcugaucgaggcugagcucaaauguuuuggaaauacggccguugcuaagugcaacgaaaaacaugacgaggaguucugcgauaugcugcgccuuuuugacuucuguaagcaggccaucaaaagacugaagaccccugcgcagaugagcauucagcucaucaauaaggccgugaacgcucugauuaaugaucaacuuaucaugaaaaaccaucugcgggacauuaugggcauccccuauugcaauuacucuaaguauuguuaccucaaccacacagucaccgggaaaacaucccugccucgcugcugucuggugagcaauggaucuuaccucaacgaaacccacuucagcgacgauaucgaacagcaggccgacaauaugauuacggagcugcuucaaaaggaguauaucgauagacagggcaaaacaccgcuggggcucguggaccuguuugucuucuccaccucuuuuuaccugauuagcaucuuccuucaccucguuaagauucccacccaucggcacguggugggaaaaccuugccccaagccucaucgccugaaccacaugggcaucuguuccugcggccuguauaagcaccccggggucccggugaaauggaagagaugaggacuagucccuguucccagagcccacuuuuuuuucuuuuuuugaaauaaaauagccugucuuucagaucucaaaggcucuuuucagagccaccaaaaaaaaaaaaaaaaaaaaaaaaaaaaaaaaaaaaaaaaaaaaaaaaaaaaaaaaaaaaaaaaagaauu

SEQ ID NO: 33782 - RNA, 1733 nt, Artificial Sequence
  mRNA product Design a-2 (hSL-A64-N5) comprising derived and/or modified sequence from LASV(LASV221-NIG-2010;Clade II)__AIT17624__GPCmut8 (opt5)
aggagaguccgcucagccagguugcagaagcggcuuagcguguguccuaaucuucucucugcguguagguaggccugugccgcaaacaagcuuaccaugggccagaucauuaccuucuuucaagaggugccccacgucaucgaagagguuaugaacauugugcugaucgcccucagccugcuugcuauucugaaggggaucuacaauguggccacaugcggacucuucggccuggucuccuuucuucugcucugugggagaucuugcagcacgaccuauaaaggaguguacgaacugcagacacuggagcucgacauggcgucccugaacauguguaugccucuuucuugcaccaagaauaacagccaucacuauaucaugguuggcaaugaaacagggcuggagcucacccugacaaacaccuccauuaucaaucauaaauucuguaaccuuucugaugcucacaagaaaaaucuguacgaccaugcccucaugagcauuaucuccacguuucaccugagcauuccgaacuucaaucaguaugaggccaugucuugcgauuuuaacggaggcaagaucuccgugcaguacaaucugagccacaccuaugcuauugacgccgcuaaccauuguggcacaaucgccaaugggguccuccaaaccuucaugcggauggcguggggaggcucuuacaucgcccuggauuccgggaagggaagcugggacugcauuaugacaucuuaccaguaucuuaucauucagaacaccacgugggaagaucacugucaguuuucccgccccagcccuaucggcuaccuggggcuccugucccaaagaacacgggacauuuauaucucucgcagacuucugggaaccuucacauggacccucagcgauuccgagggcaacgaaacccccggcggguacugccugacacgguggaugcugaucgaggcugagcucaaauguuuuggaaauacggccguggcuaagugcaacgaaaaacaugacgaggaguucugcgauaugcugcgccuuuuugacuucuguaagcaggccauuagacggcugaaaaccccugcgcagaugagcauccagcucauuaauaaggccguuaacgcucugaucaaugaucaacuuauuaugaagaaccaucugcgcgacaucaugggcauccccuauugcaauuacucuaaauauuguuaccucaaccacacagugaccgggaagacaucccugccuagaugcugucuggucagcaauggaucuuaccucaacgaaacccacuucagcgacgauauugaacagcaggccgacaauaugaucacggagaugcugcaaaaagaguauauggaucggcagggcaagacaccgcuugggcugguggaccucuuuguguucuccaccucuuuuuaccugauuagcaucuuccugcaccuugucaaaauucccacccaucgccacguuaucggaaagccuugccccaaaccucauagacucaaccacaugggcauuuguuccugcggccuguauaagcaccccggggugccggugaaguggaaacggugaggacuagucccuguucccagagcccacuuuuuuuucuuuuuuugaaauaaaauagccugucuuucagaucucaaaggcucuuuucagagccaccaaaaaaaaaaaaaaaaaaaaaaaaaaaaaaaaaaaaaaaaaaaaaaaaaaaaaaaaaaaaaaaaagaauu

SEQ ID NO: 33783 - RNA, 1733 nt, Artificial Sequence
  mRNA product Design a-2 (hSL-A64-N5) comprising derived and/or modified sequence from LASV(LASV237-NIG-2010;Clade II)__AIT17638__GPCmut8 (opt5)
aggagaguccgcucagccagguugcagaagcggcuuagcguguguccuaaucuucucucugcguguagguaggccugugccgcaaacaagcuuaccaugggccagaucauuaccuucuuucaagaggugccccacgucaucgaagagguuaugaacauugugcugaucgcccucagccugcuugcuauucugaaggggaucuacaauguggccacaugcggacucuucggccuggucuccuuucuucugcucugugggagaucuugcagcacgaccuauaaaggaguguacgaacugcagacacuggagcucgacauggcgucccugaacauguguaugccucuuucuugcaccaagaauaacagccaucacuauaucaugguuggcaaugaaacagggcuggagcucacccugacaaacaccuccauuaucaaucauaaauucuguaaccuuucugaugcucacaagaaagaccuguacgaucaugcccucaugagcauuaucuccacguuucaccugagcauuccgaauuucaaccaguaugaggccaugucuugcgacuuuaauggaggcaagaucuccgugcaguacaaccugagccacaccuaugcugucgaugccgcuaaucauuguggcacaauugccaacggggugcuccaaaccuucaugcggauggcguggggaggcucuuacaucgcccuggacuccgggaagggaagcugggauugcaucaugacaucuuaccaguaucuuauuauccagaauaccacgugggaagaccacugucaguuuucccgccccagcccuauuggcuaccuggggcuccugucccaaagaacacgggauaucuauauuucucgcagacuucugggaaccuucacauggacccucagcgacuccgagggcaacgaaacccccggcggguacugccugacacgguggaugcugaucgaggcugagcucaaauguuuuggaaacacggccguugcuaagugcaaugaaaaacaugaugaggaguucugcgacaugcugcgccuuuuugauuucuguaagcaggccaucagacggcugaaaaccccugcgcagaugagcauucagcucaucaacaaggccgugaaugcucugauuaacgaccaacuuaucaugaagaaucaucugcgcgacauuaugggcauccccuauugcaacuacucuaaauauuguuaccucaaucacacagucaccgggaagacaucccugccuagaugcugucuggugagcaacggaucuuaccucaaugaaacccacuucagcgaugacaucgaacagcaggccgauaacaugauuacggagcugcuucaaaaagaguauauggaccggcagggcaagacaccgcuggggcucguggaucuguuugucuucuccaccucuuuuuaccugaucagcauuuuccuucaccucaucaaaauucccacccaucgccacaucacaggaaagccuugccccaaaccucauagacugaaucacaugggcauuuguuccugcggccuguauaagcaccccgggguuccggugaaguggaaacggugaggacuagucccuguucccagagcccacuuuuuuuucuuuuuuugaaauaaaauagccugucuuucagaucucaaaggcucuuuucagagccaccaaaaaaaaaaaaaaaaaaaaaaaaaaaaaaaaaaaaaaaaaaaaaaaaaaaaaaaaaaaaaaaaagaauu

SEQ ID NO: 33784 - RNA, 1733 nt, Artificial Sequence
  mRNA product Design a-2 (hSL-A64-N5) comprising derived and/or modified sequence from LASV(LASV253-NIG-2011;Clade II)__AIT17670__GPCmut8 (opt5)
aggagaguccgcucagccagguugcagaagcggcuuagcguguguccuaaucuucucucugcguguagguaggccugugccgcaaacaagcuuaccaugggccagaucauuaccuucuuucaagaggugccccacgucaucgaagagguuaugaacauugugcugaucgcccucagccugcuugcuauucugaaggggaucuacaauguggccacaugcggacucuucggccuggucuccuuucuucugcucugugggagaucuugcagcacgaccuauaaaggaguguacgaacugcagacacuggagcucgacauggcgucccugaacauguguaugccucuuucuugcaccaagaauaacagccaucacuauaucaugguuggcaaugaaacagggcuggagcucacccugacaaacaccuccauuaucaaucauaaauucuguaaccuuucugaugcucacaagaaaaaucuguacgaccaugcccucaugagcauuaucuccacguuucaccugagcauuccgaacuucaaucaguaugaggccaugucuugcgauuuuaacggaggcaagaucuccgugcaguacaaucugagccacaccuaugcugucgacgccgcuaaccauuguggcacaauugccaauggggugcuccaaaccuucaugcggauggcguggggaggcucuuacaucgcccuggauuccgggaagggaagcugggacugcaucaugacaucuuaccaguaucuuauuauccagaacaccacgugggaagaucacugucaguuuucccgccccagcccuauuggcuaccuggggcuccugucccaaagaacacgggacaucuauauuucucgcagacuucugggaaccuucacauggacccucagcgauuccgagggcaacgaaacccccggcggguacugccugacacgguggaugcugaucgaggcugagcucaaauguuuuggaaauacggccguugcuaagugcaacgaaaaacaugacgaggaguucugcgauaugcugcgccuuuuugacuucuguaagcaggccaucagacggcugaaagcgccugcccagaugagcauucagcucaucaauaaggcugugaacgcccugauuaaugaucaacuuaucaugaagaaccaucugcgcgacauuaugggcauccccuauugcaauuacucuaaauauuguuaccucaaccacaccgucacagggagaaccucccugccucggugcugucuggugagcaauggaucuuaccucaacgaaacacacuucagcgacgauaucgaacagcaggcugacaauaugauuaccgagcugcuucaaaaggaguauaucgaucgccagggcaaaacgccgcuggggcucguggaccuguuugucuucuccacaucuuuuuaccugauuagcaucuuccuucaccucguuaagauucccacccauagacacaucauuggaaaaccuugccccaagccucaucggcugaaccacaugggcaucuguuccugcggccuguauaaacaccccggggugccggugaaguggaagcgcugaggacuagucccuguucccagagcccacuuuuuuuucuuuuuuugaaauaaaauagccugucuuucagaucucaaaggcucuuuucagagccaccaaaaaaaaaaaaaaaaaaaaaaaaaaaaaaaaaaaaaaaaaaaaaaaaaaaaaaaaaaaaaaaaagaauu

SEQ ID NO: 33785 - RNA, 1733 nt, Artificial Sequence
  mRNA product Design a-2 (hSL-A64-N5) comprising derived and/or modified sequence from LASV(LASV254-NIG-2011;Clade II)__AIT17674__GPCmut8 (opt5)
aggagaguccgcucagccagguugcagaagcggcuuagcguguguccuaaucuucucucugcguguagguaggccugugccgcaaacaagcuuaccaugggccagaucauuaccuucuuucaagaggugccccacgucaucgaagagguuaugaacauugugcugaucgcccucagccugcuugcuauucugaaggggaucuacaauguggccacaugcggacucuucggccuggucuccuuucuucugcucugugggagaucuugcagcacgaccuauaaaggaguguacgaacugcagacacuggagcucgacaugaccaaccugaauauguguaugccucuuuccugcacaaagaacaauucucaucacuauaucaugguuggcaacgaaaccgggcuggagcucacacugaccaauacgagcauuaucaaccauaaauucuguaaucuuuccgaugcgcacaagaaaaaccuguacaaucaugcucucaugucuauuaucagcaccuuucaccuguccauuccgaacuucaaucaguaugaggccaugagcugcgacuuuaacggaggcaagaucucugugcaguacaaucugucccacagcuaugccgucgaugcugccaaccauuguggcacaauugcuaacggggugcuccaaaccuucaugcggauggccuggggaggcucuuacaucgcgcuggacuccgggaagggaaauugggauugcaucaugacaagcuaccaguaucuuauuauccagaacaccacgugggaagaccacugucaguuuucucgccccuccccuauuggcuaccuggggcuccugagccaaagaacacgggauaucuauauuucccgcagacuucugggaaccuucacauggacccucucugacagcgagggcaaugaaacccccggcggguacugccugacacgguggaugcugaucgaggccgagcucaaauguuuuggaaacacggcuguugccaagugcaaugaaaaacaugaugaggaguucugcgacaugcugcgccuuuuugauuucuguaagcaggcuaucagacggcugaaaaccccugcccaggcgaacauucagcucaucaauaaggccgugaacgcucugauuaaugaccaacuuaucaugaagaaccaucugcgcgauauuaugggcauccccuauugcaauuacuccaaauauuguuaccucaaccacacagucaccgggaagacaagccugccuagaugcugucuggugucuaauggauccuaccucaacgaaacccacuucagcgacgacaucgaacagcaggccgauaauaugauuacggagcugcuucaaaaagaguauauggaccggcagggcaagacaccgcuggggcucguggaucuguuugucuucucuaccagcuuuuaccugaucuccauuuuccuucaccucguuaaaauccccacccaucgccacgugauuggaaagccuugccccaaaccucauagacugaaccacaugggcaucuguucuugcggccuguauaagcaccccggggugccggucaaguggaaacggugaggacuagucccuguucccagagcccacuuuuuuuucuuuuuuugaaauaaaauagccugucuuucagaucucaaaggcucuuuucagagccaccaaaaaaaaaaaaaaaaaaaaaaaaaaaaaaaaaaaaaaaaaaaaaaaaaaaaaaaaaaaaaaaaagaauu

SEQ ID NO: 33786 - RNA, 1733 nt, Artificial Sequence
  mRNA product Design a-2 (hSL-A64-N5) comprising derived and/or modified sequence from LASV(Nig08-A19;Clade III)__ADU56618__GPCmut8 (opt5)
aggagaguccgcucagccagguugcagaagcggcuuagcguguguccuaaucuucucucugcguguagguaggccugugccgcaaacaagcuuaccaugggccagaucgugaccuucuuucaagaggucccccacguuauugaagaggugaugaacaucgugcugauugcccucagcauccuggcuauucuuaaggggcuguacaauaucgccacaugcggacucaucggccuggucacguuccuucugcucuccgggagaucuuguagcaugaccuauaaaggaguguacgaacugcagacacuggagcucaacaugaauacccugaacaugugcaugccucuuuccuguacaaagaauaacucucaucacuauauuaugguuggcaaugaaaccgggcuggagcucacacugaccaacacgagccuucugcaucacaaauuuugcaaucucuccgacgcgcauaagaaaaaccuguacgaucacacccugaugucuaucauuagcacauuccaccucuccaucccgaauuuuaaccaguaugaggcuaugagcugugacuucaauggaggcaagauuaccgugcaguacaaccugucucauuccuaugccaucgaugccgcuaaucacugcggcacagucgccaacggggugcuucaaaccuuuaugcggauggcuuggggaggcagcuacauugcccuggacucugggcgcggaaagugggauuguaucaugacguccuaccaguaucucaucauucagaacacaaccugggaagaccauugccaguucagcagacccucuccuaucggcuaccuggggcuucugucccaacggacacgcgauauuuauaucagcagacggcuccugggaaccuuuaccuggacacuguccgacucugagggcaaugaaacgcccggcggguacugucucacccgcuggaugcugauugaggcggagcuuaaaugcuucggaaacacagccguugcuaaguguaaugaaaaacacgaugaggaauuuugcgacaugcugagacucuucgauuuuugcaagcaggccauccggcgccugaaagcuccugcccagaugagcauccagcuuauuaacaaggcggugaaugcccugaucaacgaccaacucauuaugaagaaucaccugagagauaucaugggcauucccuauuguaacuacuccaaauauugcuaccugaaucauaccagcacagggcggaccucucucccucgcuguugccuggucuccaacggaagcuaccuuaaugagacgcacuucucugacgacaucgaacagcaggcugauaacaugaucacagagaugcugcaaaaggaguaucucgacagacagggcaaaaccccgcuggggcugguggaucuuuucguguuuagcaccuccuucuaccucauuucuaucuuucugcaucuggucaagauucccacacaccggcauaucguuggaaaaccuugucccaagccucaccgccucaaucacaugggcauuugcagcuguggccuguauaaacagcccggggugccggugagauggaagcggugaggacuagucccuguucccagagcccacuuuuuuuucuuuuuuugaaauaaaauagccugucuuucagaucucaaaggcucuuuucagagccaccaaaaaaaaaaaaaaaaaaaaaaaaaaaaaaaaaaaaaaaaaaaaaaaaaaaaaaaaaaaaaaaaagaauu

SEQ ID NO: 33787 - RNA, 1736 nt, Artificial Sequence
  mRNA product Design a-2 (hSL-A64-N5) comprising derived and/or modified sequence from LASV(G1180-SLE-2010;Clade IV)__AIT17168__GPCmut8 (opt5)
aggagaguccgcucagccagguugcagaagcggcuuagcguguguccuaaucuucucucugcguguagguaggccugugccgcaaacaagcuuaccaugggccagaucgugaccuucuuucaagaggucccccacguuauugaagaggugaugaacaucgugcugauugcccucagcauccuggcuguccuuaaggggcuguacaauuucgccacaugcggacucgugggccugcuuacguuucugcuccugugugggagauccugcaccgcgucucgguauaaaggaguuuacgaacugcagacacucgagcugaacauggaaacccuuaauauguguaugccucugagcugcacaaagaacaauucccaucacuauauuauggugggcaacgagaccgggcucgagcugacacuuaccaauacgucuaucaucaaccauaaauucuguaaucugagcgacgcucacaagaaaaaccucuacgaucaugcccugauguccauuaucucuaccuuucaccugagcauuccgaauuucaaccaguaugaagccauguccugcgacuuuaauggaggcaagaucagcguccaguacaaccucucucacuccuaugcuggcgaugccgcuaaucauugugggacaguggccaacggaguucugcaaaccuucaugcgcauggcguggggcgggagcuacauugcccuugacucuggacacggcuccugggauugcaucaugacaagcuaccaguaucugauuauccagaacaccacgugggaggaccauugucaguuuucuagacccuccccuaucggguaccucggacugcuuagccaacggacacgcgauauuuauaucuccagacggcugcucggcaccuucacauggacccugucugacagcgaaggcaaggauacccccgggggauacugccugacacgcuggaugcucauugaggcugagcugaaauguuuuggcaauacggccguggcuaagugcaacgaaaaacacgacgaggaguucugcgauaugcuuagacuguuugacuucuguaagcaggccauccagcggcucaaagcgccugcccagauguccauucaacugaucaauaaggcugucaacgcccuuaucaaugaucagcugauuaugaagaaccaccuccgcgacaucauggggauucccuauugcaauuacagcaaauauuguuaccugaaccauaccacaaccggaaagacaucucugccuaaaugcugucucguguccaauggcagcuaccugaacgaaacccacuucucugacgauaucgaacagcaagcugacaauaugauuacggagaugcuucagaaggaguauauggaaagacaggggaaaacaccgcugggacucguggaucuguuugucuucagcaccuccuuuuaccugaucucuaucuuccuucaucucguuaagauucccacccaccggcauaucgugggcaaaagcugcccuaagccccaccgccugaaccacaugggcauuuguuccugcgggcuguauaagcagccuggagugcccgucaaauggaagagaugaggacuagucccuguucccagagcccacuuuuuuuucuuuuuuugaaauaaaauagccugucuuucagaucucaaaggcucuuuucagagccaccaaaaaaaaaaaaaaaaaaaaaaaaaaaaaaaaaaaaaaaaaaaaaaaaaaaaaaaaaaaaaaaaagaauu

SEQ ID NO: 33788 - RNA, 1736 nt, Artificial Sequence
  mRNA product Design a-2 (hSL-A64-N5) comprising derived and/or modified sequence from LASV(G1442-SLE-2011;Clade IV)__AIT17180__GPCmut8 (opt5)
aggagaguccgcucagccagguugcagaagcggcuuagcguguguccuaaucuucucucugcguguagguaggccugugccgcaaacaagcuuaccaugggccagaucgugaccuucuuucaagaggucccccacguuauugaagaggugaugaacaucgugcugauugcccucagcauccuggcuguccuuaaggggcuguacaauguggccacaugcggacucauuggccugguuacguuccuucugcucugugggagauccugcaccacaacccuguauaaaggaguguacgaacugcagacacucgagcugaacauggaaacccuuaauauguguaugccucugucuugcacaaagaacaauagccaucacuauauccgggucggcaacgagaccgggcucgagcugacgcuuaccaauacauccaucauuaaccauaaauuuuguaaucugucugacgcgcacaagaaaaaccucuacgaucaugcucugaugagcaucauuuccaccuuccaccugucuaucccgaauuuuaaccaguaugaagccaugagcugcgacuucaauggaggcaagauuuccgugcaguacaaccucagccacucuuaugccggcgaugcugccaaucauugugggacaguugcuaacggagugcugcaaaccuuuaugcgcauggccuggggcggguccuacaucgcgcuugacagcggaagaggcaacugggauugcauuaugacgucuuaccaguaucugaucauccagaauacaaccugggacgaucacugucaguucucccggcccagcccuauuggguaccucggacugcuuucucaacgcacaagagacgucuauaucucccggcgccugcucggcaccuuuaccuggacacugagcgauuccgagggcaaggacacgcccgggggauacugccugaccagauggaugcucauugaagccgagcugaaauguuucggcaacacagcuguggccaagugcaaugagaaacaugaugaagaguuuugcgacaugcuucggcuguucgauuuuuguaagcaggcuauccagcgccucaaagccccugcgcagaugucuauucaacugaucaacaaggccgugaaugcucuuaucaacgaccagcugauuaugaagaaucaccucagagacaucauggggauucccuauugcaacuacagcaaauauuguuaccugaauaacaccgccacaggaaagaccucccugccuaaaugcugucucaucagcaauggcucuuaccugaacgaaacgcacuucuccgaugacauugagcaggaagcugauaauaugaucacagagaugcuucaaaaggaguauauggaacggcaggggaaaaccccgcugggacucgucgaccuguucguuuuuagcaccucuuucuaccugaucagcauuuuucuucaucucgugaagauccccacacaccgccauauugugggcaaauccugcccuaagccccacagacugaaccauaugggcaucuguucuugcgggcuguauaagcagccuggaguccccgugcgguggaaacgcugaggacuagucccuguucccagagcccacuuuuuuuucuuuuuuugaaauaaaauagccugucuuucagaucucaaaggcucuuuucagagccaccaaaaaaaaaaaaaaaaaaaaaaaaaaaaaaaaaaaaaaaaaaaaaaaaaaaaaaaaaaaaaaaaagaauu

SEQ ID NO: 33789 - RNA, 1736 nt, Artificial Sequence
  mRNA product Design a-2 (hSL-A64-N5) comprising derived and/or modified sequence from LASV(G3010-SLE-2013;Clade IV)__AIT17344__GPCmut8 (opt5)
aggagaguccgcucagccagguugcagaagcggcuuagcguguguccuaaucuucucucugcguguagguaggccugugccgcaaacaagcuuaccaugggccagaucgugaccuucuuucaagaggucccccacguuauugaagaggugaugaacaucgugcugauugcccucagcauccuggcuguccuuaaggggcuguacaauuucgccacaugcggacucgugggccugguuacguuucuucugcucugugggagauccugcaccacaucucuguauaaaggaguguacgaacugcagacccucgagcugaacauggaaacacuuaauauguguaugccucugagcugcaccaagaacaauucccaucacuauauuauggucggcaacgagacagggcucgagcugacccuuacgaauaccucuaucaucaaccauaaauucuguaaucugagcgacgcgcacaagaaaaaccucuacaaucaugcucugauguccauuaucucuacauuucaccugagcauuccgaacuucaaucaguaugaagccauguccugcgauuuuaacggaggcaagaucagcgugcaguacaaucucucucacuccuaugccggcgacgcugccagccauugugggaccguugcuaacggagugcugcaaacauucaugcggauggccuggggcgggucuuacauugcgcuugauuccggauacggcaagugggacugcaucaugaccagcuaucaguaccugauuauccagaacacgacaugggaggaucacugucaguuuucucgccccuccccuaucggguaucucggacugcuuagccaaagaacccgggacauuuacaucucccgcagacugcucggcacauucaccuggacccugucugauagcgaaggcaaagacacacccgggggauauugccugacgcgguggaugcucauugaggccgagcugaaguguuuuggcaauaccgcugucgccaaaugcaacgaaaagcaugaugaggaguucugcgacaugcuucgccuguuugauuucuguaaacaggcuauccagagacucaagaccccugcccagauguccauucaacugaucaauaaggcggugaacgcccuuaucaaugaccagcugauuaugaaaaaccaccuccgggauaucauggggauucccuacugcaauuauagcaaguacuguuaccugaaccacacaacaaccggaaaaacgucucugccuaagugcugucucguguccaauggcagcuaucugaacgaaacacauuucucugacgacaucgaacagcaagcugauaauaugauuaccgagaugcuucagaaagaguacauggaacgccaggggaagaccccgcugggacucgucgaccuguuuguuuucagcacauccuuuuaucugaucucuaucuuccuucaccucgugaaaauucccacccauagacacaucgugggcaagagcugcccuaagccccaucggcugaaccacaugggcauuuguuccugcgggcuguacaaacagccuggaguccccgugcgcuggaagagaugaggacuagucccuguucccagagcccacuuuuuuuucuuuuuuugaaauaaaauagccugucuuucagaucucaaaggcucuuuucagagccaccaaaaaaaaaaaaaaaaaaaaaaaaaaaaaaaaaaaaaaaaaaaaaaaaaaaaaaaaaaaaaaaaagaauu

SEQ ID NO: 33790 - RNA, 1736 nt, Artificial Sequence
  mRNA product Design a-2 (hSL-A64-N5) comprising derived and/or modified sequence from LASV(G502-SLE-2009;Clade IV)__AIT17126__GPCmut8 (opt5)
aggagaguccgcucagccagguugcagaagcggcuuagcguguguccuaaucuucucucugcguguagguaggccugugccgcaaacaagcuuaccaugggccagaucgugaccuucuuucaagaggucccccacguuauugaagaggugaugaacaucgugcugauugcccucagcauccuggcuguccuuaaggggcuguacaauuucgccacaugcggacucgugggccugcuuacguuucugcuccugugugggagauccugcaccacaggacuguauaaaggcguuuacgaacuccagacccuggagcuuaacauggaaacacugaauauguguaugccucucucuugcaccaagaacaauagccaucacuauauuaugguggggaacgagacaggacuggagcuuacccugacgaauaccuccaucaucaaccauaaauucuguaaucucucugacgcgcacaagaaaaaccuguacgaucaugcucugaugagcauuaucuccacauuucaccucucuauuccgaauuucaaccaguaugaagccaugagcugcgacuuuaauggcggcaagaucuccguccaguacaaccugagccacucuuaugccggggaugcugccgaccauuguggaaccguggcuaauggcguucuucaaacauucaugcggauggccuggggaggguccuacauugcgcuggauagcggccgcgggagaugggacugcaucaugaccucuuaccaguaucucauuauccagaacacgacaugggaggaucacugucaguuuucccggcccagcccuaucggauaccugggccuucugucucaacgcaccagagacauuuauaucucccggcgccuccugggcacauucaccuggacccugagcgauuccgaagggaaggacacacccggaggcuacugccucacgagauggaugcugauugaggccgagcuuaaauguuuugggaacaccgcuguggccaagugcaaugaaaaacaugaugaggaguucugcgacaugcugcggcucuuugauuucuguaagcaggcuauccagcgccugaaagccccugcgcagaugucuauucaacuuaucaacaaggccgucaaugcucugaucaacgaccagcucgugaugaagaaucaccugagagacauuaugggaauccccuauugcaacuacagccgguauuguuaccugaaucacacaaccacaggccgcaccucccucccuaaaugcugucuggugagcaacgggucuuaccuuaaugaaacgcauuucuccgaugacauugaacagcaagccgauaacaugaucacagagaugcugcagaaggaguauauggaaagacagggaaaaaccccgcucggccuggucgaccuguuuguuuucagcaccucuuuuuaccuuauuagcaucuuccuccaccuggugaagauccccacacaucggcacauugugggcaaauccugcccuaagccccaucgccugaaucacauggggaucuguucuugcggacucuauaaacagccuggcguccccgugaaguggaagagaugaggacuagucccuguucccagagcccacuuuuuuuucuuuuuuugaaauaaaauagccugucuuucagaucucaaaggcucuuuucagagccaccaaaaaaaaaaaaaaaaaaaaaaaaaaaaaaaaaaaaaaaaaaaaaaaaaaaaaaaaaaaaaaaaagaauu

SEQ ID NO: 33791 - RNA, 1736 nt, Artificial Sequence
  mRNA product Design a-2 (hSL-A64-N5) comprising derived and/or modified sequence from LASV(G733-SLE-2010;Clade IV)__AIT17154__GPCmut8 (opt5)
aggagaguccgcucagccagguugcagaagcggcuuagcguguguccuaaucuucucucugcguguagguaggccugugccgcaaacaagcuuaccaugggccagaucgugaccuucuuucaagaggucccccacguuauugaagaggugaugaacaucgugcugauugcccucagcauccuggcuguccuuaaggggcuguacaauuucgccacaugcggaauugugggccucguuuccuuucugcuucugugugggagaucuugcacgaccagccucuauaaaggaguguacgaacugcagacacuggagcucaacauggaaacccugaauauguguaugccucuuuccugcacaaagaacaauucucaucacuauaucauggucggcaacgagaccgggcuggagcucacacugaccaauacgagcaucauuaaccauaaauucuguaaucuuuccgacgcgcacaagaaaaaccuguacgaucaugcucucaugucuaucauuagcaccuuucaccuguccaucccgaauuucaaccaguaugaagccaugagcugcgacuuuaauggaggcaagauuucugugcaguacaaccugucccacagcuaugccggcgaugcugccaaucauugugggacaaucgcuaacggaguucuccaaaccuucaugcggauggccuggggcgggucuuacauugcgcuggacuccggacgcgauagaugggacugcaucaugacaagcuaccaguaucuuaucauucagaacaccacgugggaggaucacugucaguuuucucggcccuccccuaucggcuaccuggggcuccugagccaacgcacaagagacauuuauaucucccggcgccuucugggaaccuucacauggacccucucugauagcgaaggcaaggacacccccggcggguacugccugacaagauggaugcugauugaggccgagcucaaauguuuuggaaauacggcuguggccaagugcaacgaaaaacaugaugaggaguucugcgacaugcugcggcuuuuugauuucuguaagcaggcuauccagcgccugaaagccccugcgcagauguccauccaacucauuaauaaggccgucaacgcucugaucaaugaccagcuuauuaugaagaaccaccugagagacaucaugggcauucccuauugcaauuacagcaaauauuguuaccucaaccacaccacaaccgggaagacaucucugccuaaaugcugucugguguccaauggaagcuaccucaacgaaacccauuucucugaugacaucgaacagcaagccgauaauaugaucacggagaugcugcagaaggaguauauggaacggcagggcaaaacaccgcuugggcugguggaccucuuugucuucagcaccuccuuuuaccugauuucuaucuuccugcaccuuguuaagauucccacccaucgccacguggugggaaaaagcugcccuaagccccauagacucaaccacaugggcaucuguuccugcggccuguaugggcagccuggaguccccgugaaguggaaacggugaggacuagucccuguucccagagcccacuuuuuuuucuuuuuuugaaauaaaauagccugucuuucagaucucaaaggcucuuuucagagccaccaaaaaaaaaaaaaaaaaaaaaaaaaaaaaaaaaaaaaaaaaaaaaaaaaaaaaaaaaaaaaaaaagaauu

SEQ ID NO: 33792 - RNA, 1736 nt, Artificial Sequence
  mRNA product Design a-2 (hSL-A64-N5) comprising derived and/or modified sequence from MOPV/LASV reassortant(IGS-1;Clade IV)__AFY05576__GPCmut8 (opt5)
aggagaguccgcucagccagguugcagaagcggcuuagcguguguccuaaucuucucucugcguguagguaggccugugccgcaaacaagcuuaccaugggccagaucgugaccuucuuucaagaggucccccacguuauugaagaggugaugaacaucgugcugauugcccucagcguccuggcugugcuuaaggggcuguacaauuucgccacaugcggacucguuggccuggugacguuucuucugcucugugggagauccugcaccacaucucuguauaaaggagucuacgaacugcagacccucgagcugaacauggaaacacuuaauauguguaugccucugagcugcaccaagaacaauucccaucacuauaucauggugggcaacgagacagggcucgagcugacccuuacgaauaccucuauuaucaaccauaaauucuguaaucugagcgacgcgcacaagaaaaaccucuacgaucaugcucugauguccaucauuucuacauuucaccugagcaucccgaauuucaaccaguaugaagccauguccugcgacuuuaauggaggcaagauuagcguucaguacaaccucucucacuccuaugccggcgaugcugccaaucauugugggaccguggcuaacggaguccugcaaacauucaugcggauggccuggggcgggagcuacaucgcgcuugacucuggacgcggcaacugggauugcauuaugaccuccuaccaguaucugaucauucagaauacgacaugggaggaccacugucaguuuagcagacccucuccuaucggguaccucggacugcuuucccaacggacccgcgauaucuauauuagcagacggcugcucggcacauucaccuggacccuguccgacucugaaggcgaggauacacccgggggauacugccugacgcgcuggaugcucaucgaggccgaacugaaguguuuuggcaacaccgcuguggccaaaugcaaugagaagcaugacgaagaguucugcgauaugcuuagacuguuugacuucuguaaacaggcuauucagcggcucaaggccccugcgcagaugagcauccaacugauuaacaaagccgugaaugcucuuaucaacgaucagcugaucaugaagaaucaccuccgcgacauuauggggauccccuauugcaacuacuccaaguauuguuaccugaaucacacaaccacaggaagaaccagccugccuaaaugcugucucgucucuaacggcuccuaccugaaugaaacgcauuucagcgacgauauugagcagcaagccgacaacaugaucacagagaugcuucagaaggaauauauggagcggcaggggaaaaccccgcugggacucguugaucuguuuguguucucuaccagcuuuuaccugauuuccaucuuccuucaccucgugaagauccccacacaucgccacauugucggcaaaucuugcccuaagccccauagacugaaucacaugggcaucuguagcugcgggcuguauaaacagccuggagugcccguuaaguggaagcggugaggacuagucccuguucccagagcccacuuuuuuuucuuuuuuugaaauaaaauagccugucuuucagaucucaaaggcucuuuucagagccaccaaaaaaaaaaaaaaaaaaaaaaaaaaaaaaaaaaaaaaaaaaaaaaaaaaaaaaaaaaaaaaaaagaauu

SEQ ID NO: 33793 - RNA, 1736 nt, Artificial Sequence
  mRNA product Design a-2 (hSL-A64-N5) comprising derived and/or modified sequence from LASV(LM765-SLE-2012;Clade IV)__AIT17814__GPCmut8 (opt5)
aggagaguccgcucagccagguugcagaagcggcuuagcguguguccuaaucuucucucugcguguagguaggccugugccgcaaacaagcuuaccaugggccagaucgugaccuucuuucaagaggucccccacguuauugaagaggugaugaacaucgugcugauugcccucagcauccuggcuguccuuaaggggcuguacaauuucgccacaugcggacucgugggccugguuacguuucuucugcucugugggagauccugcaccacaucucuguauaaaggaguguacgaacugcagacccucgagcugaacauggaaacacuuaauauguguaugccucugagcugcaccaagaacaauucccaucacuauauuauggucggcaacgagacagggcucgagcugacccuuacgaauaccucuaucaucgaccauaaauucuguaaccugagcgaugcgcaccggaagaaucucuacgaccaugcucugauguccauuaucucuacauuucaccugagcauuccgaacuucaaucaguaugaagccauguccugcgauuuuaacggaggcaaaaucagcgugcaguacaaucucucucacuccuaugccaaggacgcugccgaucauuguggcaccguugcuaacggggugcugcaaacauucaugcgcauggccuggggaggcagcuacauugcgcuugacucugggagaggacggugggauugcaucaugaccuccuaccaguaucugauuauccagaauacgacaugggaggaccacugucaguuuagccgccccucuccuaucggcuaccucgggcugcuuucccaaagaacccgggauauuuauaucagccgcagacugcucggaacauucaccuggacccuguccgacucugaaggcaaggauacacccggcggguacugccugacgcgguggaugcucauugaggccgagcugaaauguuuuggaaacaccgcugucgccaagugcaacgaaaaacaugacgaggaguucugcgauaugcuucgccuguuugacuucuguaagcaggcuauccagagacucaaagccccugcgcagaugagcauucaacugaucaauaaggccgugaacgcucuuaucaaugaccagcugauuaugaagaaccaccuccgggauaucaugggcauucccuauugcaauuacuccaaauauuguuaccugaaccacacaaccacagggaagaccagccugccuaaaugcugucucgugucuaauggauccuaccugaacgaaacgcauuucagcgacgauaucgaacagcaagccgacaauaugauuacagagaugcuucagaaggaguauauggaacgccagggcaaaaccccgcuggggcucgucgaucuguuuguuuucucuaccagcuuuuaccugaucuccaucuuccuucaccucgugaagauucccacacauagacacaucgugggaaaaccuugccccaagccucaucggcugaaccacaugggcauuuguucuugcggccuguauaagcagcccggggucccggugaaauggaagcgcugaggacuagucccuguucccagagcccacuuuuuuuucuuuuuuugaaauaaaauagccugucuuucagaucucaaaggcucuuuucagagccaccaaaaaaaaaaaaaaaaaaaaaaaaaaaaaaaaaaaaaaaaaaaaaaaaaaaaaaaaaaaaaaaaagaauu

SEQ ID NO: 33794 - RNA, 1736 nt, Artificial Sequence
  mRNA product Design a-2 (hSL-A64-N5) comprising derived and/or modified sequence from LASV(LM776-SLE-2012;Clade IV)__AIT17824__GPCmut8 (opt5)
aggagaguccgcucagccagguugcagaagcggcuuagcguguguccuaaucuucucucugcguguagguaggccugugccgcaaacaagcuuaccaugggccagaucgugaccuucuuucaagaggucccccacguuauugaagaggugaugaacaucgugcugauugcccucagcauccuggcuguccuuaaggggcuguacaauuucgccacaugcggacucgugggccugguuacguuucuucugcucugugggagauccugcaccacaucuguguauaaaggagucuacgaacugcagacccuggagcucaacauggaaacacugaauauguguaugccucuuagcugcaccaagaacaauucccaucacuauauuauggugggcaacgagacagggcuggagcucacccugacgaauaccucuaucaucaaccauaaauucuguaaucuuagcgacgcgcacaagaaaaaccuguacgaucaugcucucauguccauuaucucuacauuucaccugagcauuccgaauuucaaccaguaugaagccauguccugcgacuuuaauggaggcaagaucagcguucaguacaaccugucucacuccuaugccggcgaugcugccaaucauugugggaccguggcuaacggaguccuccaaacauucaugcggauggccuggggcgggagcuacauugcgcuggacucuggacacggcaagugggauugcaucaugaccuccuaccaguaucuuauuauccagaacacgacaugggaggaccauugucaguuuagccgccccucuccuaucggguaccugggacuccugucccaaagaacccgggauauuuauaucagccgcagacuucugggcacauucaccuggacccucuccgacucugaaggcaaagauacacccgggggauacugccugacgcgguggaugcugauugaggccgagcucaaguguuuuggcaauaccgcuguggccaaaugcaacgaaaagcacgacgaggaguucugcgauaugcugcgccuuuuugacuucuguaaacaggcuauccagagacugaaggccccugcgcagaugagcauucaacucaucaauaaggccgugaacgcucugaucaaugaucagcuuauuaugaaaaaccaucugcgggacaucauggggauucccuauugcaauuacuccaaguauuguuaccucaaccacacaaccacaggaaaaaccagccugccuaagugcugucuggucucuaauggcuccuaccucaacgaaacgcacuucagcgacgauaucgaacagcaagccgacaauaugauuacagagaugcugcagaaagaguauauggaacgccaggggaagaccccgcuuggacugguugaucucuuuguguucucuaccagcuuuuaccugaucuccaucuuccugcaucuugugaaaauucccacacacagacauaucgucggcaagucuugcccuaagccccaccggcucaaccacaugggcauuuguagcugcgggcuguauaaacagccuggagugcccguucgcuggaagagaugaggacuagucccuguucccagagcccacuuuuuuuucuuuuuuugaaauaaaauagccugucuuucagaucucaaaggcucuuuucagagccaccaaaaaaaaaaaaaaaaaaaaaaaaaaaaaaaaaaaaaaaaaaaaaaaaaaaaaaaaaaaaaaaaagaauu

SEQ ID NO: 33795 - RNA, 1736 nt, Artificial Sequence
  mRNA product Design a-2 (hSL-A64-N5) comprising derived and/or modified sequence from LASV(Mad39;Clade IV)__ANH09722__GPCmut8 (opt5)
aggagaguccgcucagccagguugcagaagcggcuuagcguguguccuaaucuucucucugcguguagguaggccugugccgcaaacaagcuuaccaugggccagaucgugaccuucuuucaagaggucccccacguuauugaagaggugaugaacaucgugcugauugcccucagcauccuggcuguccuuaaggggcuguacaauguggccacaugcggacucauuggccugguuacguuccuucugcucugugggagauccugcaccacaacccuguauaaaggaguguacgaacugcaggcgcucgagcugaacauggaaacacuuaauauguguaugccucugucuugcaccaagaacaauagccaucacuauauccgggucggcaacgagacagggcucgagcugacccuuacgaauaccucccugaucaaccauaaauuuuguaaucucucugacgcucacaagaaaaaccuguacgaucaugcccugaugagcauuaucuccacauuccaccucucuauuccgaauuuuaaccaguaugaagccaugagcugcgacuucaaugauggaaagaucuccgugcaguacaaccugagccacaccuaugcuggcgacacagccaaucauuguggcaccguugcuaacggggugcuucaaacguuuaugcgcauggccuggggaggcucuuacauugcgcuggauuccgggagaggaggcugggacugcaucaugacaagcuaccaguaucucauuauccagaacaccacaugggaggaucacugucaguucucucggcccuccccuaucggguaccugggacuucugagccaacgcaccagagacauuuauaucucucggcgccuccugggcaccuuuacauggacgcuguccgauagcgaaggcaaggacacccccgggggauacugccucacaagauggaugcugauugaggccgagcuuaaauguuucggcaauaccgcugucgccaagugcaacgaaaaacaugaugaggaauuuugcgacaugcugcgccucuucgauuuuuguaagcaggcuauccagcggcugaaagccccugcgcagauguccauucaacuuaucaauaaggccgugaacgcucugaucaaugaccagcucauuaugaagaaccaccugagagacaucauggggauucccuauugcaauuacucuaaauauuguuaccugaaccacacagugaccggaaagacgagccucccuaaaugcugucuggucuccaauggcagcuaccuuaacgagacacauuucucugaugacaucgaacagcaagccgauaauaugauuaccgagaugcugcagaaggaguauauggaacggcaggggaaaaccccgcucggacugguugaccuguucguguuuuccaccagcuucuaccuuaucucuaucuuucuccaccuggugaagauucccacacaucgccacgucgugggcaaaccuugccccaagccucauagacugaaccacaugggcaucuguagcugcggguucuauaagcagcccggaguuccggugcgguggaaacgcugaggacuagucccuguucccagagcccacuuuuuuuucuuuuuuugaaauaaaauagccugucuuucagaucucaaaggcucuuuucagagccaccaaaaaaaaaaaaaaaaaaaaaaaaaaaaaaaaaaaaaaaaaaaaaaaaaaaaaaaaaaaaaaaaagaauu

SEQ ID NO: 33796 - RNA, 1736 nt, Artificial Sequence
  mRNA product Design a-2 (hSL-A64-N5) comprising derived and/or modified sequence from LASV(Z0947-SLE-2011;Clade IV)__AIT17840__GPCmut8 (opt5)
aggagaguccgcucagccagguugcagaagcggcuuagcguguguccuaaucuucucucugcguguagguaggccugugccgcaaacaagcuuaccaugggccagaucgugaccuucuuucaagaggucccccacguuauugaagaggugaugaacaucgugcugauugcccucagcauccuggcuguccuuaaggggcuguacaauuucgccacaugcggacucgugggccugguuacguuucuucugcucugugggagauccugcaccauuucucuguauaaaggaguguacgaacugcagacacucgagcugaacauggaaacccuuaauauguguaugccucugagcugcacaaagaacaauucccaucacuauaucauggucggcaacgagaccgggcucgagcugacacuuaccaauacgucuaucauuaaccauaaauucuguaaucugagcgacgcgcacaagaaaaaccucuacgaucaugcucugauguccaucauuucuaccuuucaccugagcaucccgaauuucaaccaguaugaagccauguccugcgacuuuaauggaggcaagauuagcgugcaguacaaccucucucacuccuaugccggcgaugcugccaaucauugugggacaguugcuaacggagugcugcaaaccuucaugcggauggccuggggcgggagcuacaucgcgcuugacucuggacgcgauagaugggacugcauuaugacauccuaccaguaucugaucauccagaacaccacgugggaggaucacugucaguuuagccggcccucuccuauuggcuaccucgggcugcuuucccaacgcacaagagacaucuauauuagccggcgccugcucggaaccuucacauggacccuguccgauucugaaggcaaggacacccccggcggguacugccugacaagauggaugcucaucgaggccgagcugaaauguuuuggaaauacggcugucgccaagugcaacgaaaaacaugaugaggaguucugcgacaugcuucggcuguuugauuucuguaagcaggcuauucagcgccucaaagccccugcgcagaugagcauccaacugaucaauaaggccgugaacgcucuuauuaaugaccagcugaucaugaagaaccaccucagagacauuaugggcauccccuauugcaauuacuccaaauauuguuaccugaaccacaccacaaccgggaagacaagccugccuaaaugcugucucgugucuaauggauccuaccugaacgaaacccauuucagcgaugacauugaacagcaagccgauaauaugaucacggagaugcuucagaaggaguauauggaacggcagggcaaaacaccgcuggggcucgucgaccuguuuguuuucucuaccagcuuuuaccugaucuccauuuuccuucaccucgugaagauccccacccaucgccacauugugggaaaaccuugccccaagccucauagacugaaccacaugggcaucuguucuugcggccuguauaagcagcccggggucccggugaaauggaagcggugaggacuagucccuguucccagagcccacuuuuuuuucuuuuuuugaaauaaaauagccugucuuucagaucucaaaggcucuuuucagagccaccaaaaaaaaaaaaaaaaaaaaaaaaaaaaaaaaaaaaaaaaaaaaaaaaaaaaaaaaaaaaaaaaagaauu

SEQ ID NO: 33797 - RNA, 1767 nt, Artificial Sequence
  mRNA product Design a-2 (hSL-A100) comprising derived and/or modified sequence from LASV(Josiah;Clade IV)__NP_694870__GPCmut8 (opt1)
aggagaguccgcucagccagguugcagaagcggcuuagcguguguccuaaucuucucucugcguguagguaggccugugccgcaaacaagcuuaccaugggccagaucgugaccuucuuccaggaggucccccacgugaucgaggaggugaugaacaucguccugaucgcccucagcgugcuggccgugcugaaggggcucuacaacuucgcgaccugcggccuggucgggcuggugacguuccuccugcugugcggccgcuccugcaccaccagccucuacaaggggguguacgagcugcagacccuggagcucaacauggagacgcugaacaugugcaugccgcuguccugcaccaagaacaacagccaccacuacaucauggucggcaacgagaccggccucgagcugacgcugaccaacaccuccaucaucaaccacaaguucugcaaccucagcgacgcccacaagaagaaccuguacgaccacgcccugauguccaucaucagcaccuuccaccucuccauccccaacuucaaccaguacgaggccaugagcugcgacuucaacgggggcaagaucuccgugcaguacaaccugagccacuccuacgccggggacgcggccaaccacugcggcacgguggccaacgggguccugcagaccuucaugcggauggccuggggcggcagcuacaucgcgcucgacuccgggcgcggcaacugggacugcaucaugaccagcuaccaguaccugaucauccagaacaccacgugggaggaccacugccaguucucccggcccagccccaucggguaccugggccuccugucccagcgcacccgggacaucuacaucagccgccggcugcucggcaccuucaccuggacgcugagcgacuccgaggggaaggacaccccgggcggguacugccugacccgcuggaugcucaucgaggccgagcugaagugcuucggcaacaccgccguggccaagugcaacgagaagcacgacgaggaguucugcgacaugcugcggcuguucgacuucugcaagcaggccauccagcgccugaaggcgcccgcccagaugagcauccagcugaucaacaaggccgugaacgcccucaucaacgaccagcugaucaugaagaaccaccuccgggacaucauggggauccccuacugcaacuacuccaaguacugcuaccucaaccacacgaccaccggccgcaccagccugcccaagugcugccuggucuccaacggcagcuaccucaacgagacgcacuucuccgacgacaucgagcagcaggccgacaacaugaucaccgagaugcugcagaaggaguacauggagcggcaggggaagacgccccugggccucguggaccuguucguguucagcaccuccuucuaccugaucagcaucuuccugcaccucgucaagaucccgacccaccgccacaucguggggaaguccugccccaagccccaccggcugaaccacaugggcaucugcagcugcgggcuguacaagcagcccggcgugccggucaaguggaagcgcugaggacuagucccuguucccagagcccacuuuuuuuucuuuuuuugaaauaaaauagccugucuuucagaucucaaaggcucuuuucagagccaccaaaaaaaaaaaaaaaaaaaaaaaaaaaaaaaaaaaaaaaaaaaaaaaaaaaaaaaaaaaaaaaaaaaaaaaaaaaaaaaaaaaaaaaaaaaaaaaaaaaaa

SEQ ID NO: 33798 - RNA, 1764 nt, Artificial Sequence
  mRNA product Design a-2 (hSL-A100) comprising derived and/or modified sequence from LASV(LP;Clade I)__AAF86701__GPCmut8 (opt1)
aggagaguccgcucagccagguugcagaagcggcuuagcguguguccuaaucuucucucugcguguagguaggccugugccgcaaacaagcuuaccaugggccagaucaucaccuucuuccaggaggugccccacgucaucgaggaggugaugaacaucgugcugaucgcccucagccugcuggccauccucaaggggcuguacaacaucgcgaccugcggcaucaucgggcuggucgccuuccucuuccugugcggcaaguccugcagccugacgcucaagggcggguacgagcugcagacccuggagcucaacauggagacccugaacaugugcaugccgcuguccugcacgaagaacagcucccaccacuacauccgcgugggcaacgagaccgggcucgagcugacccugaccaacacgagcaucaucaaccacaaguucugcaaccucuccgacgcccacaagaagaaccuguacgaccacgcccugaugagcaucaucuccaccuuccaccucagcauccccaacuucaaccaguacgaggccauguccugcgacuucaacggcgggaagaucagcgugcaguacaaccugucccacagcuacgcgggcgacgccgccgagcacugcgggaccgucgccaacggcgugcugcagaccuucaugcggauggcguggggcgggcgcuacaucgcccucgacuccggcaaggggaacugggacugcaucaugacgagcuaccaguaccugaucauccagaacaccaccugggaggaccacugccaguucucccggcccagccccaucggcuaccugggccuccugucccagcgcacccgggacaucuacaucagccgccggcugcucgggacguucaccuggacccugagcgacuccgagggcaacgagacccccgggggcuacugccugacgcgcuggaugcucaucgaggccgagcugaagugcuucgggaacaccgccguggccaagugcaacgagaagcacgacgaggaguucugcgacaugcugcggcuguucgacuucugcaagcaggcgauccgccggcugaaggcccccgcccagaugagcauccagcugaucaacaaggccgucaacgcccucaucaacgaccagcugaucaugaagaaccaccuccgcgacaucaugggcauccccuacugcaacuacuccaaguacugcuaccucaaccacaccagcuccggccggaccagccugcccaagugcugccugaucuccaacgggagcuaccucaacgagacgcaguucuccgacgacaucgagcagcaggcggacaacaugaucaccgagaugcugcagaaggaguacaucgagcgccagggcaagaccccgcuggggcucguggacaucuucaucuucagcaccuccuucuaccugaucagcaucuuccugcaccugaucaagaucccgacgcaccggcacaucgugggcaagcccugccccaagccccaccgccucaaccacaugggggucugcuccugcggccuguacaagcacccgggcgugcccaccaaguggaagcggugaggacuagucccuguucccagagcccacuuuuuuuucuuuuuuugaaauaaaauagccugucuuucagaucucaaaggcucuuuucagagccaccaaaaaaaaaaaaaaaaaaaaaaaaaaaaaaaaaaaaaaaaaaaaaaaaaaaaaaaaaaaaaaaaaaaaaaaaaaaaaaaaaaaaaaaaaaaaaaaaaaaaa

SEQ ID NO: 33799 - RNA, 1764 nt, Artificial Sequence
  mRNA product Design a-2 (hSL-A100) comprising derived and/or modified sequence from LASV(803213;Clade II)__AAF86703__GPCmut8 (opt1)
aggagaguccgcucagccagguugcagaagcggcuuagcguguguccuaaucuucucucugcguguagguaggccugugccgcaaacaagcuuaccaugggccagaucaucaccuucuuccaggaggugccccacgucaucgaggaggugaugaacaucgugcugaucgcccucagccugcuggccauccucaaggggaucuacaacgucgcgaccugcggccuguucgggcugaucuccuuccuccugcugugcggccgcagcugcuccgugacguacaaggggguguacgagcuccagacccuggagcugaacauggccaaccucaacaugugcaugccgcugagcugcaccaagaacaacucccaccacuacaucauggucggcaacgagacgggccuggagcucacccugaccaacaccagcaucaucaaccacaaguucugcaaccuguccgacgcccacaagaagaaccucuacgaccacgcccugaugagcaucaucuccacguuccaccugagcauccccaacuucaaccaguacgaggccauguccugcgacuucaacgggggcaagaucagcgugcaguacaaccucucccacagcuucgcgguggacgccgccaaccacugcgggaccaucgccaacggcguccugcagaccuucaugcggauggcguggggcggguccuacaucgcccuggacagcggcaaggggaacugggacugcaucaugaccuccuaccaguaccucaucauccagaacacgaccugggaggaccacugccaguucagccgccccucccccaucggcuaccuggggcugcucagccagcggacccgcgacaucuacaucagccggcgccugcugggcaccuucacguggacccucuccgacagcgagggcaacgaggcccccgggggcuacugccugacccgguggaugcugaucgaggccgagcucaagugcuucgggaacaccgccguggcgaagugcaacgagaagcacgacgaggaguucugcgacaugcugcgccuguucgacuucugcaagcaggccaucaagcggcucaagacgcccgcccagauguccauccagcugaucaacaaggccgugaacgcccugaucaacgaccagcucaucaugaagaaccaccuccgcgacaucaugggcauccccuacugcaacuacagccgguacugcuaccugaaccacaccgucaccgggaagaccucccugccccgcugcugccuggugagcaacggcuccuaccugaacgagacgcacuucagcgacgacaucgagcagcaggcggacaacaugaucaccgagaugcuccagaaggaguacauggaccggcagggcaagaccccgcuggggcugguggaccucuucgucuucuccaccagcuucuaccugaucuccaucuuccugcaccuggugaagaucccgacgcaccgccacaucgugggcaagcccugccccaagccccaccggcucaaccacauggggaucugcagcugcggccuguacaagcacccggggguccccgugaaguggaagcgcugaggacuagucccuguucccagagcccacuuuuuuuucuuuuuuugaaauaaaauagccugucuuucagaucucaaaggcucuuuucagagccaccaaaaaaaaaaaaaaaaaaaaaaaaaaaaaaaaaaaaaaaaaaaaaaaaaaaaaaaaaaaaaaaaaaaaaaaaaaaaaaaaaaaaaaaaaaaaaaaaaaaaa

SEQ ID NO: 33800 - RNA, 1764 nt, Artificial Sequence
  mRNA product Design a-2 (hSL-A100) comprising derived and/or modified sequence from LASV(GA391;Clade III)__CAA36645__GPCmut8 (opt1)
aggagaguccgcucagccagguugcagaagcggcuuagcguguguccuaaucuucucucugcguguagguaggccugugccgcaaacaagcuuaccaugggccagaucgugaccuucuuccaggaggucccccacgugaucgaggaggugaugaacaucguccugaucgcccucagcauccuggccauccugaaggggcucuacaacguggcgaccugcggccugaucgggcuggugacguuccuccugcuguccggccgcagcugcucccucaucuacaaggggaccuacgagcugcagacccuggagcucaacauggagacccugaacaugugcaugccgcugagcugcaccaagaacaacucccaccacuacauccgggucggcaacgagaccggccucgagcugacccugacgaacaccagcauccucaaccacaaguucugcaaccuguccgacgcccacaagcgcaaccuguacgaccacagccucauguccaucaucagcaccuuccaccuguccauccccaacuucaaccaguacgaggccaugagcugcgacuucaacgggggcaagaucaccgugcaguacaaccugucccacagcuucgccguggacgccgcggggcacugcggcacgcucgccaacgggguccugcagaccuucaugcggauggccuggggcggcuccuacaucgcccuggacagcgggcgcggcaacugggacugcaucaugaccuccuaccaguaccucaucauccagaacaccacgugggacgaccacugccaguucagccggcccucccccaucggguaccugggccugcucagccagcgcacccgggacaucuacaucagccgccggcugcugggcaccuucaccuggacgcucuccgacagcgaggggaacgagaccccgggcggguacugccugacccgcuggaugcugaucgaggcggagcucaagugcuucggcaacaccgccguggccaagugcaacgagaagcacgacgaggaguucugcgacaugcugcggcuguucgacuucugcaagcaggccauccgccggcucaagacgcccgcccagauguccauccagcugaucaacaaggcggugaacgcccugaucaacgaccagcucaucaugaagaaccaccuccgcgacaucauggggauccccuacugcaacuacagccgguacugcuaccugaaccacaccuccaccggcaagaccagccugccccgcugcugccugaucuccaacggcagcuaccugaacgagacgaaguucuccgacgacaucgagcagcaggccgacaacaugaucaccgagaugcuccagaaggaguacaucgaccggcaggggaagacgccccugggccuggucgaccuguucguguucagcaccuccuucuaccucaucagcaucuuccugcaccuggugaagaucccgacccaccgccacaucgucgggaagcccugccccaagccccaccggcucaaccacaugggcaucugcuccugcgggcuguacaagcagccgggcgugcccgugcgcuggaagcggugaggacuagucccuguucccagagcccacuuuuuuuucuuuuuuugaaauaaaauagccugucuuucagaucucaaaggcucuuuucagagccaccaaaaaaaaaaaaaaaaaaaaaaaaaaaaaaaaaaaaaaaaaaaaaaaaaaaaaaaaaaaaaaaaaaaaaaaaaaaaaaaaaaaaaaaaaaaaaaaaaaaaa

SEQ ID NO: 33801 - RNA, 1767 nt, Artificial Sequence
  mRNA product Design a-2 (hSL-A100) comprising derived and/or modified sequence from LASV(AV;Clade V)__CCA30314__GPCmut8 (opt1)
aggagaguccgcucagccagguugcagaagcggcuuagcguguguccuaaucuucucucugcguguagguaggccugugccgcaaacaagcuuaccaugggccagaucgugaccuucuuccaggaggucccccacgugaucgaggaggugaugaacaucguccugaucgcccucagcauccuggccgugcugaaggggcucuacaacaucgcgaccugcggccugaucgggcugaucacguuccuccugcugugcggccgcuccugcagcuccaaccucuacaaggggguguacgagcugcagagccuggaccucaacauggagacccugaacaugugcaugccgcuguccugcaccaagaacaacagccaccacuacauccgggucggcaacgacacgggccucgagcugacccugaccaacaccuccauccucaaccacaaguucugcaaccugagcgacgcccacaagaaggaccuguacgaccacgcccucauguccaucaucagcacguuccaccuguccauccccaacuucaaccaguacgaggccaugagcugcgacuucaacgggggcaagaucuccgugcaguacaaccugagccacuccuacgccaucgacgcggccaaccacugcgggaccguggccaacggcauccuccagaccuucaugcgcauggccuggggcgggagcuacaucgcgcuggacuccggccgggggaacugggacugcaucaugaccagcuaccaguaccugaucauccagaacacgaccugggagaaccacugccaguucucccgccccagccccaucggcuaccucgggcugcugagccagcggacccgcgacaucuacaucucccggcgccuccugggcaccuucacguggacccugagcgacuccgagggcaacgccacccccgggggcuacugccucacccgguggaugcugaucgaggccgagcugaagugcuucgggaacacggccgucgccaagugcaacgagaagcacgacgaggaguucugcgacaugcuccgccuguucgacuucugcaagcaggcgaucagccggcugaagucccccgcccagaugagcauccagcucaucaacaaggccgugaacgcccugaucaacgaccagcugaucaugaagaaccaccuccgcgacaucaugggcauccccuacugcaacuacuccaaguacugcuaccugaaccacaccaucaccgggaagaccagccugcccaagugcugccucguguccaacggcagcuaccugaacgagacgcacuucuccgacgacaucgagcagcaggccgacaacaugaucaccgagaugcugcagaaggaguacauggagcggcagggcaagaccccgcucgggcuggucgaccuguucguguucagcaccuccuucuaccugaucagcaucuuccuccgccuggugaagaucccgacgcaccggcacaucgucggcaagcccugccccaagccccaccgccugaaccacauggggaucugcuccugcggccucuacaagcagccgggggugcccgugcgguggaagcgcugaggacuagucccuguucccagagcccacuuuuuuuucuuuuuuugaaauaaaauagccugucuuucagaucucaaaggcucuuuucagagccaccaaaaaaaaaaaaaaaaaaaaaaaaaaaaaaaaaaaaaaaaaaaaaaaaaaaaaaaaaaaaaaaaaaaaaaaaaaaaaaaaaaaaaaaaaaaaaaaaaaaaa

SEQ ID NO: 33802 - RNA, 1764 nt, Artificial Sequence
  mRNA product Design a-2 (hSL-A100) comprising derived and/or modified sequence from LASV(Togo/2016/7082;Clade VI)__AMR44577__GPCmut8 (opt1)
aggagaguccgcucagccagguugcagaagcggcuuagcguguguccuaaucuucucucugcguguagguaggccugugccgcaaacaagcuuaccaugggccagaucaucaccuucuuccaggaggugccccacgucaucgaggaggugaugaacaucgugcugaucgcccucagccugcuggccauccucaagggggucuacaacguggcgaccugcggcaucaucgggcuggugacguuccuguuccucugcggccgcuccugcagccugaucuacaagggguccuacgagcugcagacccucgagcugaacauggagacccugaacaugugcaugccgcucagcugcacgaagaacuccagccaccacuacauccgggucggcaacgagaccggccuggagcugacccucaccaacacguccaucaucaaccacaaguucugcaaccugagcgacgcccacaagcgcaaccuguacgaccacgcccucauguccauccugagcaccuuccaccuguccauccccaacuucaaccaguacgaggccaugagcugcgacuucaacgggggcaagaucuccgugcaguacaaccucagccacgccuacgcgguggacgccgccgagcacugcgggaccgucgccaacggcgugcugcagaccuucaugcggauggcguggggcggguccuacaucgcccuggacagcggccgcgggaacugggacugcaucaugacguccuaccaguaccucaucauccagaacaccaccugggaggaccacugccaguucagccggcccucccccaucggcuaccuggggcugcucagccagcgcacccgggacaucuacaucagccgccggcugcugggcacguucaccuggacccucuccgacagcgagggcaacgagacccccgggggcuacugccugacgcgcuggaugcugaucgaggccgagcucaagugcuucgggaacaccgccguggccaagugcaacgagaagcacgacgaggaguucugcgacaugcugcggcuguucgacuucugcaagcaggcgauccagcgccucaagucccccgcccagaugagcauccagcugaucaacaaggccgucaacgcccugaucaacgaccagcucaucaugaagaaccaccuccgggacaugaugggcauccccuacugcaacuacuccaaguacugcuaccugaaccacaccagcuccgggcgcaccagccugcccaagugcugccugguguccaacggcagcuaccugaacgagacgcacuucuccgacgacaucgagcagcaggccgacaacaugaucaccgagaugcuccagaaggaguacaucgaccggcagggcaagaccccgcuggggcugguggaccucuucgucuucagcaccuccuucuaccugaucagcaucuuccugcaccugaucaagaucccgacgcaccgccacaucgugggcaagcccugccccaagccccaccggcucaaccacauggggaucugcuccugcggccuguacaagcagccgggggugcccacccgcuggaagcggugaggacuagucccuguucccagagcccacuuuuuuuucuuuuuuugaaauaaaauagccugucuuucagaucucaaaggcucuuuucagagccaccaaaaaaaaaaaaaaaaaaaaaaaaaaaaaaaaaaaaaaaaaaaaaaaaaaaaaaaaaaaaaaaaaaaaaaaaaaaaaaaaaaaaaaaaaaaaaaaaaaaaa

SEQ ID NO: 33803 - RNA, 1764 nt, Artificial Sequence
  mRNA product Design a-2 (hSL-A100) comprising derived and/or modified sequence from LASV(KAK-428;Clade n.d. (VII))__ANH09740__GPCmut8 (opt1)
aggagaguccgcucagccagguugcagaagcggcuuagcguguguccuaaucuucucucugcguguagguaggccugugccgcaaacaagcuuaccaugggccagaucgugaccuucuuccaggaggucccccacgugaucgaggaggugaugaacaucguccugaucgcccucagccugcuggccauccucaaggggcuguacaacuucgcgaccugcggcgugaucgggcugaucacguuccuccugcugugcggccgcuccugcagcgccaccuacaaggggcaguacgagcuccagacccuggagcugaacauggagucccucaacaugugcaugccgcugagcugcacgaagaacaacucccaccacuacauccgggccggcaacaacaccggccuggagcucacccugaccaacacgagcaucaucucccacaaguucugcaaccugagcgacgcccacaagaagaaccucuacgaccacacccugauguccaucaucaccaccuuccaccugagcauccccaacuucaaccaguacgaggccauguccugcgacuucaacgggggcaagaucagcauccaguacaaccucucccacagcuacgcgggggacgccgcccagcacugcggcacgguggccaacgggguccugcagaccuucaugcgcauggcguggggcggcuccuaccuggcccucgacagcgggcggcgcggcugggacugcaucaucuccagcuaccaguaccugaucauccagaacaccaccugggacgaccacugccaguucucccggcccagccccaucggguaccugggcuucgugagccagaagacgcgcgacaucuacaucucccggcgccuccugggcaccuucaccuggacccugagcgacuccgaggggcacgacaugccgggcggguacugccucacgcgguggaugcugaucgaggccgaccugaagugcuucggcaacaccgccguggccaagugcaacgagaagcacgacgaggaguucugcgacauguggcgccucuucgacuucugcaagcaggcgauccagcggcugaaggcccccgcccagaugaacauccagcugaucaacaaggccgucaacgcccucaucaacgaccagcugaugaugaagaaccaccuccgcgacaucauggggauccccuacugcaacuacagcaaguucugcuaccugaacaacaccaccacgggccggaccucccugccccgcugcugccugaucagcaacggcuccuaccucaacgagacccacuucagcgacgacaucgagcagcaggcggacaacaugaucaccgagaugcugcagaaggaguacauggaccggcaggggaagacgccccugggccucguggaccuguucguguucuccaccagcuucuaccugaucaccaucuuccuccaccuggucaagaucccgacccaccgccacaucguggggaagcccugccccaagccccaccggcugaaccacaugggcaucugcuccugcgggcuguacaagcagccgggcgugcccguccgcuggaagcggugaggacuagucccuguucccagagcccacuuuuuuuucuuuuuuugaaauaaaauagccugucuuucagaucucaaaggcucuuuucagagccaccaaaaaaaaaaaaaaaaaaaaaaaaaaaaaaaaaaaaaaaaaaaaaaaaaaaaaaaaaaaaaaaaaaaaaaaaaaaaaaaaaaaaaaaaaaaaaaaaaaaaa

SEQ ID NO: 33804 - RNA, 1764 nt, Artificial Sequence; identical to SEQ ID NO: 33798
  mRNA product Design a-2 (hSL-A100) comprising derived and/or modified sequence from LASV(Pinneo-NIG-1969;Clade I)__AIT17836__GPCmut8 (opt1)

SEQ ID NO: 33805 - RNA, 1764 nt, Artificial Sequence
  mRNA product Design a-2 (hSL-A100) comprising derived and/or modified sequence from LASV(ISTH0009-NIG-2011;Clade II)__AIT17404__GPCmut8 (opt1)
aggagaguccgcucagccagguugcagaagcggcuuagcguguguccuaaucuucucucugcguguagguaggccugugccgcaaacaagcuuaccaugggccagaucaucaccuucuuccaggaggugccccacgucaucgaggaggugaugaacaucgugcugaucgcccucagccugcuggccauccucaaggggaucuacaacgucgcgaccugcggccuguucgggcugguguccuuccuccugcugugcggccgcagcugcuccacgaccuacaaggggguguacgagcuccagacccuggagcuggacauggccagccucaacaugugcaugccgcuguccugcacgaagaacaacagccaccacuacaucauggucggcaacgagaccggccuggagcucacccugaccaacacguccaucaucaaccacaaguucugcaaccugagcgacgcccacaagaagaaccucuacgaccacgcccugauguccaucaucagcaccuuccaccuguccauccccaacuucaaccaguacgaggccaugagcugcgacuucaacgggggcaagaucuccgugcaguacaaccucagccacgcguacgccguggacgccgccaaccacugcgggaccaucgcgaacggcguccugcagaccuucaugcggauggccuggggcggguccuacaucgcccuggacagcggcaagggguccugggacugcaucaugacgagcuaccaguaccucaucauccagaacaccaccugggaggaccacugccaguucucccgccccagccccaucggcuaccuggggcugcucagccagcggacccgcgacaucuacaucucccggcgccugcugggcacguucaccuggacccucagcgacuccgagggcaacgagacccccgggggcuacugccugacgcgguggaugcugaucgaggccgagcucaagugcuucgggaacaccgccguggcgaagugcaacgagaagcacgacgaggaguucugcgacaugcugcgccuguucgacuucugcaagcaggccauccggcgccucaagacccccgcccagaugagcauccagcugaucaacaaggccgugaacgcccugaucaacgaccagcucaucaugaagaaccaccuccgggacaucaugggcaucccguacugcaacuacuccaaguacugcuaccugaaccacaccgucacggggaagaccagccugccccgcugcugccugguguccaacggcagcuaccugaacgagacccacuucuccgacgacaucgagcagcaggcggacaacaugaucaccgagcuccugcagaaggaguacauggaccggcagggcaagacgccccuggggcucguggaccuguucgucuucagcaccuccuucuaccugaucagcaucuuccugcaccucaucaagaucccgacccaccgccacaucaccggcaagcccugccccaagccccaccggcugaaccacauggggaucugcuccugcggccuguacaagcacccgggggugcccgugaaguggaagcgcugaggacuagucccuguucccagagcccacuuuuuuuucuuuuuuugaaauaaaauagccugucuuucagaucucaaaggcucuuuucagagccaccaaaaaaaaaaaaaaaaaaaaaaaaaaaaaaaaaaaaaaaaaaaaaaaaaaaaaaaaaaaaaaaaaaaaaaaaaaaaaaaaaaaaaaaaaaaaaaaaaaaaa

SEQ ID NO: 33806 - RNA, 1764 nt, Artificial Sequence
  mRNA product Design a-2 (hSL-A100) comprising derived and/or modified sequence from LASV(ISTH2010-NIG-2012;Clade II)__AIT17482__GPCmut8 (opt1)
aggagaguccgcucagccagguugcagaagcggcuuagcguguguccuaaucuucucucugcguguagguaggccugugccgcaaacaagcuuaccaugggccagaucaucaccuucuuccaggaggugccccacgucaucgaggaggugaugaacaucgugcugaucgcccucagccugcuggccauccucaaggggaucuacaacgucgcgaccugcggccuguucgggcugguguccuuccuccugcugugcggccgcagcugcuccacgaccuacaaggggguguacgagcuccagacccuggagcuggacauggccagccucaacaugugcaugccgcuguccugcacgaagaacaacagccaccacuacaucauggucggcaacgagaccggccuggagcucacccugaccaacacguccaucaucaaccacaaguucugcaaccugagcgacgcccacaagaagaaccucuacgaccacgcccugauguccaucaucagcaccuuccaccuguccauccccaacuucaaccaguacgaggccaugagcugcgacuucaacgggggcaagaucuccgugcaguacaaccucagccacgcguacgccguggacgccgccaaccacugcgggaccaucgcgaacggcguccugcagaccuucaugcggauggccuggggcggguccuacaucgcccuggacagcggcaagggguccugggacugcaucaugacgagcuaccaguaccucaucauccagaacaucaccugggaggaccacugccaguucucccgccccagccccaucggcuaccuggggcugcucagccagcggacccgcgacaucuacaucucccggcgccugcugggcaccuucacguggacccucagcgacuccgagggcaacgagacccccgggggcuacugccugacccgguggaugcugaucgaggccgagcucaagugcuucgggaacacggccguggcgaagugcaacgagaagcacgacgaggaguucugcgacaugcugcgccuguucgacuucugcaagcaggccauccggcgccucaagacccccgcccagaugagcauccagcugaucaacaaggccgugaacgcccugaucaacgaccagcucaucaugaagaaccaccuccgggacaucaugggcauccccuacugcaacuacuccaaguacugcuaccugaaccacaccgucaccgggaagacgagccugccccgcugcugccugguguccaacggcagcuaccugaacgagacccacuucuccgacgacaucgagcagcaggcggacaacaugaucaccgagcuccugcagaaggaguacaucgaccggcagggcaagaccccgcuggggcucguggaccuguucgucuucagcacguccuucuaccugaucagcaucuuccugcaccucgugaagaucccgacccaccgccacguggucggcaagcccugccccaagccccaccggcugaaccacauggggaucugcuccugcggccuguacaagcacccgggggugcccgugaaguggaagcgcugaggacuagucccuguucccagagcccacuuuuuuuucuuuuuuugaaauaaaauagccugucuuucagaucucaaaggcucuuuucagagccaccaaaaaaaaaaaaaaaaaaaaaaaaaaaaaaaaaaaaaaaaaaaaaaaaaaaaaaaaaaaaaaaaaaaaaaaaaaaaaaaaaaaaaaaaaaaaaaaaaaaaa

SEQ ID NO: 33807 - RNA, 1764 nt, Artificial Sequence
  mRNA product Design a-2 (hSL-A100) comprising derived and/or modified sequence from LASV(Lassa virus/H.sapiens-wt/NGA/2015/ISTH_0543;Clade II)__AVO03639__GPCmut8 (opt1)
aggagaguccgcucagccagguugcagaagcggcuuagcguguguccuaaucuucucucugcguguagguaggccugugccgcaaacaagcuuaccaugggccagaucaucaccuucuuccaggaggugccccacgucaucgaggaggugaugaacaucgugcugaucgcccucagccugcuggccauccucaaggggaucuacaacgucgcgaccugcggccuguucgggcugguguccuuccuccugcugugcggccgcagcugcuccacgaccuacaaggggguguacgagcuccagacccuggagcuggacauggccaaccucaacaugugcaugccgcugagcugcacgaagaacaacucccaccacuacaucauggucggcaacgagaccggccuggagcucacccugaccaacacgagcaucaucaaccacaaguucugcaaccuguccgacgcccacaagaagaaccucuacgaccacgcccugaugagcaucaucuccaccuuccaccugagcauccccaacuucaaccaguacgaggccauguccugcgacuucaacgggggcaagaucagcgugcaguacaaccucucccacaccuacgcgguggacgccgccaaccacugcgggaccaucgccaacggcguccugcagacguucaugcggauggcguggggcgggagcuacaucgcccuggacuccggcaaggggagcugggacugcaucaugaccuccuaccaguaccucgugauccagaacaccaccugggaggaccacugccaguucagccgccccucccccaucggcuaccuggggcugcucagccagcggacgcgcgacaucuacaucagccggcgccugcugggcaccuucaccuggacccucuccgacagcgagggcaacgagacgcccgggggcuacugccugacccgguggaugcugaucgaggccgagcucaagugcuucgggaacaccgccguggccaagugcaacgagaagcacgacgaggaguucugcgacaugcugcgccuguucgacuucugcaagcaggcgauccggcgccucaagacccccgcccagauguccauccagcugaucaacaaggccgucaacgcccugaucaacgaccagcucaucaugaagaaccaccuccgggacaucaugggcauccccuacugcaacuacagcaaguacugcuaccugaaccacacggugaccgggaagaccucccugccccgcugcugccuggugagcaacggcuccuaccugaacgagacccacuucagcgacgacaucgagcagcaggccgacaacaugaucacggagcuccugcagaaggaguacaucgaccggcagggcaagaccccgcuggggcucgucgaccuguucguguucuccaccagcuucuaccugaucuccaucuuccugcaccucgugaagaucccgacccaccgccacaucacgggcaagcccugccccaagccccaccggcugaaccacauggggaucugcagcugcggccuguacaagcacccggggguccccgugaaguggaagcgcugaggacuagucccuguucccagagcccacuuuuuuuucuuuuuuugaaauaaaauagccugucuuucagaucucaaaggcucuuuucagagccaccaaaaaaaaaaaaaaaaaaaaaaaaaaaaaaaaaaaaaaaaaaaaaaaaaaaaaaaaaaaaaaaaaaaaaaaaaaaaaaaaaaaaaaaaaaaaaaaaaaaaa

SEQ ID NO: 33808 - RNA, 1764 nt, Artificial Sequence
  mRNA product Design a-2 (hSL-A100) comprising derived and/or modified sequence from LASV(Lassa virus/H.sapiens-wt/NGA/2016/ISTH_0009;Clade II)__AVO03571__GPCmut8 (opt1)
aggagaguccgcucagccagguugcagaagcggcuuagcguguguccuaaucuucucucugcguguagguaggccugugccgcaaacaagcuuaccaugggccagaucaucaccuucuuccaggaggugccccacgucaucgaggaggugaugaacaucgugcugaucgcccucagccugcuggccauccucaaggggaucuacaacgucgcgaccugcggccugcuggggcucguguccuuccugcugcucugcggccgcagcugcuccacgaccuacaaggggguguacgagcugcagacccuggagcucgacauggccagccugaacaugugcaugccgcuguccugcacgaagaacaacagccaccacuacaucauggucggcaacgagaccggccucgagcugacccugaccaacacguccaucaucaaccacaaguucugcaaccucagcgacgcccacaagaagaaccuguacgaccacgcccugauguccaucaucagcaccuuccaccucuccauccccaacuucaaccaguacgaggccaugagcugcgacuucaacgggggccggaucuccgugcaguacaaccugagccacuccuacgcgguggacgccgccaaccacugcgggaccaucgccaacggcguccugcagaccuucaugcgcauggcguggggcgggagcuacaucgcccucgacuccggcaaggggagcugggacugcaucaugacguccuaccaguaccugaucauccagaacaccaccugggaggaccacugccaguucagccggcccagccccaucggcuaccuggggcuccugucccagcgcacccgggacaucuacaucagccgccggcugcucggcacguucaccuggacccuguccgacagcgagggcaacgagacccccgggggcuacugccugacgcgcuggaugcucaucgaggccgagcugaagugcuucgggaacaccgccguggccaagugcaacgagaagcacgacgaggaguucugcgacaugcugcggcuguucgacuucugcaagcaggcgauccgccggcugaagacccccgcccagauguccauccagcugaucaacaaggccgugaacgcccucaucaacgaccagcugaucaugaagaaccaccuccgcgacaucaugggcaucccguacugcaacuacagcaaguacugcuaccucaaccacaccgucacggggaagaccucccugccccggugcugccuggugagcaacggcuccuaccucaacgagacccacuucagcgacgacaucgagcagcaggccgacaacaugaucaccgagcugcugcagaaggaguacaucgaccgccagggcaagacgccccucgggcugguggaccuguucgucuucuccaccagcuucuaccugaucuccaucuuccuccaccuggugaagaucccgacccaccggcacaucaccggcaagcccugccccaagccccaccgccugaaccacauggggaucugcagcugcggccucuacaaccacccgggggugcccgucaaguggaagcggugaggacuagucccuguucccagagcccacuuuuuuuucuuuuuuugaaauaaaauagccugucuuucagaucucaaaggcucuuuucagagccaccaaaaaaaaaaaaaaaaaaaaaaaaaaaaaaaaaaaaaaaaaaaaaaaaaaaaaaaaaaaaaaaaaaaaaaaaaaaaaaaaaaaaaaaaaaaaaaaaaaaaa

SEQ ID NO: 33809 - RNA, 1764 nt, Artificial Sequence
  mRNA product Design a-2 (hSL-A100) comprising derived and/or modified sequence from LASV(Lassa virus/H.sapiens-wt/NGA/2016/ISTH_0017;Clade II)__AVO03567__GPCmut8 (opt1)
aggagaguccgcucagccagguugcagaagcggcuuagcguguguccuaaucuucucucugcguguagguaggccugugccgcaaacaagcuuaccaugggccagaucaucaccuucuuccaggaggugccccacgucaucgaggaggugaugaacaucgugcugaucgcccucagccugcuggccauccucaaggggaucuacaacgucgcgaccugcggccuguucgggcugguguccuuccuccugcugugcggccgcagcugcuccacgaccuacaaggggguguacgagcuccagacccuggagcuggacauggccagccucaacaugugcaugccgcuguccugcacgaagaacaacagccaccacuacaucauggucggcaacgagaccggccuggagcucacccugaccaacacguccaucaucaaccacaaguucugcaaccugagcgacgcccacaagaagaaccucuacgaccacgcccugauguccaucaucagcaccuuccaccuguccauccccaacuucaaccaguacgaggccaugagcugcgacuucaacgggggcaagaucuccgugcaguacaaccucagccacaccuacgcgaucgacgccgccaaccacugcgggaccaucgccaacggcgugcugcagacguucaugcggauggcguggggcggguccuacaucgcccuggacagcggcaagggguccugggacugcaucaugaccagcuaccaguaccucaucauccagaacaccaccugggaggaccacugccaguucucccgccccagccccaucggcuaccuggggcugcucagccagcggacgcgcgacaucuacaucucccggcgccugcugggcaccuucaccuggacccucagcgacuccgagggcaacgagacgcccgggggcuacugccugacccgguggaugcugaucgaggccgagcucaagugcuucgggaacaccgccgucgccaagugcaacgagaagcacgacgaggaguucugcgacaugcugcgccuguucgacuucugcaagcaggcgauccggcgccucaagacccccgcccagaugagcauccagcugaucaacaaggccgugaacgcccugaucaacgaccagcucaucaugaagaaccaccuccgggacaucaugggcauccccuacugcaacuacuccaaguacugcuaccugaaccacacggugaccgggaagaccagccugccccgcugcugccuggucuccaacggcagcuaccugaacgagacccacuucuccgacgacaucgagcagcaggccgacaacaugaucacggagcuccugcagaaggaguacauggaccggcagggcaagaccccgcuggggcucguggaccuguucguguucagcaccuccuucuaccugaucagcaucuuccugcaccucguccgcaucccgacccaccggcacgugaucggcaagcccugccccaagccccaccgccugaaccacauggggaucugcuccugcggccuguacaagcacccgggggugcccgucaaguggaagcggugaggacuagucccuguucccagagcccacuuuuuuuucuuuuuuugaaauaaaauagccugucuuucagaucucaaaggcucuuuucagagccaccaaaaaaaaaaaaaaaaaaaaaaaaaaaaaaaaaaaaaaaaaaaaaaaaaaaaaaaaaaaaaaaaaaaaaaaaaaaaaaaaaaaaaaaaaaaaaaaaaaaaa

SEQ ID NO: 33810 - RNA, 1764 nt, Artificial Sequence
  mRNA product Design a-2 (hSL-A100) comprising derived and/or modified sequence from LASV(Lassa virus/H.sapiens-wt/NGA/2018/ISTH_0959;Clade II)__AVV65099__GPCmut8 (opt1)
aggagaguccgcucagccagguugcagaagcggcuuagcguguguccuaaucuucucucugcguguagguaggccugugccgcaaacaagcuuaccaugggccagaucaucaccuucuuccaggaggugccccacgucaucgaggaggugaugaacaucgugcugaucgcccucagccugcuggccauccucaaggggaucuacaacgucgugaccugcggccuguucgggcugguguccuuccuccugcugugcggccgcagcugcuccacgaccuacaagggggucuacgagcuccagacccuggagcuggacauggcgagccucaacaugugcaugccgcuguccugcacgaagaacaacagccaccacuacaucauggugggcaacgagaccggccuggagcucacccugaccaacacguccaucaucaaccacaaguucugcaaccugagcgacgcccacaagaagaaccucuacgaccacgcccugauguccaucaucagcaccuuccaccuguccauccccaacuucaaccaguacgaggccaugagcugcgacuucaacgggggcaagaucuccgugcaguacaaccucagccacgccuacgcgaucgacgccgccaaccacugcgggaccaucgccaacggcguccugcagaccuucaugcggauggcguggggcggguccuacaucgcccuggacagcggcaagggguccugggacugcaucaugacgagcuaccaguaccucaucauccagaacaccaccugggaggaccacugccaguucucccgccccagccccaucggcuaccuggggcugcucagccagcggacccgcgacaucuacaucucccggcgccugcugggcacguucaccuggacccucagcgacuccgagggcaacgagacccccgggggcuacugccugacgcgguggaugcugaucgaggccgagcucaagugcuucgggaacaccgccguggccaagugcaacgagaagcacgacgaggaguucugcgacaugcugcgccuguucgacuucugcaagcaggcgauccggcgccucaagacccccgcccagaugagcauccagcugaucaacaaggccgugaacgcccugaucaacgaccagcucaucaugaagaaccaccuccgggacaucaugggcaucccguacugcaacuacuccaaguacugcuaccugaaccacaccgucacggggaagaccagccugccccgcugcugccugguguccaacggcagcuaccugaacgagacccacuucuccgacgacaucgagcagcaggccgacaacaugaucaccgagcuccugcagaaggaguacaucgaccggcagggcaagacgccccuggggcucguggaccuguucgucuucagcaccuccuucuaccugaucagcaucuuccugcaccucgugaagaucccgacccaccgccacgugaucggcaagcccugccccaagccccaccggcugaaccacauggggaucugcuccugcggccuguacaagcacccggggguccccgugaaguggaagcgcugaggacuagucccuguucccagagcccacuuuuuuuucuuuuuuugaaauaaaauagccugucuuucagaucucaaaggcucuuuucagagccaccaaaaaaaaaaaaaaaaaaaaaaaaaaaaaaaaaaaaaaaaaaaaaaaaaaaaaaaaaaaaaaaaaaaaaaaaaaaaaaaaaaaaaaaaaaaaaaaaaaaaa

SEQ ID NO: 33811 - RNA, 1764 nt, Artificial Sequence
  mRNA product Design a-2 (hSL-A100) comprising derived and/or modified sequence from LASV(LASV003-NIG-2008;Clade II)__AIT17580__GPCmut8 (opt1)
aggagaguccgcucagccagguugcagaagcggcuuagcguguguccuaaucuucucucugcguguagguaggccugugccgcaaacaagcuuaccaugggccagaucaucaccuucuuccaggaggugccccacgucaucgaggaggugaugaacaucgugcugaucgcccucagccugcuggccauccucaaggggaucuacaacgucgcgaccugcggccuguucgggcugguguccuuccuccugcugugcggccgcagcugcuccacgaccuacaaggggguguacgagcuccagacccuggagcuggacauggccagccucaacaugugcaugccgcuguccugcacgaagaacaacagccaccacuacaucauggucggcaacgagaccggccuggagcucacccugaccaacacguccaucaucaaccacaaguucugcaaccugagcgacgcccacaagaagaaccucuacgaccacgcccugauguccaucaucagcaccuuccaccuguccauccccaacuucaaccaguacgaggccaugagcugcgacuucaacgggggcaagaucuccgugcaguacaaccucagccacaccuacgcgguggacgccgccaaccacugcgggaccaucgccaacggcguccugcagacguucaugcggauggcguggggcggguccuacaucgcccuggacagcggcaagggguccugggacugcaucaugaccagcuaccaguaccucaucauccagaacaccaccugggaggaccacugccaguucucccgccccagccccaucggcuaccuggggcugcucagccagcggacgcgcgacaucuacaucucccggcgccugcugggcaccuucaccuggacccucagcgacuccgagagcaacgagacgccgggcggguacugccugacccgguggaugcugaucgaggccgagcucaagugcuucggcaacaccgccguggccaagugcaacgagaagcacgacgaggaguucugcgacaugcugcgccuguucgacuucugcaagcaggcgauccggcgccucaaggcccccgcccagauguccauccagcugaucaacaaggccgugaacgcccugaucaacgaccagcucaucaugaagaaccaccuccgggacaucauggggauccccuacugcaacuacagcaaguacugcuaccugaaccacaccgucacgggccgcaccucccugccccggugcugccuggugagcaacggguccuaccugaacgagacccacuucagcgacgacaucgagcagcaggcggacaacaugaucaccgagcuccugcagaaggaguacauggaccgccagggcaagacgccccugggccucguggaccuguucgucuucuccaccagcuucuaccugaucuccaucuuccugcaccucgugaagaucccgacccaccggcacgugaucgggaagcccugccccaagccccaccgccugaaccacaugggcaucugcagcugcgggcuguacaagcacccgggcguccccgugaaguggaagcggugaggacuagucccuguucccagagcccacuuuuuuuucuuuuuuugaaauaaaauagccugucuuucagaucucaaaggcucuuuucagagccaccaaaaaaaaaaaaaaaaaaaaaaaaaaaaaaaaaaaaaaaaaaaaaaaaaaaaaaaaaaaaaaaaaaaaaaaaaaaaaaaaaaaaaaaaaaaaaaaaaaaaa

SEQ ID NO: 33812 - RNA, 1764 nt, Artificial Sequence
  mRNA product Design a-2 (hSL-A100) comprising derived and/or modified sequence from LASV(LASV035-NIG-2009;Clade II)__AIT17588__GPCmut8 (opt1)
aggagaguccgcucagccagguugcagaagcggcuuagcguguguccuaaucuucucucugcguguagguaggccugugccgcaaacaagcuuaccaugggccagaucaucaccuucuuccaggaggugccccacgucaucgaggaggugaugaacaucgugcugaucgcccucagccugcuggccauccucaaggggaucuacaacgucgcgaccugcggccuguucgggcugguguccuuccuccugcugugcggccgcagcugcuccacgaccuacaaggggguguacgagcuccagacccuggagcuggacauggccagccucaacaugugcaugccgcuguccugcacgaagaacaacagccaccacuacaucauggucggcaacgagaccggccuggagcucacccugaccaacacguccaucaucaaccacaaguucugcaaccugagcgacgcccacaagaagaaccucuacgaccacgcccugauguccaucaucagcaccuuccaccuguccauccccaacuucaaccaguacgaggccaugagcugcgacuucaacgggggcaagaucuccgugcaguacaaccucagccacgcguacgccguggacgccgccaaccacugcgggaccaucgcgaacggcguccugcagaccuucaugcggauggccuggggcggguccuacaucgcccuggacagcggcaagggguccugggacugcaucaugacgagcuaccaguaccucaucauccagaacaccaccugggaggaccacugccaguucucccgccccagccccaucggcuaccuggggcugcucagccagcggacccgcgacaucuacaucucccggcgccugcugggcacguucaccuggacccucagcgacuccgagggcaacgagacccccgggggcuacugccugacgcgguggaugcugaucgaggccgagcucaagugcuucgggaacaccgccguggcgaagugcaacgagaagcacgacgaggaguucugcgacaugcugcgccuguucgacuucugcaagcaggccauccggcgccucaaggcccccgcccagaugagcauccagcugaucaacaaggccgugaacgcgcugaucaacgaccagcucaucaugaagaaccaccuccgggacaucaugggcauccccuacugcaacuacuccaaguacugcuaccugaaccacaccgucaccgggaagacgagccugccccgcugcugccugguguccaacggcagcuaccugaacgagacccacuucuccgacgacaucgagcagcaggccgacaacaugaucaccgagcuccugcagaaggaguacaucgaccggcagggcaagaccccgcuggggcucguggaccuguucgucuucagcacguccuucuaccugaucagcaucuuccugcaccucgugaagaucccgacccaccgccacgugaucggcaagcccugccccaagccccaccggcugaaccacauggggaucugcuccugcggccuguacaagcacccggggguccccgugaaguggaagcgcugaggacuagucccuguucccagagcccacuuuuuuuucuuuuuuugaaauaaaauagccugucuuucagaucucaaaggcucuuuucagagccaccaaaaaaaaaaaaaaaaaaaaaaaaaaaaaaaaaaaaaaaaaaaaaaaaaaaaaaaaaaaaaaaaaaaaaaaaaaaaaaaaaaaaaaaaaaaaaaaaaaaaa

SEQ ID NO: 33813 - RNA, 1764 nt, Artificial Sequence
  mRNA product Design a-2 (hSL-A100) comprising derived and/or modified sequence from LASV(LASV1000-NIG-2009;Clade II)__AIT17782__GPCmut8 (opt1)
aggagaguccgcucagccagguugcagaagcggcuuagcguguguccuaaucuucucucugcguguagguaggccugugccgcaaacaagcuuaccaugggccagaucaucaccuucuuccaggaggugccccacgucaucgaggaggugaugaacaucgugcugaucgcccucagccugcuggccauccucaaggggaucuacaacgucgcgaccugcggccuguucgggcugguguccuuccuccugcugugcggccgcagcugcuccacgaccuacaaggggguguacgagcuccagacccuggagcuggacauggccagccucaacaugugcaugccgcuguccugcacgaagaacaacagccaccacuacaucauggucggcaacgagaccggccuggagcucacccugaccaacacguccaucaucaaccacaaguucugcaaccugagcgacgcccacaagaagaaccucuacgaccacgcccugauguccaucaucagcaccuuccaccuguccauccccaacuucaaccaguacgaggccaugagcugcgacuucaacgggggcaagaucuccgugcaguacaaccucagccacaccuacgcgguggacgccgccaaccacugcgggaccaucgccaacggcguccugcagacguucaugcggauggcguggggcggguccuacaucgcccuggacagcggcaagggguccugggacugcaucaugaccagcuaccaguaccucaucauccagaacaccaccugggaggaccacugccaguucucccgccccagccccaucggcuaccuggggcugcucagccagcggacgcgcgacaucuacaucucccggcgccugcugggcaccuucaccuggacccucagcgacuccgagggcaacgagacgcccgggggcuacugccugacccgguggaugcugaucgaggccgagcucaagugcuucgggaacaccgccguggccaagugcaacgagaagcacgacgaggaguucugcgacaugcugcgccuguucgacuucugcaagcaggcgaucaagcggcucaagacccccgcccagaugagcauccagcugaucaacaaggccgugaacgcccugaucaacgaccagcucaucaugaagaaccaccuccgcgacaucaugggcauccccuacugcaacuacuccaaguacugcuaccugaaccacacggucaccgggaagaccagccugccccggugcugccugguguccaacggcagcuaccugaacgagacccacuucuccgacgacaucgagcagcaggccgacaacaugaucacggagcuccugcagaaggaguacaucgaccgccagggcaagaccccgcuggggcucguggaccuguucgucuucagcaccuccuucuaccugaucagcaucuuccugcaccucgugaagaucccgacccaccggcacguggucggcaagcccugccccaagccccaccgccugaaccacauggggaucugcuccugcggccuguacaagcacccgggggugcccgugaaguggaagcggugaggacuagucccuguucccagagcccacuuuuuuuucuuuuuuugaaauaaaauagccugucuuucagaucucaaaggcucuuuucagagccaccaaaaaaaaaaaaaaaaaaaaaaaaaaaaaaaaaaaaaaaaaaaaaaaaaaaaaaaaaaaaaaaaaaaaaaaaaaaaaaaaaaaaaaaaaaaaaaaaaaaaa

SEQ ID NO: 33814 - RNA, 1764 nt, Artificial Sequence
  mRNA product Design a-2 (hSL-A100) comprising derived and/or modified sequence from LASV(LASV221-NIG-2010;Clade II)__AIT17624__GPCmut8 (opt1)
aggagaguccgcucagccagguugcagaagcggcuuagcguguguccuaaucuucucucugcguguagguaggccugugccgcaaacaagcuuaccaugggccagaucaucaccuucuuccaggaggugccccacgucaucgaggaggugaugaacaucgugcugaucgcccucagccugcuggccauccucaaggggaucuacaacgucgcgaccugcggccuguucgggcugguguccuuccuccugcugugcggccgcagcugcuccacgaccuacaaggggguguacgagcuccagacccuggagcuggacauggccagccucaacaugugcaugccgcuguccugcacgaagaacaacagccaccacuacaucauggucggcaacgagaccggccuggagcucacccugaccaacacguccaucaucaaccacaaguucugcaaccugagcgacgcccacaagaagaaccucuacgaccacgcccugauguccaucaucagcaccuuccaccuguccauccccaacuucaaccaguacgaggccaugagcugcgacuucaacgggggcaagaucuccgugcaguacaaccucagccacaccuacgcgaucgacgccgccaaccacugcgggaccaucgccaacggcgugcugcagacguucaugcggauggcguggggcggguccuacaucgcccuggacagcggcaagggguccugggacugcaucaugaccagcuaccaguaccucaucauccagaacaccaccugggaggaccacugccaguucucccgccccagccccaucggcuaccuggggcugcucagccagcggacgcgcgacaucuacaucucccggcgccugcugggcaccuucaccuggacccucagcgacuccgagggcaacgagacgcccgggggcuacugccugacccgguggaugcugaucgaggccgagcucaagugcuucgggaacaccgccgucgccaagugcaacgagaagcacgacgaggaguucugcgacaugcugcgccuguucgacuucugcaagcaggcgauccggcgccucaagacccccgcccagaugagcauccagcugaucaacaaggccgugaacgcccugaucaacgaccagcucaucaugaagaaccaccuccgggacaucaugggcauccccuacugcaacuacuccaaguacugcuaccugaaccacacggugaccgggaagaccagccugccccgcugcugccuggucuccaacggcagcuaccugaacgagacccacuucuccgacgacaucgagcagcaggccgacaacaugaucacggagaugcuccagaaggaguacauggaccggcagggcaagaccccgcuggggcugguggaccucuucguguucagcaccuccuucuaccugaucagcaucuuccugcaccuggucaagaucccgacccaccgccacgugaucggcaagcccugccccaagccccaccggcucaaccacauggggaucugcuccugcggccuguacaagcacccgggggugcccgucaaguggaagcgcugaggacuagucccuguucccagagcccacuuuuuuuucuuuuuuugaaauaaaauagccugucuuucagaucucaaaggcucuuuucagagccaccaaaaaaaaaaaaaaaaaaaaaaaaaaaaaaaaaaaaaaaaaaaaaaaaaaaaaaaaaaaaaaaaaaaaaaaaaaaaaaaaaaaaaaaaaaaaaaaaaaaaa

SEQ ID NO: 33815 - RNA, 1764 nt, Artificial Sequence
  mRNA product Design a-2 (hSL-A100) comprising derived and/or modified sequence from LASV(LASV237-NIG-2010;Clade II)__AIT17638__GPCmut8 (opt1)
aggagaguccgcucagccagguugcagaagcggcuuagcguguguccuaaucuucucucugcguguagguaggccugugccgcaaacaagcuuaccaugggccagaucaucaccuucuuccaggaggugccccacgucaucgaggaggugaugaacaucgugcugaucgcccucagccugcuggccauccucaaggggaucuacaacgucgcgaccugcggccuguucgggcugguguccuuccuccugcugugcggccgcagcugcuccacgaccuacaaggggguguacgagcuccagacccuggagcuggacauggccagccucaacaugugcaugccgcuguccugcacgaagaacaacagccaccacuacaucauggucggcaacgagaccggccuggagcucacccugaccaacacguccaucaucaaccacaaguucugcaaccugagcgacgcccacaagaaggaccucuacgaccacgcccugauguccaucaucagcaccuuccaccuguccauccccaacuucaaccaguacgaggccaugagcugcgacuucaacgggggcaagaucuccgugcaguacaaccucagccacaccuacgcgguggacgccgccaaccacugcgggaccaucgccaacggcguccugcagacguucaugcggauggcguggggcggguccuacaucgcccuggacagcggcaagggguccugggacugcaucaugaccagcuaccaguaccucaucauccagaacaccaccugggaggaccacugccaguucucccgccccagccccaucggcuaccuggggcugcucagccagcggacgcgcgacaucuacaucucccggcgccugcugggcaccuucaccuggacccucagcgacuccgagggcaacgagacgcccgggggcuacugccugacccgguggaugcugaucgaggccgagcucaagugcuucgggaacaccgccguggccaagugcaacgagaagcacgacgaggaguucugcgacaugcugcgccuguucgacuucugcaagcaggcgauccggcgccucaagacccccgcccagaugagcauccagcugaucaacaaggccgugaacgcccugaucaacgaccagcucaucaugaagaaccaccuccgggacaucaugggcauccccuacugcaacuacuccaaguacugcuaccugaaccacacggucaccgggaagaccagccugccccgcugcugccugguguccaacggcagcuaccugaacgagacccacuucuccgacgacaucgagcagcaggccgacaacaugaucacggagcuccugcagaaggaguacauggaccggcagggcaagaccccgcuggggcucguggaccuguucgucuucagcaccuccuucuaccugaucagcaucuuccugcaccucaucaagaucccgacccaccgccacaucacgggcaagcccugccccaagccccaccggcugaaccacauggggaucugcuccugcggccuguacaagcacccgggggugcccgugaaguggaagcgcugaggacuagucccuguucccagagcccacuuuuuuuucuuuuuuugaaauaaaauagccugucuuucagaucucaaaggcucuuuucagagccaccaaaaaaaaaaaaaaaaaaaaaaaaaaaaaaaaaaaaaaaaaaaaaaaaaaaaaaaaaaaaaaaaaaaaaaaaaaaaaaaaaaaaaaaaaaaaaaaaaaaaa

SEQ ID NO: 33816 - RNA, 1764 nt, Artificial Sequence
  mRNA product Design a-2 (hSL-A100) comprising derived and/or modified sequence from LASV(LASV253-NIG-2011;Clade II)__AIT17670__GPCmut8 (opt1)
aggagaguccgcucagccagguugcagaagcggcuuagcguguguccuaaucuucucucugcguguagguaggccugugccgcaaacaagcuuaccaugggccagaucaucaccuucuuccaggaggugccccacgucaucgaggaggugaugaacaucgugcugaucgcccucagccugcuggccauccucaaggggaucuacaacgucgcgaccugcggccuguucgggcugguguccuuccuccugcugugcggccgcagcugcuccacgaccuacaaggggguguacgagcuccagacccuggagcuggacauggccagccucaacaugugcaugccgcuguccugcacgaagaacaacagccaccacuacaucauggucggcaacgagaccggccuggagcucacccugaccaacacguccaucaucaaccacaaguucugcaaccugagcgacgcccacaagaagaaccucuacgaccacgcccugauguccaucaucagcaccuuccaccuguccauccccaacuucaaccaguacgaggccaugagcugcgacuucaacgggggcaagaucuccgugcaguacaaccucagccacaccuacgcgguggacgccgccaaccacugcgggaccaucgccaacggcguccugcagacguucaugcggauggcguggggcggguccuacaucgcccuggacagcggcaagggguccugggacugcaucaugaccagcuaccaguaccucaucauccagaacaccaccugggaggaccacugccaguucucccgccccagccccaucggcuaccuggggcugcucagccagcggacgcgcgacaucuacaucucccggcgccugcugggcaccuucaccuggacccucagcgacuccgagggcaacgagacgcccgggggcuacugccugacccgguggaugcugaucgaggccgagcucaagugcuucgggaacaccgccguggccaagugcaacgagaagcacgacgaggaguucugcgacaugcugcgccuguucgacuucugcaagcaggcgauccggcgccucaaggcccccgcccagaugagcauccagcugaucaacaaggccgugaacgcccugaucaacgaccagcucaucaugaagaaccaccuccgggacaucaugggcaucccguacugcaacuacuccaaguacugcuaccugaaccacaccgucacggggcgcaccagccugccccggugcugccugguguccaacggcagcuaccugaacgagacccacuucuccgacgacaucgagcagcaggcggacaacaugaucaccgagcuccugcagaaggaguacaucgaccgccagggcaagacgccccuggggcucguggaccuguucgucuucagcaccuccuucuaccugaucagcaucuuccugcaccucgugaagaucccgacccaccggcacaucaucggcaagcccugccccaagccccaccgccugaaccacauggggaucugcuccugcggccuguacaagcacccgggggugcccgucaaguggaagcggugaggacuagucccuguucccagagcccacuuuuuuuucuuuuuuugaaauaaaauagccugucuuucagaucucaaaggcucuuuucagagccaccaaaaaaaaaaaaaaaaaaaaaaaaaaaaaaaaaaaaaaaaaaaaaaaaaaaaaaaaaaaaaaaaaaaaaaaaaaaaaaaaaaaaaaaaaaaaaaaaaaaaa

SEQ ID NO: 33817 - RNA, 1764 nt, Artificial Sequence
  mRNA product Design a-2 (hSL-A100) comprising derived and/or modified sequence from LASV(LASV254-NIG-2011;Clade II)__AIT17674__GPCmut8 (opt1)
aggagaguccgcucagccagguugcagaagcggcuuagcguguguccuaaucuucucucugcguguagguaggccugugccgcaaacaagcuuaccaugggccagaucaucaccuucuuccaggaggugccccacgucaucgaggaggugaugaacaucgugcugaucgcccucagccugcuggccauccucaaggggaucuacaacgucgcgaccugcggccuguucgggcugguguccuuccuccugcugugcggccgcagcugcuccacgaccuacaaggggguguacgagcuccagacccuggagcuggacaugaccaaccucaacaugugcaugccgcugagcugcaccaagaacaacucccaccacuacaucauggucggcaacgagaccggccuggagcucacccugacgaacaccagcaucaucaaccacaaguucugcaaccuguccgacgcccacaagaagaaccucuacaaccacgcccugaugagcaucaucuccaccuuccaccugagcauccccaacuucaaccaguacgaggccauguccugcgacuucaacgggggcaagaucagcgugcaguacaaccucucccacagcuacgccguggacgcggccaaccacugcgggaccaucgccaacggcguccugcagacguucaugcggauggccuggggcggguccuacaucgcgcuggacagcggcaaggggaacugggacugcaucaugaccuccuaccaguaccucaucauccagaacaccaccugggaggaccacugccaguucagccgccccucccccaucggcuaccuggggcugcucagccagcggacgcgcgacaucuacaucagccggcgccugcugggcaccuucaccuggacccucuccgacagcgagggcaacgagacgcccgggggcuacugccugacccgguggaugcugaucgaggccgagcucaagugcuucgggaacaccgccguggccaagugcaacgagaagcacgacgaggaguucugcgacaugcugcgccuguucgacuucugcaagcaggccauccggcgccucaagacccccgcgcaggccaacauccagcugaucaacaaggccgugaacgcccugaucaacgaccagcucaucaugaagaaccaccuccgggacaucaugggcauccccuacugcaacuacuccaaguacugcuaccugaaccacacggucaccgggaagaccagccugccccgcugcugccugguguccaacggcagcuaccugaacgagacccacuucuccgacgacaucgagcagcaggccgacaacaugaucacggagcuccugcagaaggaguacauggaccggcagggcaagaccccgcuggggcucguggaccuguucgucuucagcaccuccuucuaccugaucagcaucuuccugcaccucgugaagaucccgacccaccgccacgugaucggcaagcccugccccaagccccaccggcugaaccacauggggaucugcuccugcggccuguacaagcacccggggguccccgugaaguggaagcgcugaggacuagucccuguucccagagcccacuuuuuuuucuuuuuuugaaauaaaauagccugucuuucagaucucaaaggcucuuuucagagccaccaaaaaaaaaaaaaaaaaaaaaaaaaaaaaaaaaaaaaaaaaaaaaaaaaaaaaaaaaaaaaaaaaaaaaaaaaaaaaaaaaaaaaaaaaaaaaaaaaaaaa

SEQ ID NO: 33818 - RNA, 1764 nt, Artificial Sequence
  mRNA product Design a-2 (hSL-A100) comprising derived and/or modified sequence from LASV(Nig08-A19;Clade III)__ADU56618__GPCmut8 (opt1)
aggagaguccgcucagccagguugcagaagcggcuuagcguguguccuaaucuucucucugcguguagguaggccugugccgcaaacaagcuuaccaugggccagaucgugaccuucuuccaggaggucccccacgugaucgaggaggugaugaacaucguccugaucgcccucagcauccuggccauccugaaggggcucuacaacaucgcgaccugcggccugaucgggcuggugacguuccuccugcuguccggccgcagcugcuccaugaccuacaaggggguguacgagcuccagacccuggagcugaacaugaacacccucaacaugugcaugccgcugagcugcaccaagaacaacucccaccacuacaucauggucggcaacgagaccggccuggagcucacccugacgaacaccagccugcuccaccacaaguucugcaaccuguccgacgcccacaagaagaaccuguacgaccacacccucaugagcaucaucuccaccuuccaccugagcauccccaacuucaaccaguacgaggccauguccugcgacuucaacgggggcaagaucacggugcaguacaaccugagccacuccuacgccaucgacgccgcgaaccacugcgggaccguggccaacggcguccuccagaccuucaugcggauggccuggggcgggagcuacaucgcccuggacuccggccgcgggaagugggacugcaucaugaccagcuaccaguaccugaucauccagaacacgaccugggaggaccacugccaguucucccggcccagccccaucggcuaccucgggcugcugucccagcgcacccgggacaucuacaucagccgccggcuccugggcaccuucacguggacccugagcgacuccgagggcaacgagacccccgggggcuacugccucacccgcuggaugcugaucgaggcggagcugaagugcuucgggaacacggccguggccaagugcaacgagaagcacgacgaggaguucugcgacaugcuccggcuguucgacuucugcaagcaggccauccgccggcugaaggcccccgcgcagaugagcauccagcucaucaacaaggccgugaacgcccugaucaacgaccagcugaucaugaagaaccaccuccgcgacaucaugggcauccccuacugcaacuacuccaaguacugcuaccugaaccacaccagcaccgggcggaccucccugccccgcugcugccucgucagcaacggcuccuaccugaacgagacgcacuucagcgacgacaucgagcagcaggccgacaacaugaucaccgagaugcugcagaaggaguaccucgaccggcagggcaagaccccgcuggggcugguggaccuguucguguucuccaccagcuucuaccucaucuccaucuuccugcaccuggucaagaucccgacgcaccgccacaucgugggcaagcccugccccaagccccaccggcucaaccacauggggaucugcagcugcggccuguacaagcagccgggggugcccguccgcuggaagcggugaggacuagucccuguucccagagcccacuuuuuuuucuuuuuuugaaauaaaauagccugucuuucagaucucaaaggcucuuuucagagccaccaaaaaaaaaaaaaaaaaaaaaaaaaaaaaaaaaaaaaaaaaaaaaaaaaaaaaaaaaaaaaaaaaaaaaaaaaaaaaaaaaaaaaaaaaaaaaaaaaaaaa

SEQ ID NO: 33819 - RNA, 1767 nt, Artificial Sequence
  mRNA product Design a-2 (hSL-A100) comprising derived and/or modified sequence from LASV(G1180-SLE-2010;Clade IV)__AIT17168__GPCmut8 (opt1)
aggagaguccgcucagccagguugcagaagcggcuuagcguguguccuaaucuucucucugcguguagguaggccugugccgcaaacaagcuuaccaugggccagaucgugaccuucuuccaggaggucccccacgugaucgaggaggugaugaacaucguccugaucgcccucagcauccuggccgugcugaaggggcucuacaacuucgcgaccugcggccugguggggcugcucaccuuccugcugcucugcggccgcuccugcaccgccagccgguacaagggggucuacgagcugcagacccuggagcucaacauggagacccugaacaugugcaugccgcuguccugcaccaagaacaacagccaccacuacaucauggugggcaacgagaccggccucgagcugacccugacgaacaccuccaucaucaaccacaaguucugcaaccucagcgacgcccacaagaagaaccuguacgaccacgcccugauguccaucaucagcaccuuccaccucuccauccccaacuucaaccaguacgaggccaugagcugcgacuucaacgggggcaagaucuccgugcaguacaaccugagccacuccuacgcgggggacgccgccaaccacugcggcaccgucgccaacggggugcugcagacguucaugcgcauggcguggggcggcagcuacaucgcccucgacuccgggcacggcagcugggacugcaucaugaccuccuaccaguaccugaucauccagaacaccaccugggaggaccacugccaguucagccggcccucccccaucggguaccugggccuccugagccagcgcacgcgggacaucuacaucagccgccggcugcucggcaccuucaccuggacccuguccgacagcgaggggaaggacacgccgggcggguacugccugacccgcuggaugcucaucgaggccgagcugaagugcuucggcaacaccgccguggccaagugcaacgagaagcacgacgaggaguucugcgacaugcugcggcuguucgacuucugcaagcaggcgauccagcgccugaaggcccccgcccagauguccauccagcugaucaacaaggccgucaacgcccucaucaacgaccagcugaucaugaagaaccaccuccgggacaucauggggauccccuacugcaacuacagcaaguacugcuaccucaaccacaccacgaccggcaagaccucccugcccaagugcugccuggugagcaacggcuccuaccucaacgagacccacuucagcgacgacaucgagcagcaggcggacaacaugaucacggagaugcugcagaaggaguacauggagcgccaggggaagacgccccugggccucguggaccuguucgucuucuccaccagcuucuaccugaucuccaucuuccugcaccucgugaagaucccgacccaccggcacaucgugggcaagagcugccccaagccccaccgccugaaccacauggggaucugcuccugcgggcuguacaagcagcccggcgucccggugaaguggaagcggugaggacuagucccuguucccagagcccacuuuuuuuucuuuuuuugaaauaaaauagccugucuuucagaucucaaaggcucuuuucagagccaccaaaaaaaaaaaaaaaaaaaaaaaaaaaaaaaaaaaaaaaaaaaaaaaaaaaaaaaaaaaaaaaaaaaaaaaaaaaaaaaaaaaaaaaaaaaaaaaaaaaaa

SEQ ID NO: 33820 - RNA, 1767 nt, Artificial Sequence
  mRNA product Design a-2 (hSL-A100) comprising derived and/or modified sequence from LASV(G1442-SLE-2011;Clade IV)__AIT17180__GPCmut8 (opt1)
aggagaguccgcucagccagguugcagaagcggcuuagcguguguccuaaucuucucucugcguguagguaggccugugccgcaaacaagcuuaccaugggccagaucgugaccuucuuccaggaggucccccacgugaucgaggaggugaugaacaucguccugaucgcccucagcauccuggccgugcugaaggggcucuacaacguggcgaccugcggccugaucgggcuggucacguuccuccugcugugcggccgcuccugcaccaccacccucuacaaggggguguacgagcugcagacgcuggagcucaacauggagacccugaacaugugcaugccgcugagcugcaccaagaacaacucccaccacuacauccgggugggcaacgagacgggccucgagcugacccugaccaacaccagcaucaucaaccacaaguucugcaaccucuccgacgcccacaagaagaaccuguacgaccacgcccugaugagcaucaucuccacguuccaccucagcauccccaacuucaaccaguacgaggccauguccugcgacuucaacgggggcaagaucagcguccaguacaaccugucccacagcuacgccggggacgcggccaaccacugcggcaccguggccaacggggugcugcagaccuucaugcgcauggccuggggcggcuccuacaucgcgcucgacagcgggcggggcaacugggacugcaucaugaccuccuaccaguaccugaucauccagaacacgaccugggacgaccacugccaguucagccgccccucccccaucggguaccugggccuccugagccagcggacccgcgacgucuacaucucccggcgccugcucggcaccuucacguggacccugagcgacagcgaggggaaggacaccccgggcggguacugccugacccgguggaugcucaucgaggccgagcugaagugcuucggcaacacggccguggccaagugcaacgagaagcacgacgaggaguucugcgacaugcugcgccucuucgacuucugcaagcaggccauccagcggcugaaggcgcccgcccagauguccauccagcugaucaacaaggccgugaacgcccucaucaacgaccagcugaucaugaagaaccaccuccgcgacaucauggggauccccuacugcaacuacagcaaguacugcuaccugaacaacaccgccaccggcaagaccucccugcccaagugcugccugaucagcaacggcuccuaccucaacgagacgcacuucagcgacgacaucgagcaggaggcggacaacaugaucaccgagaugcugcagaaggaguacauggagcggcaggggaagacgccccugggccucgucgaccuguucguguucuccaccagcuucuaccugaucuccaucuuccugcaccucgugaagaucccgacccaccgccacaucgucggcaagagcugccccaagccccaccggcugaaccacauggggaucugcuccugcgggcuguacaagcagcccggcgugccggugcgcuggaagcggugaggacuagucccuguucccagagcccacuuuuuuuucuuuuuuugaaauaaaauagccugucuuucagaucucaaaggcucuuuucagagccaccaaaaaaaaaaaaaaaaaaaaaaaaaaaaaaaaaaaaaaaaaaaaaaaaaaaaaaaaaaaaaaaaaaaaaaaaaaaaaaaaaaaaaaaaaaaaaaaaaaaaa

SEQ ID NO: 33821 - RNA, 1767 nt, Artificial Sequence
  mRNA product Design a-2 (hSL-A100) comprising derived and/or modified sequence from LASV(G3010-SLE-2013;Clade IV)__AIT17344__GPCmut8 (opt1)
aggagaguccgcucagccagguugcagaagcggcuuagcguguguccuaaucuucucucugcguguagguaggccugugccgcaaacaagcuuaccaugggccagaucgugaccuucuuccaggaggucccccacgugaucgaggaggugaugaacaucguccugaucgcccucagcauccuggccgugcugaaggggcucuacaacuucgcgaccugcggccugguggggcuggucacguuccuccugcugugcggccgcuccugcaccaccagccucuacaaggggguguacgagcugcagacccuggagcucaacauggagacgcugaacaugugcaugccgcuguccugcaccaagaacaacagccaccacuacaucauggugggcaacgagaccggccucgagcugacgcugaccaacaccuccaucaucaaccacaaguucugcaaccucagcgacgcccacaagaagaaccuguacaaccacgcccugauguccaucaucagcaccuuccaccucuccauccccaacuucaaccaguacgaggccaugagcugcgacuucaacgggggcaagaucuccguccaguacaaccugagccacuccuacgccggggacgcggccagccacugcggcacgguggccaacggggugcugcagaccuucaugcggauggccuggggcggcuccuacaucgcgcucgacagcggguacggcaagugggacugcaucaugaccuccuaccaguaccugaucauccagaacaccacgugggaggaccacugccaguucagccgccccucccccaucggguaccugggccuccugagccagcggacccgcgacaucuacaucagccggcgccugcucggcaccuucaccuggacgcuguccgacagcgaggggaaggacaccccgggcggguacugccugacccgguggaugcucaucgaggccgagcugaagugcuucggcaacaccgccgucgccaagugcaacgagaagcacgacgaggaguucugcgacaugcugcgccucuucgacuucugcaagcaggccauccagcggcugaagacgcccgcgcagauguccauccagcugaucaacaaggccgugaacgcccucaucaacgaccagcugaucaugaagaaccaccuccgcgacaucauggggauccccuacugcaacuacagcaaguacugcuaccugaaccacaccaccaccggcaagacgucccugcccaagugcugccuggugagcaacggcuccuaccucaacgagacccacuucagcgacgacaucgagcagcaggccgacaacaugaucaccgagaugcugcagaaggaguacauggagcggcaggggaagacgccccugggccucgucgaccuguucguguucuccaccagcuucuaccugaucuccaucuuccugcaccucgugaagaucccgacccaccgccacaucgucggcaagagcugccccaagccccaccggcugaaccacauggggaucugcuccugcgggcuguacaagcagcccggcgugccggugcgcuggaagcggugaggacuagucccuguucccagagcccacuuuuuuuucuuuuuuugaaauaaaauagccugucuuucagaucucaaaggcucuuuucagagccaccaaaaaaaaaaaaaaaaaaaaaaaaaaaaaaaaaaaaaaaaaaaaaaaaaaaaaaaaaaaaaaaaaaaaaaaaaaaaaaaaaaaaaaaaaaaaaaaaaaaaa

SEQ ID NO: 33822 - RNA, 1767 nt, Artificial Sequence
  mRNA product Design a-2 (hSL-A100) comprising derived and/or modified sequence from LASV(G502-SLE-2009;Clade IV)__AIT17126__GPCmut8 (opt1)
aggagaguccgcucagccagguugcagaagcggcuuagcguguguccuaaucuucucucugcguguagguaggccugugccgcaaacaagcuuaccaugggccagaucgugaccuucuuccaggaggucccccacgugaucgaggaggugaugaacaucguccugaucgcccucagcauccuggccgugcugaaggggcucuacaacuucgcgaccugcggccugguggggcugcucacguuccugcugcucugcggccgcuccugcaccaccgggcuguacaagggcgucuacgagcugcagacccucgagcugaacauggagacgcugaacaugugcaugccgcucagcugcaccaagaacaacucccaccacuacaucauggugggcaacgagaccgggcuggagcugacgcucaccaacaccagcaucaucaaccacaaguucugcaaccuguccgacgcccacaagaagaaccuguacgaccacgcccucaugagcaucaucuccaccuuccaccugagcauccccaacuucaaccaguacgaggccauguccugcgacuucaacggcgggaagaucagcgugcaguacaaccugucccacagcuacgccggcgacgcggccgaccacugcgggacggucgccaacggcgugcuccagaccuucaugcggauggccuggggcggguccuacaucgcgcuggacagcggccgcgggcggugggacugcaucaugaccuccuaccaguaccugaucauccagaacaccacgugggaggaccacugccaguucagccgccccucccccaucggcuaccucggccugcugagccagcggacccgcgacaucuacaucucccggcgccuccuggggaccuucaccuggacgcugagcgacagcgagggcaaggacacccccgggggcuacugccucacccgguggaugcugaucgaggccgagcugaagugcuucgggaacaccgccguggccaagugcaacgagaagcacgacgaggaguucugcgacaugcuccgccuguucgacuucugcaagcaggccauccagcggcugaaggcgcccgcccagauguccauccagcucaucaacaaggccgucaacgcccugaucaacgaccagcuggugaugaagaaccaccuccgcgacaucaugggcauccccuacugcaacuacagccgguacugcuaccugaaccacacgaccaccggccgcaccucccugcccaagugcugccucgugagcaacggguccuaccugaacgagacgcacuucagcgacgacaucgagcagcaggccgacaacaugaucaccgagaugcugcagaaggaguacauggagcggcagggcaagaccccgcucgggcuggucgaccuguucguguucuccaccagcuucuaccugaucuccaucuuccuccaccuggugaagaucccgacgcaccgccacaucgucggcaagagcugccccaagccccaccggcugaaccacauggggaucugcuccugcggccucuacaagcagcccggcgugccggugaaguggaagcgcugaggacuagucccuguucccagagcccacuuuuuuuucuuuuuuugaaauaaaauagccugucuuucagaucucaaaggcucuuuucagagccaccaaaaaaaaaaaaaaaaaaaaaaaaaaaaaaaaaaaaaaaaaaaaaaaaaaaaaaaaaaaaaaaaaaaaaaaaaaaaaaaaaaaaaaaaaaaaaaaaaaaaa

SEQ ID NO: 33823 - RNA, 1767 nt, Artificial Sequence
  mRNA product Design a-2 (hSL-A100) comprising derived and/or modified sequence from LASV(G733-SLE-2010;Clade IV)__AIT17154__GPCmut8 (opt1)
aggagaguccgcucagccagguugcagaagcggcuuagcguguguccuaaucuucucucugcguguagguaggccugugccgcaaacaagcuuaccaugggccagaucgugaccuucuuccaggaggucccccacgugaucgaggaggugaugaacaucguccugaucgcccucagcauccuggccgugcugaaggggcucuacaacuucgcgaccugcggcaucguggggcuggucuccuuccugcuccugugcggccgcagcugcacgaccucccuguacaaggggguguacgagcuccagacccuggagcugaacauggagacccucaacaugugcaugccgcugagcugcaccaagaacaacucccaccacuacaucauggugggcaacgagaccggccuggagcucacccugacgaacaccagcaucaucaaccacaaguucugcaaccuguccgacgcccacaagaagaaccucuacgaccacgcccugaugagcaucaucuccaccuuccaccugagcauccccaacuucaaccaguacgaggccauguccugcgacuucaacgggggcaagaucagcguccaguacaaccucucccacagcuacgccggggacgcggccaaccacugcggcaccaucgccaacggggugcugcagacguucaugcggauggccuggggcggcuccuacaucgcgcuggacagcgggcgcgaccggugggacugcaucaugaccuccuaccaguaccucaucauccagaacaccaccugggaggaccacugccaguucagccgccccucccccaucggcuaccuggggcugcucagccagcggacgcgcgacaucuacaucagccggcgccugcugggcaccuucaccuggacccucuccgacagcgagggcaaggacacgcccgggggcuacugccugacccgguggaugcugaucgaggccgagcucaagugcuucgggaacaccgccguggccaagugcaacgagaagcacgacgaggaguucugcgacaugcugcgccuguucgacuucugcaagcaggccauccagcggcucaaggcgcccgcccagauguccauccagcugaucaacaaggccgucaacgcccugaucaacgaccagcucaucaugaagaaccaccuccgcgacaucaugggcauccccuacugcaacuacagcaaguacugcuaccugaaccacaccacgaccgggaagaccucccugcccaagugcugccuggugagcaacggcuccuaccugaacgagacccacuucagcgacgacaucgagcagcaggccgacaacaugaucacggagaugcuccagaaggaguacauggagcggcagggcaagaccccgcuggggcugguggaccucuucgucuucuccaccagcuucuaccugaucuccaucuuccugcaccuggugaagaucccgacccaccgccacguggucggcaagagcugccccaagccccaccggcucaaccacauggggaucugcuccugcggccuguacgggcagcccggcgugccggugaaguggaagcgcugaggacuagucccuguucccagagcccacuuuuuuuucuuuuuuugaaauaaaauagccugucuuucagaucucaaaggcucuuuucagagccaccaaaaaaaaaaaaaaaaaaaaaaaaaaaaaaaaaaaaaaaaaaaaaaaaaaaaaaaaaaaaaaaaaaaaaaaaaaaaaaaaaaaaaaaaaaaaaaaaaaaaa

SEQ ID NO: 33824 - RNA, 1767 nt, Artificial Sequence
  mRNA product Design a-2 (hSL-A100) comprising derived and/or modified sequence from MOPV/LASV reassortant(IGS-1;Clade IV)__AFY05576__GPCmut8 (opt1)
aggagaguccgcucagccagguugcagaagcggcuuagcguguguccuaaucuucucucugcguguagguaggccugugccgcaaacaagcuuaccaugggccagaucgugaccuucuuccaggaggucccccacgugaucgaggaggugaugaacaucguccugaucgcccucagcgugcuggccgugcugaaggggcucuacaacuucgcgaccugcggccuggucgggcuggugacguuccuccugcugugcggccgcuccugcaccaccagccucuacaaggggguguacgagcugcagacccuggagcucaacauggagacgcugaacaugugcaugccgcuguccugcaccaagaacaacagccaccacuacaucauggucggcaacgagaccggccucgagcugacgcugaccaacaccuccaucaucaaccacaaguucugcaaccucagcgacgcccacaagaagaaccuguacgaccacgcccugauguccaucaucagcaccuuccaccucuccauccccaacuucaaccaguacgaggccaugagcugcgacuucaacgggggcaagaucuccgugcaguacaaccugagccacuccuacgccggggacgcggccaaccacugcggcacgguggccaacgggguccugcagaccuucaugcggauggccuggggcggcagcuacaucgcgcucgacuccgggcgcggcaacugggacugcaucaugaccagcuaccaguaccugaucauccagaacaccacgugggaggaccacugccaguucucccggcccagccccaucggguaccugggccuccugucccagcgcacccgggacaucuacaucagccgccggcugcucggcaccuucaccuggacgcugagcgacuccgagggggaggacaccccgggcggguacugccugacccgcuggaugcucaucgaggccgagcugaagugcuucggcaacaccgccguggccaagugcaacgagaagcacgacgaggaguucugcgacaugcugcggcuguucgacuucugcaagcaggccauccagcgccugaaggcgcccgcccagaugagcauccagcugaucaacaaggccgugaacgcccucaucaacgaccagcugaucaugaagaaccaccuccgggacaucauggggauccccuacugcaacuacuccaaguacugcuaccucaaccacacgaccaccggccgcaccagccugcccaagugcugccuggucuccaacggcagcuaccucaacgagacgcacuucuccgacgacaucgagcagcaggccgacaacaugaucaccgagaugcugcagaaggaguacauggagcggcaggggaagacgccccugggccucguggaccuguucguguucagcaccuccuucuaccugaucagcaucuuccugcaccucgucaagaucccgacccaccgccacaucguggggaaguccugccccaagccccaccggcugaaccacaugggcaucugcagcugcgggcuguacaagcagcccggcgugccggucaaguggaagcgcugaggacuagucccuguucccagagcccacuuuuuuuucuuuuuuugaaauaaaauagccugucuuucagaucucaaaggcucuuuucagagccaccaaaaaaaaaaaaaaaaaaaaaaaaaaaaaaaaaaaaaaaaaaaaaaaaaaaaaaaaaaaaaaaaaaaaaaaaaaaaaaaaaaaaaaaaaaaaaaaaaaaaa

SEQ ID NO: 33825 - RNA, 1767 nt, Artificial Sequence
  mRNA product Design a-2 (hSL-A100) comprising derived and/or modified sequence from LASV(LM765-SLE-2012;Clade IV)__AIT17814__GPCmut8 (opt1)
aggagaguccgcucagccagguugcagaagcggcuuagcguguguccuaaucuucucucugcguguagguaggccugugccgcaaacaagcuuaccaugggccagaucgugaccuucuuccaggaggucccccacgugaucgaggaggugaugaacaucguccugaucgcccucagcauccuggccgugcugaaggggcucuacaacuucgcgaccugcggccugguggggcuggucacguuccuccugcugugcggccgcuccugcaccaccagccucuacaaggggguguacgagcugcagacccuggagcucaacauggagacgcugaacaugugcaugccgcuguccugcaccaagaacaacagccaccacuacaucauggugggcaacgagaccggccucgagcugacgcugaccaacaccuccaucaucgaccacaaguucugcaaccucagcgacgcccaccggaagaaccuguacgaccacgcccugauguccaucaucagcaccuuccaccucuccauccccaacuucaaccaguacgaggccaugagcugcgacuucaacgggggcaagaucuccguccaguacaaccugagccacuccuacgccaaggacgcggccgaccacugcgggacgguggccaacggcgugcugcagaccuucaugcgcauggccuggggcgggagcuacaucgcgcucgacuccggccgggggcgcugggacugcaucaugaccagcuaccaguaccugaucauccagaacaccacgugggaggaccacugccaguucucccggcccagccccaucggcuaccuggggcuccugucccagcgcacccgggacaucuacaucagccgccggcugcucggcaccuucaccuggacgcugagcgacuccgagggcaaggacacccccgggggcuacugccugacccgcuggaugcucaucgaggccgagcugaagugcuucgggaacaccgccgucgccaagugcaacgagaagcacgacgaggaguucugcgacaugcugcggcuguucgacuucugcaagcaggccauccagcgccugaaggcgcccgcccagaugagcauccagcugaucaacaaggccgugaacgcccucaucaacgaccagcugaucaugaagaaccaccuccgggacaucaugggcauccccuacugcaacuacuccaaguacugcuaccucaaccacacgaccaccgggaagaccagccugcccaagugcugccugguguccaacggcagcuaccucaacgagacgcacuucuccgacgacaucgagcagcaggccgacaacaugaucaccgagaugcugcagaaggaguacauggagcgccagggcaagaccccgcuggggcucgucgaccuguucguguucagcaccuccuucuaccugaucagcaucuuccugcaccucgugaagaucccgacgcaccggcacaucgucggcaagcccugccccaagccccaccgccugaaccacauggggaucugcuccugcggccuguacaagcagccgggggugcccgugaaguggaagcggugaggacuagucccuguucccagagcccacuuuuuuuucuuuuuuugaaauaaaauagccugucuuucagaucucaaaggcucuuuucagagccaccaaaaaaaaaaaaaaaaaaaaaaaaaaaaaaaaaaaaaaaaaaaaaaaaaaaaaaaaaaaaaaaaaaaaaaaaaaaaaaaaaaaaaaaaaaaaaaaaaaaaa

SEQ ID NO: 33826 - RNA, 1767 nt, Artificial Sequence
  mRNA product Design a-2 (hSL-A100) comprising derived and/or modified sequence from LASV(LM776-SLE-2012;Clade IV)__AIT17824__GPCmut8 (opt1)
aggagaguccgcucagccagguugcagaagcggcuuagcguguguccuaaucuucucucugcguguagguaggccugugccgcaaacaagcuuaccaugggccagaucgugaccuucuuccaggaggucccccacgugaucgaggaggugaugaacaucguccugaucgcccucagcauccuggccgugcugaaggggcucuacaacuucgcgaccugcggccugguggggcuggucacguuccuccugcugugcggccgcuccugcaccaccagcguguacaaggggguguacgagcuccagacccuggagcugaacauggagacgcucaacaugugcaugccgcuguccugcaccaagaacaacagccaccacuacaucauggucggcaacgagaccggccuggagcucacgcugaccaacaccuccaucaucaaccacaaguucugcaaccugagcgacgcccacaagaagaaccucuacgaccacgcccugauguccaucaucagcaccuuccaccuguccauccccaacuucaaccaguacgaggccaugagcugcgacuucaacgggggcaagaucuccgugcaguacaaccucagccacuccuacgccggggacgcggccaaccacugcggcacgguggccaacgggguccugcagaccuucaugcggauggccuggggcggcagcuacaucgcgcuggacuccgggcacggcaagugggacugcaucaugaccagcuaccaguaccucaucauccagaacaccacgugggaggaccacugccaguucucccgccccagccccaucggguaccugggccugcucucccagcggacccgcgacaucuacaucagccggcgccugcugggcaccuucaccuggacgcucagcgacuccgaggggaaggacaccccgggcggguacugccugacccgguggaugcugaucgaggccgagcucaagugcuucggcaacaccgccguggccaagugcaacgagaagcacgacgaggaguucugcgacaugcugcgccuguucgacuucugcaagcaggccauccagcggcucaaggcgcccgcccagaugagcauccagcugaucaacaaggccgugaacgcccugaucaacgaccagcucaucaugaagaaccaccuccgcgacaucauggggauccccuacugcaacuacuccaaguacugcuaccugaaccacacgaccaccggcaagaccagccugcccaagugcugccuggucuccaacggcagcuaccugaacgagacgcacuucuccgacgacaucgagcagcaggccgacaacaugaucaccgagaugcuccagaaggaguacauggagcggcaggggaagacgccccugggccugguggaccucuucguguucagcaccuccuucuaccugaucagcaucuuccugcaccuggucaagaucccgacccaccgccacaucguggggaaguccugccccaagccccaccggcucaaccacaugggcaucugcagcugcgggcuguacaagcagcccggcgugccgguccgcuggaagcggugaggacuagucccuguucccagagcccacuuuuuuuucuuuuuuugaaauaaaauagccugucuuucagaucucaaaggcucuuuucagagccaccaaaaaaaaaaaaaaaaaaaaaaaaaaaaaaaaaaaaaaaaaaaaaaaaaaaaaaaaaaaaaaaaaaaaaaaaaaaaaaaaaaaaaaaaaaaaaaaaaaaaa

SEQ ID NO: 33827 - RNA, 1767 nt, Artificial Sequence
  mRNA product Design a-2 (hSL-A100) comprising derived and/or modified sequence from LASV(Mad39;Clade IV)__ANH09722__GPCmut8 (opt1)
aggagaguccgcucagccagguugcagaagcggcuuagcguguguccuaaucuucucucugcguguagguaggccugugccgcaaacaagcuuaccaugggccagaucgugaccuucuuccaggaggucccccacgugaucgaggaggugaugaacaucguccugaucgcccucagcauccuggccgugcugaaggggcucuacaacguggcgaccugcggccugaucgggcuggucacguuccuccugcugugcggccgcuccugcaccaccacccucuacaaggggguguacgagcugcaggcccuggagcucaacauggagacgcugaacaugugcaugccgcugagcugcaccaagaacaacucccaccacuacauccgggugggcaacgagaccggccucgagcugacgcugaccaacaccagccucaucaaccacaaguucugcaaccuguccgacgcccacaagaagaaccuguacgaccacgcccucaugagcaucaucuccaccuuccaccugagcauccccaacuucaaccaguacgaggccauguccugcgacuucaacgacgggaagaucagcguccaguacaaccugucccacacguacgcgggcgacaccgccaaccacugcgggaccguggccaacggcgugcuccagaccuucaugcgcauggccuggggcgggagcuacaucgcgcuggacuccggccgcgggggcugggacugcaucaugacgagcuaccaguaccugaucauccagaacaccaccugggaggaccacugccaguucucccggcccagccccaucggguaccucggccugcugucccagcggacccgcgacaucuacaucagccggcgccuccugggcacguucaccuggacccuguccgacagcgaggggaaggacaccccgggcggguacugccucacgcgguggaugcugaucgaggccgagcugaagugcuucggcaacaccgccgucgccaagugcaacgagaagcacgacgaggaguucugcgacaugcuccgccuguucgacuucugcaagcaggccauccagcggcugaaggcgcccgcccagaugagcauccagcucaucaacaaggccgugaacgcccugaucaacgaccagcugaucaugaagaaccaccuccgcgacaucauggggauccccuacugcaacuacuccaaguacugcuaccugaaccacaccgugaccggcaagacgagccugcccaagugcugccucgucuccaacggcagcuaccugaacgagacccacuucuccgacgacaucgagcagcaggccgacaacaugaucaccgagaugcugcagaaggaguacauggagcggcaggggaagacgccccucggccugguggaccuguucguguucagcaccuccuucuaccugaucagcaucuuccuccaccuggucaagaucccgacccaccgccacgugguggggaagcccugccccaagccccaccggcugaaccacaugggcaucugcuccugcggguucuacaagcagccgggcguccccgugcgcuggaagcggugaggacuagucccuguucccagagcccacuuuuuuuucuuuuuuugaaauaaaauagccugucuuucagaucucaaaggcucuuuucagagccaccaaaaaaaaaaaaaaaaaaaaaaaaaaaaaaaaaaaaaaaaaaaaaaaaaaaaaaaaaaaaaaaaaaaaaaaaaaaaaaaaaaaaaaaaaaaaaaaaaaaaa

SEQ ID NO: 33828 - RNA, 1767 nt, Artificial Sequence
  mRNA product Design a-2 (hSL-A100) comprising derived and/or modified sequence from LASV(Z0947-SLE-2011;Clade IV)__AIT17840__GPCmut8 (opt1)
aggagaguccgcucagccagguugcagaagcggcuuagcguguguccuaaucuucucucugcguguagguaggccugugccgcaaacaagcuuaccaugggccagaucgugaccuucuuccaggaggucccccacgugaucgaggaggugaugaacaucguccugaucgcccucagcauccuggccgugcugaaggggcucuacaacuucgcgaccugcggccugguggggcuggucacguuccuccugcugugcggccgcuccugcaccaucagccucuacaaggggguguacgagcugcagacccuggagcucaacauggagacccugaacaugugcaugccgcuguccugcaccaagaacaacagccaccacuacaucauggugggcaacgagaccggccucgagcugacccugacgaacaccuccaucaucaaccacaaguucugcaaccucagcgacgcccacaagaagaaccuguacgaccacgcccugauguccaucaucagcaccuuccaccucuccauccccaacuucaaccaguacgaggccaugagcugcgacuucaacgggggcaagaucuccguccaguacaaccugagccacuccuacgccggggacgcggccaaccacugcggcaccguggccaacggggugcugcagacguucaugcggauggccuggggcggcagcuacaucgcgcucgacuccgggcgcgaccggugggacugcaucaugaccagcuaccaguaccugaucauccagaacaccaccugggaggaccacugccaguucucccgccccagccccaucggcuaccuggggcuccugucccagcggacgcgcgacaucuacaucagccggcgccugcucggcaccuucaccuggacccugagcgacuccgagggcaaggacacgcccgggggcuacugccugacccgguggaugcucaucgaggccgagcugaagugcuucgggaacaccgccgucgccaagugcaacgagaagcacgacgaggaguucugcgacaugcugcgccucuucgacuucugcaagcaggccauccagcggcugaaggcgcccgcccagaugagcauccagcugaucaacaaggccgugaacgcccucaucaacgaccagcugaucaugaagaaccaccuccgcgacaucaugggcauccccuacugcaacuacuccaaguacugcuaccugaaccacaccacgaccgggaagaccagccugcccaagugcugccugguguccaacggcagcuaccucaacgagacccacuucuccgacgacaucgagcagcaggccgacaacaugaucacggagaugcugcagaaggaguacauggagcggcagggcaagaccccgcuggggcucgucgaccuguucguguucagcaccuccuucuaccugaucagcaucuuccugcaccucgugaagaucccgacccaccgccacaucgucggcaagcccugccccaagccccaccggcugaaccacauggggaucugcuccugcggccuguacaagcagccgggggugcccgugaaguggaagcgcugaggacuagucccuguucccagagcccacuuuuuuuucuuuuuuugaaauaaaauagccugucuuucagaucucaaaggcucuuuucagagccaccaaaaaaaaaaaaaaaaaaaaaaaaaaaaaaaaaaaaaaaaaaaaaaaaaaaaaaaaaaaaaaaaaaaaaaaaaaaaaaaaaaaaaaaaaaaaaaaaaaaaa

SEQ ID NO: 33829 - RNA, 1767 nt, Artificial Sequence
  mRNA product Design a-2 (hSL-A100) comprising derived and/or modified sequence from LASV(Josiah;Clade IV)__NP_694870__GPCmut8 (opt1)
aggagaguccgcucagccagguugcagaagcggcuuagcguguguccuaaucuucucucugcguguagguaggccugugccgcaaacaagcuuaccaugggccagaucgugaccuucuuccaggaggucccccacgugaucgaggaggugaugaacaucguccugaucgcccucagcgugcuggccgugcugaaggggcucuacaacuucgcgaccugcggccuggucgggcuggugacguuccuccugcugugcggccgcuccugcaccaccagccucuacaaggggguguacgagcugcagacccuggagcucaacauggagacgcugaacaugugcaugccgcuguccugcaccaagaacaacagccaccacuacaucauggucggcaacgagaccggccucgagcugacccugacgaacaccuccaucaucaaccacaaguucugcaaccucagcgacgcccacaagaagaaccuguacgaccacgcccugauguccaucaucagcaccuuccaccucuccauccccaacuucaaccaguacgaggccaugagcugcgacuucaacgggggcaagaucuccgugcaguacaaccugagccacuccuacgccggggacgcggccaaccacugcggcaccguggccaacgggguccugcagacguucaugcggauggccuggggcggcagcuacaucgcgcucgacuccgggcgcggcaacugggacugcaucaugaccagcuaccaguaccugaucauccagaacaccaccugggaggaccacugccaguucucccggcccagccccaucggguaccugggccuccugucccagcgcacgcgggacaucuacaucagccgccggcugcucggcaccuucaccuggacccugagcgacuccgaggggaaggacacgccgggcggguacugccugacccgcuggaugcucaucgaggccgagcugaagugcuucggcaacaccgccguggccaagugcaacgagaagcacgacgaggaguucugcgacaugcugcggcuguucgacuucugcaagcaggccauccagcgccugaaggcgcccgcccagaugagcauccagcugaucaacaaggccgugaacgcccucaucaacgaccagcugaucaugaagaaccaccuccgggacaucauggggauccccuacugcaacuacuccaaguacugcuaccucaaccacaccacgaccggccgcaccagccugcccaagugcugccuggucuccaacggcagcuaccucaacgagacccacuucuccgacgacaucgagcagcaggccgacaacaugaucacggagaugcugcagaaggaguacauggagcggcaggggaagaccccgcugggccugguggaccucuucguguucagcaccuccuucuaccugaucagcaucuuccugcaccucgucaagauccccacccaccgccacaucguggggaaguccugccccaagccccaccggcugaaccacaugggcaucugcagcugcgggcuguacaagcagccgggcgugcccgucaaguggaagcgcugaggacuagucccuguucccagagcccacuuuuuuuucuuuuuuugaaauaaaauagccugucuuucagaucucaaaggcucuuuucagagccaccaaaaaaaaaaaaaaaaaaaaaaaaaaaaaaaaaaaaaaaaaaaaaaaaaaaaaaaaaaaaaaaaaaaaaaaaaaaaaaaaaaaaaaaaaaaaaaaaaaaaa

SEQ ID NO: 33830 - RNA, 1764 nt, Artificial Sequence
  mRNA product Design a-2 (hSL-A100) comprising derived and/or modified sequence from LASV(LP;Clade I)__AAF86701__GPCmut8 (opt1)
aggagaguccgcucagccagguugcagaagcggcuuagcguguguccuaaucuucucucugcguguagguaggccugugccgcaaacaagcuuaccaugggccagaucaucaccuucuuccaggaggugccccacgucaucgaggaggugaugaacaucgugcugaucgcccucagccugcuggccauccucaaggggcuguacaacaucgcgaccugcggcaucaucgggcuggucgccuuccucuuccugugcggcaaguccugcagccugacgcucaagggcggguacgagcugcagacccuggagcucaacauggagacccugaacaugugcaugccgcuguccugcaccaagaacagcucccaccacuacauccgcgugggcaacgagacggggcucgagcugacccugaccaacaccagcaucaucaaccacaaguucugcaaccucuccgacgcccacaagaagaaccuguacgaccacgcccugaugagcaucaucuccacguuccaccucagcauccccaacuucaaccaguacgaggccauguccugcgacuucaacggcgggaagaucagcgugcaguacaaccugucccacagcuacgcgggcgacgccgccgagcacugcgggaccgucgccaacggcgugcugcagaccuucaugcggauggcguggggcgggcgcuacaucgcccucgacuccggcaaggggaacugggacugcaucaugaccagcuaccaguaccugaucauccagaacacgaccugggaggaccacugccaguucucccggcccagccccaucggcuaccugggccuccugucccagcgcacccgggacaucuacaucagccgccggcugcucgggaccuucacguggacccugagcgacuccgagggcaacgagacccccgggggcuacugccugacccgcuggaugcucaucgaggccgagcugaagugcuucgggaacacggccguggccaagugcaacgagaagcacgacgaggaguucugcgacaugcugcggcuguucgacuucugcaagcaggcgauccgccggcugaaggccccggcccagaugagcauccagcugaucaacaaggccgucaacgcccucaucaacgaccagcugaucaugaagaaccaccuccgcgacaucaugggcauccccuacugcaacuacuccaaguacugcuaccucaaccacaccagcuccggccggaccagccugcccaagugcugccugaucuccaacgggagcuaccucaacgagacccaguucuccgacgacaucgagcagcaggcggacaacaugaucacggagaugcugcagaaggaguacaucgagcgccagggcaagaccccgcuggggcugguggacaucuucaucuucagcaccuccuucuaccucaucagcaucuuccugcaccugaucaagauccccacccaccggcacaucgugggcaagcccugccccaagccgcaccgccucaaccacaugggggucugcuccugcggccuguacaagcaccccggcgugcccacgaaguggaagcggugaggacuagucccuguucccagagcccacuuuuuuuucuuuuuuugaaauaaaauagccugucuuucagaucucaaaggcucuuuucagagccaccaaaaaaaaaaaaaaaaaaaaaaaaaaaaaaaaaaaaaaaaaaaaaaaaaaaaaaaaaaaaaaaaaaaaaaaaaaaaaaaaaaaaaaaaaaaaaaaaaaaaa

SEQ ID NO: 33831 - RNA, 1764 nt, Artificial Sequence
  mRNA product Design a-2 (hSL-A100) comprising derived and/or modified sequence from LASV(803213;Clade II)__AAF86703__GPCmut8 (opt1)
aggagaguccgcucagccagguugcagaagcggcuuagcguguguccuaaucuucucucugcguguagguaggccugugccgcaaacaagcuuaccaugggccagaucaucaccuucuuccaggaggugccccacgucaucgaggaggugaugaacaucgugcugaucgcccucagccugcuggccauccucaaggggaucuacaacgucgcgaccugcggccuguucgggcugaucuccuuccuccugcugugcggccgcagcugcuccgugacguacaaggggguguacgagcuccagacccuggagcugaacauggccaaccucaacaugugcaugccgcugagcugcaccaagaacaacucccaccacuacaucauggucggcaacgagaccggccuggagcucacgcugaccaacaccagcaucaucaaccacaaguucugcaaccuguccgacgcccacaagaagaaccucuacgaccacgcccugaugagcaucaucuccaccuuccaccugagcauccccaacuucaaccaguacgaggccauguccugcgacuucaacgggggcaagaucagcgugcaguacaaccucucccacagcuucgcgguggacgccgccaaccacugcgggacgaucgccaacggcguccugcagaccuucaugcggauggcguggggcggguccuacaucgcccuggacagcggcaaggggaacugggacugcaucaugaccuccuaccaguaccucaucauccagaacaccacgugggaggaccacugccaguucagccgccccucccccaucggcuaccuggggcugcucagccagcggacccgcgacaucuacaucagccggcgccugcugggcaccuucaccuggacgcucuccgacagcgagggcaacgaggcccccgggggcuacugccugacccgguggaugcugaucgaggccgagcucaagugcuucgggaacaccgccguggcgaagugcaacgagaagcacgacgaggaguucugcgacaugcugcgccuguucgacuucugcaagcaggccaucaagcggcucaagaccccggcccagauguccauccagcugaucaacaaggccgugaacgcccugaucaacgaccagcucaucaugaagaaccaccuccgcgacaucaugggcauccccuacugcaacuacagccgguacugcuaccugaaccacacggucaccgggaagaccucccugccccgcugcugccuggugagcaacggcuccuaccugaacgagacccacuucagcgacgacaucgagcagcaggcggacaacaugaucacggagaugcuccagaaggaguacauggaccggcagggcaagaccccgcuggggcugguggaccuguucgucuucuccaccagcuucuaccucaucuccaucuuccugcaccuggugaagauccccacccaccgccacaucgugggcaagcccugccccaagccgcaccggcucaaccacauggggaucugcagcugcggccuguacaagcaccccgggguccccgugaaguggaagcgcugaggacuagucccuguucccagagcccacuuuuuuuucuuuuuuugaaauaaaauagccugucuuucagaucucaaaggcucuuuucagagccaccaaaaaaaaaaaaaaaaaaaaaaaaaaaaaaaaaaaaaaaaaaaaaaaaaaaaaaaaaaaaaaaaaaaaaaaaaaaaaaaaaaaaaaaaaaaaaaaaaaaaa

SEQ ID NO: 33832 - RNA, 1764 nt, Artificial Sequence
  mRNA product Design a-2 (hSL-A100) comprising derived and/or modified sequence from LASV(GA391;Clade III)__CAA36645__GPCmut8 (opt1)
aggagaguccgcucagccagguugcagaagcggcuuagcguguguccuaaucuucucucugcguguagguaggccugugccgcaaacaagcuuaccaugggccagaucgugaccuucuuccaggaggucccccacgugaucgaggaggugaugaacaucguccugaucgcccucagcauccuggccauccugaaggggcucuacaacguggcgaccugcggccugaucgggcuggugacguuccuccugcuguccggccgcagcugcucccucaucuacaaggggaccuacgagcugcagacccuggagcucaacauggagacccugaacaugugcaugccgcugagcugcacgaagaacaacucccaccacuacauccgggucggcaacgagaccggccucgagcugacccugaccaacacgagcauccucaaccacaaguucugcaaccuguccgacgcccacaagcgcaaccuguacgaccacagccucauguccaucaucagcaccuuccaccuguccauccccaacuucaaccaguacgaggccaugagcugcgacuucaacgggggcaagaucaccgugcaguacaaccugucccacagcuucgccguggacgccgcggggcacugcggcacccucgccaacgggguccugcagacguucaugcggauggccuggggcggcuccuacaucgcccuggacagcgggcgcggcaacugggacugcaucaugaccuccuaccaguaccucaucauccagaacaccaccugggacgaccacugccaguucagccggcccucccccaucggguaccugggccugcucagccagcgcacgcgggacaucuacaucagccgccggcugcugggcaccuucaccuggacccucuccgacagcgaggggaacgagacgccgggcggguacugccugacccgcuggaugcugaucgaggcggagcucaagugcuucggcaacaccgccguggccaagugcaacgagaagcacgacgaggaguucugcgacaugcugcggcuguucgacuucugcaagcaggccauccgccggcucaagacccccgcccagauguccauccagcugaucaacaaggcggugaacgcccugaucaacgaccagcucaucaugaagaaccaccuccgcgacaucauggggauccccuacugcaacuacagccgguacugcuaccugaaccacacguccaccggcaagaccagccugccccgcugcugccugaucuccaacggcagcuaccugaacgagaccaaguucuccgacgacaucgagcagcaggccgacaacaugaucacggagaugcugcagaaggaguacaucgaccggcaggggaagaccccgcucggccuggucgaccuguucguguucagcaccuccuucuaccucaucagcaucuuccugcaccuggugaagauccccacccaccgccacaucgucgggaagcccugccccaagccgcaccggcucaaccacaugggcaucugcuccugcgggcuguacaagcagcccggcgugcccgugcgcuggaagcggugaggacuagucccuguucccagagcccacuuuuuuuucuuuuuuugaaauaaaauagccugucuuucagaucucaaaggcucuuuucagagccaccaaaaaaaaaaaaaaaaaaaaaaaaaaaaaaaaaaaaaaaaaaaaaaaaaaaaaaaaaaaaaaaaaaaaaaaaaaaaaaaaaaaaaaaaaaaaaaaaaaaaa

SEQ ID NO: 33833 - RNA, 1767 nt, Artificial Sequence
  mRNA product Design a-2 (hSL-A100) comprising derived and/or modified sequence from LASV(AV;Clade V)__CCA30314__GPCmut8 (opt1)
aggagaguccgcucagccagguugcagaagcggcuuagcguguguccuaaucuucucucugcguguagguaggccugugccgcaaacaagcuuaccaugggccagaucgugaccuucuuccaggaggucccccacgugaucgaggaggugaugaacaucguccugaucgcccucagcauccuggccgugcugaaggggcucuacaacaucgcgaccugcggccugaucgggcugaucacguuccuccugcugugcggccgcuccugcagcuccaaccucuacaaggggguguacgagcugcagagccuggaccucaacauggagacccugaacaugugcaugccgcuguccugcaccaagaacaacagccaccacuacauccgggucggcaacgacaccggccucgagcugacgcugaccaacaccuccauccucaaccacaaguucugcaaccugagcgacgcccacaagaaggaccuguacgaccacgcccucauguccaucaucagcaccuuccaccuguccauccccaacuucaaccaguacgaggccaugagcugcgacuucaacgggggcaagaucuccgugcaguacaaccugagccacuccuacgccaucgacgcggccaaccacugcgggacgguggccaacggcauccuccagaccuucaugcgcauggccuggggcgggagcuacaucgcgcuggacuccggccgggggaacugggacugcaucaugaccagcuaccaguaccugaucauccagaacaccacgugggagaaccacugccaguucucccgccccagccccaucggcuaccucgggcugcugagccagcggacccgcgacaucuacaucucccggcgccuccugggcaccuucaccuggacgcugagcgacuccgagggcaacgccacccccgggggcuacugccucacccgguggaugcugaucgaggccgagcugaagugcuucgggaacaccgccgucgccaagugcaacgagaagcacgacgaggaguucugcgacaugcuccgccuguucgacuucugcaagcaggcgaucagccggcugaaguccccggcccagaugagcauccagcucaucaacaaggccgugaacgcccugaucaacgaccagcugaucaugaagaaccaccuccgcgacaucaugggcauccccuacugcaacuacuccaaguacugcuaccugaaccacacgaucaccgggaagaccagccugcccaagugcugccucguguccaacggcagcuaccugaacgagacccacuucuccgacgacaucgagcagcaggccgacaacaugaucacggagaugcugcagaaggaguacauggagcggcagggcaagaccccgcuggggcucgucgaccuguucguguucagcaccuccuucuaccugaucagcaucuuccuccgccuggugaagauccccacccaccggcacaucgucggcaagcccugccccaagccgcaccgccugaaccacauggggaucugcuccugcggccucuacaagcagcccggggugcccgugcgguggaagcgcugaggacuagucccuguucccagagcccacuuuuuuuucuuuuuuugaaauaaaauagccugucuuucagaucucaaaggcucuuuucagagccaccaaaaaaaaaaaaaaaaaaaaaaaaaaaaaaaaaaaaaaaaaaaaaaaaaaaaaaaaaaaaaaaaaaaaaaaaaaaaaaaaaaaaaaaaaaaaaaaaaaaaa

SEQ ID NO: 33834 - RNA, 1764 nt, Artificial Sequence
  mRNA product Design a-2 (hSL-A100) comprising derived and/or modified sequence from LASV(Togo/2016/7082;Clade VI)__AMR44577__GPCmut8 (opt1)
aggagaguccgcucagccagguugcagaagcggcuuagcguguguccuaaucuucucucugcguguagguaggccugugccgcaaacaagcuuaccaugggccagaucaucaccuucuuccaggaggugccccacgucaucgaggaggugaugaacaucgugcugaucgcccucagccugcuggccauccucaagggggucuacaacguggcgaccugcggcaucaucgggcuggugacguuccuguuccucugcggccgcuccugcagccugaucuacaagggguccuacgagcugcagacccucgagcugaacauggagacccugaacaugugcaugccgcucagcugcaccaagaacuccagccaccacuacauccgggucggcaacgagacgggccuggagcugacccucaccaacaccuccaucaucaaccacaaguucugcaaccugagcgacgcccacaagcgcaaccuguacgaccacgcccucauguccauccugagcacguuccaccuguccauccccaacuucaaccaguacgaggccaugagcugcgacuucaacgggggcaagaucuccgugcaguacaaccucagccacgccuacgcgguggacgccgccgagcacugcgggaccgucgccaacggcgugcugcagaccuucaugcggauggcguggggcggguccuacaucgcccuggacagcggccgcgggaacugggacugcaucaugaccuccuaccaguaccucaucauccagaacacgaccugggaggaccacugccaguucagccggcccucccccaucggcuaccuggggcugcucagccagcgcacccgggacaucuacaucagccgccggcugcugggcaccuucacguggacccucuccgacagcgagggcaacgagacccccgggggcuacugccugacccgcuggaugcugaucgaggccgagcucaagugcuucgggaacacggccguggccaagugcaacgagaagcacgacgaggaguucugcgacaugcugcggcuguucgacuucugcaagcaggcgauccagcgccucaaguccccggcccagaugagcauccagcugaucaacaaggccgucaacgcccugaucaacgaccagcucaucaugaagaaccaccuccgggacaugaugggcauccccuacugcaacuacuccaaguacugcuaccugaaccacaccagcuccgggcgcaccagccugcccaagugcugccugguguccaacggcagcuaccugaacgagacccacuucuccgacgacaucgagcagcaggccgacaacaugaucacggagaugcuccagaaggaguacaucgaccggcagggcaagaccccgcuggggcugguggaccuguucgucuucagcaccuccuucuaccucaucagcaucuuccugcaccugaucaagauccccacccaccgccacaucgugggcaagcccugccccaagccgcaccggcucaaccacauggggaucugcuccugcggccuguacaagcagcccggggugcccacgcgcuggaagcggugaggacuagucccuguucccagagcccacuuuuuuuucuuuuuuugaaauaaaauagccugucuuucagaucucaaaggcucuuuucagagccaccaaaaaaaaaaaaaaaaaaaaaaaaaaaaaaaaaaaaaaaaaaaaaaaaaaaaaaaaaaaaaaaaaaaaaaaaaaaaaaaaaaaaaaaaaaaaaaaaaaaaa

SEQ ID NO: 33835 - RNA, 1764 nt, Artificial Sequence
  mRNA product Design a-2 (hSL-A100) comprising derived and/or modified sequence from LASV(KAK-428;Clade n.d. (VII))__ANH09740__GPCmut8 (opt1)
aggagaguccgcucagccagguugcagaagcggcuuagcguguguccuaaucuucucucugcguguagguaggccugugccgcaaacaagcuuaccaugggccagaucgugaccuucuuccaggaggucccccacgugaucgaggaggugaugaacaucguccugaucgcccucagccugcuggccauccucaaggggcuguacaacuucgcgaccugcggcgugaucgggcugaucacguuccuccugcugugcggccgcuccugcagcgccaccuacaaggggcaguacgagcuccagacccuggagcugaacauggagucccucaacaugugcaugccgcugagcugcaccaagaacaacucccaccacuacauccgggccggcaacaacacgggccuggagcucacccugaccaacaccagcaucaucucccacaaguucugcaaccugagcgacgcccacaagaagaaccucuacgaccacacgcugauguccaucaucaccaccuuccaccugagcauccccaacuucaaccaguacgaggccauguccugcgacuucaacgggggcaagaucagcauccaguacaaccucucccacagcuacgcgggggacgccgcccagcacugcggcaccguggccaacgggguccugcagacguucaugcgcauggcguggggcggcuccuaccuggcccucgacagcgggcggcgcggcugggacugcaucaucuccagcuaccaguaccugaucauccagaacaccaccugggacgaccacugccaguucucccggcccagccccaucggguaccugggcuucgugagccagaagacccgcgacaucuacaucucccggcgccuccugggcacguucaccuggacccugagcgacuccgaggggcacgacaugccgggcggguacugccucacccgguggaugcugaucgaggccgaccugaagugcuucggcaacacggccguggccaagugcaacgagaagcacgacgaggaguucugcgacauguggcgccucuucgacuucugcaagcaggcgauccagcggcugaaggcccccgcccagaugaacauccagcugaucaacaaggccgucaacgcccucaucaacgaccagcugaugaugaagaaccaccuccgcgacaucauggggauccccuacugcaacuacagcaaguucugcuaccugaacaacaccaccaccggccggacgucccugccccgcugcugccugaucagcaacggcuccuaccucaacgagacccacuucagcgacgacaucgagcagcaggcggacaacaugaucaccgagaugcugcagaaggaguacauggaccggcaggggaagaccccgcugggccucguggaccuguucguguucuccacgagcuucuaccugaucaccaucuuccugcaccucgucaagauccccacccaccgccacaucguggggaagcccugccccaagccgcaccggcugaaccacaugggcaucugcuccugcgggcuguacaagcagcccggcgugcccguccgcuggaagcggugaggacuagucccuguucccagagcccacuuuuuuuucuuuuuuugaaauaaaauagccugucuuucagaucucaaaggcucuuuucagagccaccaaaaaaaaaaaaaaaaaaaaaaaaaaaaaaaaaaaaaaaaaaaaaaaaaaaaaaaaaaaaaaaaaaaaaaaaaaaaaaaaaaaaaaaaaaaaaaaaaaaaa

SEQ ID NO: 33836 - RNA, 1764 nt, Artificial Sequence; identical to SEQ ID NO: 33830
  mRNA product Design a-2 (hSL-A100) comprising derived and/or modified sequence from LASV(Pinneo-NIG-1969;Clade I)__AIT17836__GPCmut8 (opt1)

SEQ ID NO: 33837 - RNA, 1764 nt, Artificial Sequence
  mRNA product Design a-2 (hSL-A100) comprising derived and/or modified sequence from LASV(ISTH0009-NIG-2011;Clade II)__AIT17404__GPCmut8 (opt1)
aggagaguccgcucagccagguugcagaagcggcuuagcguguguccuaaucuucucucugcguguagguaggccugugccgcaaacaagcuuaccaugggccagaucaucaccuucuuccaggaggugccccacgucaucgaggaggugaugaacaucgugcugaucgcccucagccugcuggccauccucaaggggaucuacaacgucgcgaccugcggccuguucgggcugguguccuuccuccugcugugcggccgcagcugcuccacgaccuacaaggggguguacgagcuccagacccuggagcuggacauggccagccucaacaugugcaugccgcuguccugcaccaagaacaacagccaccacuacaucauggucggcaacgagacgggccuggagcucacccugaccaacaccuccaucaucaaccacaaguucugcaaccugagcgacgcccacaagaagaaccucuacgaccacgcccugauguccaucaucagcacguuccaccuguccauccccaacuucaaccaguacgaggccaugagcugcgacuucaacgggggcaagaucuccgugcaguacaaccucagccacgcguacgccguggacgccgccaaccacugcgggaccaucgcgaacggcguccugcagaccuucaugcggauggccuggggcggguccuacaucgcccuggacagcggcaagggguccugggacugcaucaugaccagcuaccaguaccucaucauccagaacacgaccugggaggaccacugccaguucucccgccccagccccaucggcuaccuggggcugcucagccagcggacccgcgacaucuacaucucccggcgccugcugggcaccuucacguggacccucagcgacuccgagggcaacgagacccccgggggcuacugccugacccgguggaugcugaucgaggccgagcucaagugcuucgggaacacggccguggcgaagugcaacgagaagcacgacgaggaguucugcgacaugcugcgccuguucgacuucugcaagcaggccauccggcgccucaagaccccggcccagaugagcauccagcugaucaacaaggccgugaacgcccugaucaacgaccagcucaucaugaagaaccaccuccgggacaucaugggcauccccuacugcaacuacuccaaguacugcuaccugaaccacaccgucaccgggaagacgagccugccccgcugcugccugguguccaacggcagcuaccugaacgagacccacuucuccgacgacaucgagcagcaggcggacaacaugaucaccgagcuccugcagaaggaguacauggaccggcagggcaagaccccgcuggggcugguggaccucuucgucuucagcacguccuucuaccugaucagcaucuuccugcaccucaucaagauccccacccaccgccacaucaccggcaagcccugccccaagccgcaccggcugaaccacauggggaucugcuccugcggccuguacaagcaccccggggugcccgugaaguggaagcgcugaggacuagucccuguucccagagcccacuuuuuuuucuuuuuuugaaauaaaauagccugucuuucagaucucaaaggcucuuuucagagccaccaaaaaaaaaaaaaaaaaaaaaaaaaaaaaaaaaaaaaaaaaaaaaaaaaaaaaaaaaaaaaaaaaaaaaaaaaaaaaaaaaaaaaaaaaaaaaaaaaaaaa

SEQ ID NO: 33838 - RNA, 1764 nt, Artificial Sequence
  mRNA product Design a-2 (hSL-A100) comprising derived and/or modified sequence from LASV(ISTH2010-NIG-2012;Clade II)__AIT17482__GPCmut8 (opt1)
aggagaguccgcucagccagguugcagaagcggcuuagcguguguccuaaucuucucucugcguguagguaggccugugccgcaaacaagcuuaccaugggccagaucaucaccuucuuccaggaggugccccacgucaucgaggaggugaugaacaucgugcugaucgcccucagccugcuggccauccucaaggggaucuacaacgucgcgaccugcggccuguucgggcugguguccuuccuccugcugugcggccgcagcugcuccacgaccuacaaggggguguacgagcuccagacccuggagcuggacauggccagccucaacaugugcaugccgcuguccugcaccaagaacaacagccaccacuacaucauggucggcaacgagacgggccuggagcucacccugaccaacaccuccaucaucaaccacaaguucugcaaccugagcgacgcccacaagaagaaccucuacgaccacgcccugauguccaucaucagcacguuccaccuguccauccccaacuucaaccaguacgaggccaugagcugcgacuucaacgggggcaagaucuccgugcaguacaaccucagccacgcguacgccguggacgccgccaaccacugcgggaccaucgcgaacggcguccugcagaccuucaugcggauggccuggggcggguccuacaucgcccuggacagcggcaagggguccugggacugcaucaugaccagcuaccaguaccucaucauccagaacaucacgugggaggaccacugccaguucucccgccccagccccaucggcuaccuggggcugcucagccagcggacccgcgacaucuacaucucccggcgccugcugggcaccuucaccuggacgcucagcgacuccgagggcaacgagacccccgggggcuacugccugacccgguggaugcugaucgaggccgagcucaagugcuucgggaacaccgccguggcgaagugcaacgagaagcacgacgaggaguucugcgacaugcugcgccuguucgacuucugcaagcaggccauccggcgccucaagacgccggcccagaugagcauccagcugaucaacaaggccgugaacgcccugaucaacgaccagcucaucaugaagaaccaccuccgggacaucaugggcauccccuacugcaacuacuccaaguacugcuaccugaaccacaccgucaccgggaagaccagccugccccgcugcugccugguguccaacggcagcuaccugaacgagacgcacuucuccgacgacaucgagcagcaggcggacaacaugaucaccgagcuccugcagaaggaguacaucgaccggcagggcaagaccccgcuggggcugguggaccucuucgucuucagcaccuccuucuaccugaucagcaucuuccugcaccucgugaagauccccacgcaccgccacguggucggcaagcccugccccaagccgcaccggcugaaccacauggggaucugcuccugcggccuguacaagcaccccggggugcccgugaaguggaagcgcugaggacuagucccuguucccagagcccacuuuuuuuucuuuuuuugaaauaaaauagccugucuuucagaucucaaaggcucuuuucagagccaccaaaaaaaaaaaaaaaaaaaaaaaaaaaaaaaaaaaaaaaaaaaaaaaaaaaaaaaaaaaaaaaaaaaaaaaaaaaaaaaaaaaaaaaaaaaaaaaaaaaaa

SEQ ID NO: 33839 - RNA, 1764 nt, Artificial Sequence
  mRNA product Design a-2 (hSL-A100) comprising derived and/or modified sequence from LASV(Lassa virus/H.sapiens-wt/NGA/2015/ISTH_0543;Clade II)__AVO03639__GPCmut8 (opt1)
aggagaguccgcucagccagguugcagaagcggcuuagcguguguccuaaucuucucucugcguguagguaggccugugccgcaaacaagcuuaccaugggccagaucaucaccuucuuccaggaggugccccacgucaucgaggaggugaugaacaucgugcugaucgcccucagccugcuggccauccucaaggggaucuacaacgucgcgaccugcggccuguucgggcugguguccuuccuccugcugugcggccgcagcugcuccacgaccuacaaggggguguacgagcuccagacccuggagcuggacauggccaaccucaacaugugcaugccgcugagcugcaccaagaacaacucccaccacuacaucauggucggcaacgagacgggccuggagcucacccugaccaacaccagcaucaucaaccacaaguucugcaaccuguccgacgcccacaagaagaaccucuacgaccacgcccugaugagcaucaucuccacguuccaccugagcauccccaacuucaaccaguacgaggccauguccugcgacuucaacgggggcaagaucagcgugcaguacaaccucucccacaccuacgcgguggacgccgccaaccacugcgggaccaucgccaacggcguccugcagaccuucaugcggauggcguggggcgggagcuacaucgcccuggacuccggcaaggggagcugggacugcaucaugacguccuaccaguaccucgugauccagaacaccaccugggaggaccacugccaguucagccgccccucccccaucggcuaccuggggcugcucagccagcggacccgcgacaucuacaucagccggcgccugcugggcacguucaccuggacccucuccgacagcgagggcaacgagacccccgggggcuacugccugacgcgguggaugcugaucgaggccgagcucaagugcuucgggaacaccgccguggccaagugcaacgagaagcacgacgaggaguucugcgacaugcugcgccuguucgacuucugcaagcaggcgauccggcgccucaagaccccggcccagauguccauccagcugaucaacaaggccgucaacgcccugaucaacgaccagcucaucaugaagaaccaccuccgggacaucaugggcauccccuacugcaacuacagcaaguacugcuaccugaaccacaccgugacggggaagaccucccugccccgcugcugccuggugagcaacggcuccuaccugaacgagacccacuucagcgacgacaucgagcagcaggccgacaacaugaucaccgagcuccugcagaaggaguacaucgaccggcagggcaagacgccgcuggggcuggucgaccucuucguguucuccaccagcuucuaccugaucuccaucuuccugcaccucgugaagauccccacccaccgccacaucaccggcaagcccugccccaagccgcaccggcugaaccacauggggaucugcagcugcggccuguacaagcaccccgggguccccgugaaguggaagcgcugaggacuagucccuguucccagagcccacuuuuuuuucuuuuuuugaaauaaaauagccugucuuucagaucucaaaggcucuuuucagagccaccaaaaaaaaaaaaaaaaaaaaaaaaaaaaaaaaaaaaaaaaaaaaaaaaaaaaaaaaaaaaaaaaaaaaaaaaaaaaaaaaaaaaaaaaaaaaaaaaaaaaa

SEQ ID NO: 33840 - RNA, 1764 nt, Artificial Sequence
  mRNA product Design a-2 (hSL-A100) comprising derived and/or modified sequence from LASV(Lassa virus/H.sapiens-wt/NGA/2016/ISTH_0009;Clade II)__AVO03571__GPCmut8 (opt1)
aggagaguccgcucagccagguugcagaagcggcuuagcguguguccuaaucuucucucugcguguagguaggccugugccgcaaacaagcuuaccaugggccagaucaucaccuucuuccaggaggugccccacgucaucgaggaggugaugaacaucgugcugaucgcccucagccugcuggccauccucaaggggaucuacaacgucgcgaccugcggccugcuggggcucguguccuuccugcugcucugcggccgcagcugcuccacgaccuacaaggggguguacgagcugcagacccuggagcucgacauggccagccugaacaugugcaugccgcuguccugcaccaagaacaacagccaccacuacaucauggucggcaacgagacgggccucgagcugacccugaccaacaccuccaucaucaaccacaaguucugcaaccucagcgacgcccacaagaagaaccuguacgaccacgcccugauguccaucaucagcacguuccaccucuccauccccaacuucaaccaguacgaggccaugagcugcgacuucaacgggggccggaucuccgugcaguacaaccugagccacuccuacgcgguggacgccgccaaccacugcgggaccaucgccaacggcguccugcagaccuucaugcgcauggcguggggcgggagcuacaucgcccucgacuccggcaaggggagcugggacugcaucaugaccuccuaccaguaccugaucauccagaacacgaccugggaggaccacugccaguucagccggcccagccccaucggcuaccuggggcuccugucccagcgcacccgggacaucuacaucagccgccggcugcucggcaccuucacguggacccuguccgacagcgagggcaacgagacccccgggggcuacugccugacccgcuggaugcucaucgaggccgagcugaagugcuucgggaacacggccguggccaagugcaacgagaagcacgacgaggaguucugcgacaugcugcggcuguucgacuucugcaagcaggcgauccgccggcugaagaccccggcccagauguccauccagcugaucaacaaggccgugaacgcccucaucaacgaccagcugaucaugaagaaccaccuccgcgacaucaugggcauccccuacugcaacuacagcaaguacugcuaccucaaccacaccgucaccgggaagacgucccugccccggugcugccuggugagcaacggcuccuaccucaacgagacccacuucagcgacgacaucgagcagcaggccgacaacaugaucaccgagcugcugcagaaggaguacaucgaccgccagggcaagaccccgcuggggcucguggaccuguucgucuucuccacgagcuucuaccugaucuccaucuuccuccaccuggugaagauccccacccaccggcacaucaccggcaagcccugccccaagccgcaccgccugaaccacauggggaucugcagcugcggccucuacaaccaccccggggugcccgucaaguggaagcggugaggacuagucccuguucccagagcccacuuuuuuuucuuuuuuugaaauaaaauagccugucuuucagaucucaaaggcucuuuucagagccaccaaaaaaaaaaaaaaaaaaaaaaaaaaaaaaaaaaaaaaaaaaaaaaaaaaaaaaaaaaaaaaaaaaaaaaaaaaaaaaaaaaaaaaaaaaaaaaaaaaaaa

SEQ ID NO: 33841 - RNA, 1764 nt, Artificial Sequence
  mRNA product Design a-2 (hSL-A100) comprising derived and/or modified sequence from LASV(Lassa virus/H.sapiens-wt/NGA/2016/ISTH_0017;Clade II)__AVO03567__GPCmut8 (opt1)
aggagaguccgcucagccagguugcagaagcggcuuagcguguguccuaaucuucucucugcguguagguaggccugugccgcaaacaagcuuaccaugggccagaucaucaccuucuuccaggaggugccccacgucaucgaggaggugaugaacaucgugcugaucgcccucagccugcuggccauccucaaggggaucuacaacgucgcgaccugcggccuguucgggcugguguccuuccuccugcugugcggccgcagcugcuccacgaccuacaaggggguguacgagcuccagacccuggagcuggacauggccagccucaacaugugcaugccgcuguccugcaccaagaacaacagccaccacuacaucauggucggcaacgagacgggccuggagcucacccugaccaacaccuccaucaucaaccacaaguucugcaaccugagcgacgcccacaagaagaaccucuacgaccacgcccugauguccaucaucagcacguuccaccuguccauccccaacuucaaccaguacgaggccaugagcugcgacuucaacgggggcaagaucuccgugcaguacaaccucagccacaccuacgcgaucgacgccgccaaccacugcgggaccaucgccaacggcgugcugcagaccuucaugcggauggcguggggcggguccuacaucgcccuggacagcggcaagggguccugggacugcaucaugacgagcuaccaguaccucaucauccagaacaccaccugggaggaccacugccaguucucccgccccagccccaucggcuaccuggggcugcucagccagcggacccgcgacaucuacaucucccggcgccugcugggcacguucaccuggacccucagcgacuccgagggcaacgagacccccgggggcuacugccugacgcgguggaugcugaucgaggccgagcucaagugcuucgggaacaccgccgucgccaagugcaacgagaagcacgacgaggaguucugcgacaugcugcgccuguucgacuucugcaagcaggcgauccggcgccucaagaccccggcccagaugagcauccagcugaucaacaaggccgugaacgcccugaucaacgaccagcucaucaugaagaaccaccuccgggacaucaugggcauccccuacugcaacuacuccaaguacugcuaccugaaccacaccgugacggggaagaccagccugccccgcugcugccuggucuccaacggcagcuaccugaacgagacccacuucuccgacgacaucgagcagcaggccgacaacaugaucaccgagcuccugcagaaggaguacauggaccggcagggcaagacgccgcuggggcugguggaccucuucguguucagcaccuccuucuaccugaucagcaucuuccugcaccucguccgcauccccacccaccggcacgugaucggcaagcccugccccaagccgcaccgccugaaccacauggggaucugcuccugcggccuguacaagcaccccggggugcccgucaaguggaagcggugaggacuagucccuguucccagagcccacuuuuuuuucuuuuuuugaaauaaaauagccugucuuucagaucucaaaggcucuuuucagagccaccaaaaaaaaaaaaaaaaaaaaaaaaaaaaaaaaaaaaaaaaaaaaaaaaaaaaaaaaaaaaaaaaaaaaaaaaaaaaaaaaaaaaaaaaaaaaaaaaaaaaa

SEQ ID NO: 33842 - RNA, 1764 nt, Artificial Sequence
  mRNA product Design a-2 (hSL-A100) comprising derived and/or modified sequence from LASV(Lassa virus/H.sapiens-wt/NGA/2018/ISTH_0959;Clade II)__AVV65099__GPCmut8 (opt1)
aggagaguccgcucagccagguugcagaagcggcuuagcguguguccuaaucuucucucugcguguagguaggccugugccgcaaacaagcuuaccaugggccagaucaucaccuucuuccaggaggugccccacgucaucgaggaggugaugaacaucgugcugaucgcccucagccugcuggccauccucaaggggaucuacaacgucgugaccugcggccuguucgggcugguguccuuccuccugcugugcggccgcagcugcuccacgaccuacaagggggucuacgagcuccagacccuggagcuggacauggcgagccucaacaugugcaugccgcuguccugcaccaagaacaacagccaccacuacaucauggugggcaacgagacgggccuggagcucacccugaccaacaccuccaucaucaaccacaaguucugcaaccugagcgacgcccacaagaagaaccucuacgaccacgcccugauguccaucaucagcacguuccaccuguccauccccaacuucaaccaguacgaggccaugagcugcgacuucaacgggggcaagaucuccgugcaguacaaccucagccacgccuacgcgaucgacgccgccaaccacugcgggaccaucgccaacggcguccugcagaccuucaugcggauggcguggggcggguccuacaucgcccuggacagcggcaagggguccugggacugcaucaugaccagcuaccaguaccucaucauccagaacacgaccugggaggaccacugccaguucucccgccccagccccaucggcuaccuggggcugcucagccagcggacccgcgacaucuacaucucccggcgccugcugggcaccuucacguggacccucagcgacuccgagggcaacgagacccccgggggcuacugccugacccgguggaugcugaucgaggccgagcucaagugcuucgggaacacggccguggccaagugcaacgagaagcacgacgaggaguucugcgacaugcugcgccuguucgacuucugcaagcaggcgauccggcgccucaagaccccggcccagaugagcauccagcugaucaacaaggccgugaacgcccugaucaacgaccagcucaucaugaagaaccaccuccgggacaucaugggcauccccuacugcaacuacuccaaguacugcuaccugaaccacaccgucaccgggaagacgagccugccccgcugcugccugguguccaacggcagcuaccugaacgagacccacuucuccgacgacaucgagcagcaggccgacaacaugaucaccgagcuccugcagaaggaguacaucgaccggcagggcaagaccccgcuggggcugguggaccucuucgucuucagcacguccuucuaccugaucagcaucuuccugcaccucgugaagauccccacccaccgccacgugaucggcaagcccugccccaagccgcaccggcugaaccacauggggaucugcuccugcggccuguacaagcaccccgggguccccgugaaguggaagcgcugaggacuagucccuguucccagagcccacuuuuuuuucuuuuuuugaaauaaaauagccugucuuucagaucucaaaggcucuuuucagagccaccaaaaaaaaaaaaaaaaaaaaaaaaaaaaaaaaaaaaaaaaaaaaaaaaaaaaaaaaaaaaaaaaaaaaaaaaaaaaaaaaaaaaaaaaaaaaaaaaaaaaa

SEQ ID NO: 33843 - RNA, 1764 nt, Artificial Sequence
  mRNA product Design a-2 (hSL-A100) comprising derived and/or modified sequence from LASV(LASV003-NIG-2008;Clade II)__AIT17580__GPCmut8 (opt1)
aggagaguccgcucagccagguugcagaagcggcuuagcguguguccuaaucuucucucugcguguagguaggccugugccgcaaacaagcuuaccaugggccagaucaucaccuucuuccaggaggugccccacgucaucgaggaggugaugaacaucgugcugaucgcccucagccugcuggccauccucaaggggaucuacaacgucgcgaccugcggccuguucgggcugguguccuuccuccugcugugcggccgcagcugcuccacgaccuacaaggggguguacgagcuccagacccuggagcuggacauggccagccucaacaugugcaugccgcuguccugcaccaagaacaacagccaccacuacaucauggucggcaacgagacgggccuggagcucacccugaccaacaccuccaucaucaaccacaaguucugcaaccugagcgacgcccacaagaagaaccucuacgaccacgcccugauguccaucaucagcacguuccaccuguccauccccaacuucaaccaguacgaggccaugagcugcgacuucaacgggggcaagaucuccgugcaguacaaccucagccacaccuacgcgguggacgccgccaaccacugcgggaccaucgccaacggcguccugcagaccuucaugcggauggcguggggcggguccuacaucgcccuggacagcggcaagggguccugggacugcaucaugacgagcuaccaguaccucaucauccagaacaccaccugggaggaccacugccaguucucccgccccagccccaucggcuaccuggggcugcucagccagcggacccgcgacaucuacaucucccggcgccugcugggcacguucaccuggacccucagcgacuccgagagcaacgagaccccgggcggguacugccugacgcgguggaugcugaucgaggccgagcucaagugcuucggcaacaccgccguggccaagugcaacgagaagcacgacgaggaguucugcgacaugcugcgccuguucgacuucugcaagcaggcgauccggcgccucaaggcccccgcccagauguccauccagcugaucaacaaggccgugaacgcccugaucaacgaccagcucaucaugaagaaccaccuccgggacaucauggggauccccuacugcaacuacagcaaguacugcuaccugaaccacaccgucaccggccgcacgucccugccccggugcugccuggugagcaacggguccuaccugaacgagacccacuucagcgacgacaucgagcagcaggcggacaacaugaucaccgagcuccugcagaaggaguacauggaccgccagggcaagaccccgcugggccugguggaccucuucgucuucuccacgagcuucuaccugaucuccaucuuccugcaccucgugaagauccccacccaccggcacgugaucgggaagcccugccccaagccgcaccgccugaaccacaugggcaucugcagcugcgggcuguacaagcaccccggcguccccgugaaguggaagcggugaggacuagucccuguucccagagcccacuuuuuuuucuuuuuuugaaauaaaauagccugucuuucagaucucaaaggcucuuuucagagccaccaaaaaaaaaaaaaaaaaaaaaaaaaaaaaaaaaaaaaaaaaaaaaaaaaaaaaaaaaaaaaaaaaaaaaaaaaaaaaaaaaaaaaaaaaaaaaaaaaaaaa

SEQ ID NO: 33844 - RNA, 1764 nt, Artificial Sequence
  mRNA product Design a-2 (hSL-A100) comprising derived and/or modified sequence from LASV(LASV035-NIG-2009;Clade II)__AIT17588__GPCmut8 (opt1)
aggagaguccgcucagccagguugcagaagcggcuuagcguguguccuaaucuucucucugcguguagguaggccugugccgcaaacaagcuuaccaugggccagaucaucaccuucuuccaggaggugccccacgucaucgaggaggugaugaacaucgugcugaucgcccucagccugcuggccauccucaaggggaucuacaacgucgcgaccugcggccuguucgggcugguguccuuccuccugcugugcggccgcagcugcuccacgaccuacaaggggguguacgagcuccagacccuggagcuggacauggccagccucaacaugugcaugccgcuguccugcaccaagaacaacagccaccacuacaucauggucggcaacgagacgggccuggagcucacccugaccaacaccuccaucaucaaccacaaguucugcaaccugagcgacgcccacaagaagaaccucuacgaccacgcccugauguccaucaucagcacguuccaccuguccauccccaacuucaaccaguacgaggccaugagcugcgacuucaacgggggcaagaucuccgugcaguacaaccucagccacgcguacgccguggacgccgccaaccacugcgggaccaucgcgaacggcguccugcagaccuucaugcggauggccuggggcggguccuacaucgcccuggacagcggcaagggguccugggacugcaucaugaccagcuaccaguaccucaucauccagaacacgaccugggaggaccacugccaguucucccgccccagccccaucggcuaccuggggcugcucagccagcggacccgcgacaucuacaucucccggcgccugcugggcaccuucacguggacccucagcgacuccgagggcaacgagacccccgggggcuacugccugacccgguggaugcugaucgaggccgagcucaagugcuucgggaacacggccguggcgaagugcaacgagaagcacgacgaggaguucugcgacaugcugcgccuguucgacuucugcaagcaggccauccggcgccucaaggccccggcccagaugagcauccagcugaucaacaaggccgugaacgcgcugaucaacgaccagcucaucaugaagaaccaccuccgggacaucaugggcauccccuacugcaacuacuccaaguacugcuaccugaaccacaccgucaccgggaagaccagccugccccgcugcugccugguguccaacggcagcuaccugaacgagacgcacuucuccgacgacaucgagcagcaggccgacaacaugaucaccgagcuccugcagaaggaguacaucgaccggcagggcaagaccccgcuggggcugguggaccucuucgucuucagcaccuccuucuaccugaucagcaucuuccugcaccucgugaagauccccacgcaccgccacgugaucggcaagcccugccccaagccgcaccggcugaaccacauggggaucugcuccugcggccuguacaagcaccccgggguccccgugaaguggaagcgcugaggacuagucccuguucccagagcccacuuuuuuuucuuuuuuugaaauaaaauagccugucuuucagaucucaaaggcucuuuucagagccaccaaaaaaaaaaaaaaaaaaaaaaaaaaaaaaaaaaaaaaaaaaaaaaaaaaaaaaaaaaaaaaaaaaaaaaaaaaaaaaaaaaaaaaaaaaaaaaaaaaaaa

SEQ ID NO: 33845 - RNA, 1764 nt, Artificial Sequence
  mRNA product Design a-2 (hSL-A100) comprising derived and/or modified sequence from LASV(LASV1000-NIG-2009;Clade II)__AIT17782__GPCmut8 (opt1)
aggagaguccgcucagccagguugcagaagcggcuuagcguguguccuaaucuucucucugcguguagguaggccugugccgcaaacaagcuuaccaugggccagaucaucaccuucuuccaggaggugccccacgucaucgaggaggugaugaacaucgugcugaucgcccucagccugcuggccauccucaaggggaucuacaacgucgcgaccugcggccuguucgggcugguguccuuccuccugcugugcggccgcagcugcuccacgaccuacaaggggguguacgagcuccagacccuggagcuggacauggccagccucaacaugugcaugccgcuguccugcaccaagaacaacagccaccacuacaucauggucggcaacgagacgggccuggagcucacccugaccaacaccuccaucaucaaccacaaguucugcaaccugagcgacgcccacaagaagaaccucuacgaccacgcccugauguccaucaucagcacguuccaccuguccauccccaacuucaaccaguacgaggccaugagcugcgacuucaacgggggcaagaucuccgugcaguacaaccucagccacaccuacgcgguggacgccgccaaccacugcgggaccaucgccaacggcguccugcagaccuucaugcggauggcguggggcggguccuacaucgcccuggacagcggcaagggguccugggacugcaucaugacgagcuaccaguaccucaucauccagaacaccaccugggaggaccacugccaguucucccgccccagccccaucggcuaccuggggcugcucagccagcggacccgcgacaucuacaucucccggcgccugcugggcacguucaccuggacccucagcgacuccgagggcaacgagacccccgggggcuacugccugacgcgguggaugcugaucgaggccgagcucaagugcuucgggaacaccgccguggccaagugcaacgagaagcacgacgaggaguucugcgacaugcugcgccuguucgacuucugcaagcaggcgaucaagcggcucaagaccccggcccagaugagcauccagcugaucaacaaggccgugaacgcccugaucaacgaccagcucaucaugaagaaccaccuccgcgacaucaugggcauccccuacugcaacuacuccaaguacugcuaccugaaccacaccgucacggggaagaccagccugccccggugcugccugguguccaacggcagcuaccugaacgagacccacuucuccgacgacaucgagcagcaggccgacaacaugaucaccgagcuccugcagaaggaguacaucgaccgccagggcaagacgccgcuggggcugguggaccucuucgucuucagcaccuccuucuaccugaucagcaucuuccugcaccucgugaagauccccacccaccggcacguggucggcaagcccugccccaagccgcaccgccugaaccacauggggaucugcuccugcggccuguacaagcaccccggggugcccgugaaguggaagcggugaggacuagucccuguucccagagcccacuuuuuuuucuuuuuuugaaauaaaauagccugucuuucagaucucaaaggcucuuuucagagccaccaaaaaaaaaaaaaaaaaaaaaaaaaaaaaaaaaaaaaaaaaaaaaaaaaaaaaaaaaaaaaaaaaaaaaaaaaaaaaaaaaaaaaaaaaaaaaaaaaaaaa

SEQ ID NO: 33846 - RNA, 1764 nt, Artificial Sequence
  mRNA product Design a-2 (hSL-A100) comprising derived and/or modified sequence from LASV(LASV221-NIG-2010;Clade II)__AIT17624__GPCmut8 (opt1)
aggagaguccgcucagccagguugcagaagcggcuuagcguguguccuaaucuucucucugcguguagguaggccugugccgcaaacaagcuuaccaugggccagaucaucaccuucuuccaggaggugccccacgucaucgaggaggugaugaacaucgugcugaucgcccucagccugcuggccauccucaaggggaucuacaacgucgcgaccugcggccuguucgggcugguguccuuccuccugcugugcggccgcagcugcuccacgaccuacaaggggguguacgagcuccagacccuggagcuggacauggccagccucaacaugugcaugccgcuguccugcaccaagaacaacagccaccacuacaucauggucggcaacgagacgggccuggagcucacccugaccaacaccuccaucaucaaccacaaguucugcaaccugagcgacgcccacaagaagaaccucuacgaccacgcccugauguccaucaucagcacguuccaccuguccauccccaacuucaaccaguacgaggccaugagcugcgacuucaacgggggcaagaucuccgugcaguacaaccucagccacaccuacgcgaucgacgccgccaaccacugcgggaccaucgccaacggcgugcugcagaccuucaugcggauggcguggggcggguccuacaucgcccuggacagcggcaagggguccugggacugcaucaugacgagcuaccaguaccucaucauccagaacaccaccugggaggaccacugccaguucucccgccccagccccaucggcuaccuggggcugcucagccagcggacccgcgacaucuacaucucccggcgccugcugggcacguucaccuggacccucagcgacuccgagggcaacgagacccccgggggcuacugccugacgcgguggaugcugaucgaggccgagcucaagugcuucgggaacaccgccgucgccaagugcaacgagaagcacgacgaggaguucugcgacaugcugcgccuguucgacuucugcaagcaggcgauccggcgccucaagaccccggcccagaugagcauccagcugaucaacaaggccgugaacgcccugaucaacgaccagcucaucaugaagaaccaccuccgggacaucaugggcauccccuacugcaacuacuccaaguacugcuaccugaaccacaccgugacggggaagaccagccugccccgcugcugccuggucuccaacggcagcuaccugaacgagacccacuucuccgacgacaucgagcagcaggccgacaacaugaucaccgagaugcuccagaaggaguacauggaccggcagggcaagacgccgcuggggcugguggaccuguucguguucagcaccuccuucuaccucaucagcaucuuccugcaccuggucaagauccccacccaccgccacgugaucggcaagcccugccccaagccgcaccggcucaaccacauggggaucugcuccugcggccuguacaagcaccccggggugcccgucaaguggaagcgcugaggacuagucccuguucccagagcccacuuuuuuuucuuuuuuugaaauaaaauagccugucuuucagaucucaaaggcucuuuucagagccaccaaaaaaaaaaaaaaaaaaaaaaaaaaaaaaaaaaaaaaaaaaaaaaaaaaaaaaaaaaaaaaaaaaaaaaaaaaaaaaaaaaaaaaaaaaaaaaaaaaaaa

SEQ ID NO: 33847 - RNA, 1764 nt, Artificial Sequence
  mRNA product Design a-2 (hSL-A100) comprising derived and/or modified sequence from LASV(LASV237-NIG-2010;Clade II)__AIT17638__GPCmut8 (opt1)
aggagaguccgcucagccagguugcagaagcggcuuagcguguguccuaaucuucucucugcguguagguaggccugugccgcaaacaagcuuaccaugggccagaucaucaccuucuuccaggaggugccccacgucaucgaggaggugaugaacaucgugcugaucgcccucagccugcuggccauccucaaggggaucuacaacgucgcgaccugcggccuguucgggcugguguccuuccuccugcugugcggccgcagcugcuccacgaccuacaaggggguguacgagcuccagacccuggagcuggacauggccagccucaacaugugcaugccgcuguccugcaccaagaacaacagccaccacuacaucauggucggcaacgagacgggccuggagcucacccugaccaacaccuccaucaucaaccacaaguucugcaaccugagcgacgcccacaagaaggaccucuacgaccacgcccugauguccaucaucagcacguuccaccuguccauccccaacuucaaccaguacgaggccaugagcugcgacuucaacgggggcaagaucuccgugcaguacaaccucagccacaccuacgcgguggacgccgccaaccacugcgggaccaucgccaacggcguccugcagaccuucaugcggauggcguggggcggguccuacaucgcccuggacagcggcaagggguccugggacugcaucaugacgagcuaccaguaccucaucauccagaacaccaccugggaggaccacugccaguucucccgccccagccccaucggcuaccuggggcugcucagccagcggacccgcgacaucuacaucucccggcgccugcugggcacguucaccuggacccucagcgacuccgagggcaacgagacccccgggggcuacugccugacgcgguggaugcugaucgaggccgagcucaagugcuucgggaacaccgccguggccaagugcaacgagaagcacgacgaggaguucugcgacaugcugcgccuguucgacuucugcaagcaggcgauccggcgccucaagaccccggcccagaugagcauccagcugaucaacaaggccgugaacgcccugaucaacgaccagcucaucaugaagaaccaccuccgggacaucaugggcauccccuacugcaacuacuccaaguacugcuaccugaaccacaccgucacggggaagaccagccugccccgcugcugccugguguccaacggcagcuaccugaacgagacccacuucuccgacgacaucgagcagcaggccgacaacaugaucaccgagcuccugcagaaggaguacauggaccggcagggcaagacgccgcuggggcugguggaccucuucgucuucagcaccuccuucuaccugaucagcaucuuccugcaccucaucaagauccccacccaccgccacaucaccggcaagcccugccccaagccgcaccggcugaaccacauggggaucugcuccugcggccuguacaagcaccccggggugcccgugaaguggaagcgcugaggacuagucccuguucccagagcccacuuuuuuuucuuuuuuugaaauaaaauagccugucuuucagaucucaaaggcucuuuucagagccaccaaaaaaaaaaaaaaaaaaaaaaaaaaaaaaaaaaaaaaaaaaaaaaaaaaaaaaaaaaaaaaaaaaaaaaaaaaaaaaaaaaaaaaaaaaaaaaaaaaaaa

SEQ ID NO: 33848 - RNA, 1764 nt, Artificial Sequence
  mRNA product Design a-2 (hSL-A100) comprising derived and/or modified sequence from LASV(LASV253-NIG-2011;Clade II)__AIT17670__GPCmut8 (opt1)
aggagaguccgcucagccagguugcagaagcggcuuagcguguguccuaaucuucucucugcguguagguaggccugugccgcaaacaagcuuaccaugggccagaucaucaccuucuuccaggaggugccccacgucaucgaggaggugaugaacaucgugcugaucgcccucagccugcuggccauccucaaggggaucuacaacgucgcgaccugcggccuguucgggcugguguccuuccuccugcugugcggccgcagcugcuccacgaccuacaaggggguguacgagcuccagacccuggagcuggacauggccagccucaacaugugcaugccgcuguccugcaccaagaacaacagccaccacuacaucauggucggcaacgagacgggccuggagcucacccugaccaacaccuccaucaucaaccacaaguucugcaaccugagcgacgcccacaagaagaaccucuacgaccacgcccugauguccaucaucagcacguuccaccuguccauccccaacuucaaccaguacgaggccaugagcugcgacuucaacgggggcaagaucuccgugcaguacaaccucagccacaccuacgcgguggacgccgccaaccacugcgggaccaucgccaacggcguccugcagaccuucaugcggauggcguggggcggguccuacaucgcccuggacagcggcaagggguccugggacugcaucaugacgagcuaccaguaccucaucauccagaacaccaccugggaggaccacugccaguucucccgccccagccccaucggcuaccuggggcugcucagccagcggacccgcgacaucuacaucucccggcgccugcugggcacguucaccuggacccucagcgacuccgagggcaacgagacccccgggggcuacugccugacgcgguggaugcugaucgaggccgagcucaagugcuucgggaacaccgccguggccaagugcaacgagaagcacgacgaggaguucugcgacaugcugcgccuguucgacuucugcaagcaggcgauccggcgccucaaggccccggcccagaugagcauccagcugaucaacaaggccgugaacgcccugaucaacgaccagcucaucaugaagaaccaccuccgggacaucaugggcauccccuacugcaacuacuccaaguacugcuaccugaaccacaccgucaccgggcgcacgagccugccccggugcugccugguguccaacggcagcuaccugaacgagacccacuucuccgacgacaucgagcagcaggcggacaacaugaucaccgagcuccugcagaaggaguacaucgaccgccagggcaagaccccgcuggggcugguggaccucuucgucuucagcacguccuucuaccugaucagcaucuuccugcaccucgugaagauccccacccaccggcacaucaucggcaagcccugccccaagccgcaccgccugaaccacauggggaucugcuccugcggccuguacaagcaccccggggugcccgucaaguggaagcggugaggacuagucccuguucccagagcccacuuuuuuuucuuuuuuugaaauaaaauagccugucuuucagaucucaaaggcucuuuucagagccaccaaaaaaaaaaaaaaaaaaaaaaaaaaaaaaaaaaaaaaaaaaaaaaaaaaaaaaaaaaaaaaaaaaaaaaaaaaaaaaaaaaaaaaaaaaaaaaaaaaaaa

SEQ ID NO: 33849 - RNA, 1764 nt, Artificial Sequence
  mRNA product Design a-2 (hSL-A100) comprising derived and/or modified sequence from LASV(LASV254-NIG-2011;Clade II)__AIT17674__GPCmut8 (opt1)
aggagaguccgcucagccagguugcagaagcggcuuagcguguguccuaaucuucucucugcguguagguaggccugugccgcaaacaagcuuaccaugggccagaucaucaccuucuuccaggaggugccccacgucaucgaggaggugaugaacaucgugcugaucgcccucagccugcuggccauccucaaggggaucuacaacgucgcgaccugcggccuguucgggcugguguccuuccuccugcugugcggccgcagcugcuccacgaccuacaaggggguguacgagcuccagacccuggagcuggacaugaccaaccucaacaugugcaugccgcugagcugcacgaagaacaacucccaccacuacaucauggucggcaacgagaccggccuggagcucacccugaccaacacgagcaucaucaaccacaaguucugcaaccuguccgacgcccacaagaagaaccucuacaaccacgcccugaugagcaucaucuccaccuuccaccugagcauccccaacuucaaccaguacgaggccauguccugcgacuucaacgggggcaagaucagcgugcaguacaaccucucccacagcuacgccguggacgcggccaaccacugcgggaccaucgccaacggcguccugcagaccuucaugcggauggccuggggcggguccuacaucgcgcuggacagcggcaaggggaacugggacugcaucaugacguccuaccaguaccucaucauccagaacaccaccugggaggaccacugccaguucagccgccccucccccaucggcuaccuggggcugcucagccagcggacccgcgacaucuacaucagccggcgccugcugggcacguucaccuggacccucuccgacagcgagggcaacgagacccccgggggcuacugccugacgcgguggaugcugaucgaggccgagcucaagugcuucgggaacaccgccguggccaagugcaacgagaagcacgacgaggaguucugcgacaugcugcgccuguucgacuucugcaagcaggccauccggcgccucaagaccccggcgcaggccaacauccagcugaucaacaaggccgugaacgcccugaucaacgaccagcucaucaugaagaaccaccuccgggacaucaugggcauccccuacugcaacuacuccaaguacugcuaccugaaccacaccgucacggggaagaccagccugccccgcugcugccugguguccaacggcagcuaccugaacgagacccacuucuccgacgacaucgagcagcaggccgacaacaugaucaccgagcuccugcagaaggaguacauggaccggcagggcaagacgccgcuggggcugguggaccucuucgucuucagcaccuccuucuaccugaucagcaucuuccugcaccucgugaagauccccacccaccgccacgugaucggcaagcccugccccaagccgcaccggcugaaccacauggggaucugcuccugcggccuguacaagcaccccgggguccccgugaaguggaagcgcugaggacuagucccuguucccagagcccacuuuuuuuucuuuuuuugaaauaaaauagccugucuuucagaucucaaaggcucuuuucagagccaccaaaaaaaaaaaaaaaaaaaaaaaaaaaaaaaaaaaaaaaaaaaaaaaaaaaaaaaaaaaaaaaaaaaaaaaaaaaaaaaaaaaaaaaaaaaaaaaaaaaaa

SEQ ID NO: 33850 - RNA, 1764 nt, Artificial Sequence
  mRNA product Design a-2 (hSL-A100) comprising derived and/or modified sequence from LASV(Nig08-A19;Clade III)__ADU56618__GPCmut8 (opt1)
aggagaguccgcucagccagguugcagaagcggcuuagcguguguccuaaucuucucucugcguguagguaggccugugccgcaaacaagcuuaccaugggccagaucgugaccuucuuccaggaggucccccacgugaucgaggaggugaugaacaucguccugaucgcccucagcauccuggccauccugaaggggcucuacaacaucgcgaccugcggccugaucgggcuggugacguuccuccugcuguccggccgcagcugcuccaugaccuacaaggggguguacgagcuccagacccuggagcugaacaugaacacccucaacaugugcaugccgcugagcugcacgaagaacaacucccaccacuacaucauggucggcaacgagaccggccuggagcucacccugaccaacacgagccugcuccaccacaaguucugcaaccuguccgacgcccacaagaagaaccuguacgaccacacccucaugagcaucaucuccaccuuccaccugagcauccccaacuucaaccaguacgaggccauguccugcgacuucaacgggggcaagaucaccgugcaguacaaccugagccacuccuacgccaucgacgccgcgaaccacugcgggacgguggccaacggcguccuccagaccuucaugcggauggccuggggcgggagcuacaucgcccuggacuccggccgcgggaagugggacugcaucaugaccagcuaccaguaccugaucauccagaacaccacgugggaggaccacugccaguucucccggcccagccccaucggcuaccucgggcugcugucccagcgcacccgggacaucuacaucagccgccggcuccugggcaccuucaccuggacgcugagcgacuccgagggcaacgagacccccgggggcuacugccucacccgcuggaugcugaucgaggcggagcugaagugcuucgggaacaccgccguggccaagugcaacgagaagcacgacgaggaguucugcgacaugcuccggcuguucgacuucugcaagcaggccauccgccggcugaaggccccggcgcagaugagcauccagcucaucaacaaggccgugaacgcccugaucaacgaccagcugaucaugaagaaccaccuccgcgacaucaugggcauccccuacugcaacuacuccaaguacugcuaccugaaccacacgagcaccgggcggaccucccugccccgcugcugccucgucagcaacggcuccuaccugaacgagacccacuucagcgacgacaucgagcagcaggccgacaacaugaucacggagaugcugcagaaggaguaccuggaccggcagggcaagaccccgcucgggcugguggaccuguucguguucuccaccagcuucuaccucaucuccaucuuccugcaccuggucaagauccccacccaccgccacaucgugggcaagcccugccccaagccgcaccggcucaaccacauggggaucugcagcugcggccuguacaagcagcccggggugcccguccgcuggaagcggugaggacuagucccuguucccagagcccacuuuuuuuucuuuuuuugaaauaaaauagccugucuuucagaucucaaaggcucuuuucagagccaccaaaaaaaaaaaaaaaaaaaaaaaaaaaaaaaaaaaaaaaaaaaaaaaaaaaaaaaaaaaaaaaaaaaaaaaaaaaaaaaaaaaaaaaaaaaaaaaaaaaaa

SEQ ID NO: 33851 - RNA, 1767 nt, Artificial Sequence
  mRNA product Design a-2 (hSL-A100) comprising derived and/or modified sequence from LASV(G1180-SLE-2010;Clade IV)__AIT17168__GPCmut8 (opt1)
aggagaguccgcucagccagguugcagaagcggcuuagcguguguccuaaucuucucucugcguguagguaggccugugccgcaaacaagcuuaccaugggccagaucgugaccuucuuccaggaggucccccacgugaucgaggaggugaugaacaucguccugaucgcccucagcauccuggccgugcugaaggggcucuacaacuucgcgaccugcggccugguggggcugcucacguuccugcugcucugcggccgcuccugcaccgccagccgguacaagggggucuacgagcugcagacccuggagcucaacauggagacccugaacaugugcaugccgcuguccugcacgaagaacaacagccaccacuacaucauggugggcaacgagaccggccucgagcugacccugaccaacacguccaucaucaaccacaaguucugcaaccucagcgacgcccacaagaagaaccuguacgaccacgcccugauguccaucaucagcaccuuccaccucuccauccccaacuucaaccaguacgaggccaugagcugcgacuucaacgggggcaagaucuccgugcaguacaaccugagccacuccuacgcgggggacgccgccaaccacugcggcaccgucgccaacggggugcugcagaccuucaugcgcauggcguggggcggcagcuacaucgcccucgacuccgggcacggcagcugggacugcaucaugacguccuaccaguaccugaucauccagaacaccaccugggaggaccacugccaguucagccggcccucccccaucggguaccugggccuccugagccagcgcacccgggacaucuacaucagccgccggcugcucggcacguucaccuggacccuguccgacagcgaggggaaggacaccccgggcggguacugccugacgcgcuggaugcucaucgaggccgagcugaagugcuucggcaacaccgccguggccaagugcaacgagaagcacgacgaggaguucugcgacaugcugcggcuguucgacuucugcaagcaggcgauccagcgccugaaggcccccgcccagauguccauccagcugaucaacaaggccgucaacgcccucaucaacgaccagcugaucaugaagaaccaccuccgggacaucauggggauccccuacugcaacuacagcaaguacugcuaccucaaccacaccaccacgggcaagaccucccugcccaagugcugccuggugagcaacggcuccuaccucaacgagacccacuucagcgacgacaucgagcagcaggcggacaacaugaucaccgagaugcugcagaaggaguacauggagcgccaggggaagacgccgcugggccugguggaccucuucgucuucuccaccagcuucuaccugaucuccaucuuccugcaccucgugaagauccccacccaccggcacaucgugggcaagagcugccccaagccccaccgccugaaccacauggggaucugcuccugcgggcuguacaagcagccgggcguccccgugaaguggaagcggugaggacuagucccuguucccagagcccacuuuuuuuucuuuuuuugaaauaaaauagccugucuuucagaucucaaaggcucuuuucagagccaccaaaaaaaaaaaaaaaaaaaaaaaaaaaaaaaaaaaaaaaaaaaaaaaaaaaaaaaaaaaaaaaaaaaaaaaaaaaaaaaaaaaaaaaaaaaaaaaaaaaaa

SEQ ID NO: 33852 - RNA, 1767 nt, Artificial Sequence
  mRNA product Design a-2 (hSL-A100) comprising derived and/or modified sequence from LASV(G1442-SLE-2011;Clade IV)__AIT17180__GPCmut8 (opt1)
aggagaguccgcucagccagguugcagaagcggcuuagcguguguccuaaucuucucucugcguguagguaggccugugccgcaaacaagcuuaccaugggccagaucgugaccuucuuccaggaggucccccacgugaucgaggaggugaugaacaucguccugaucgcccucagcauccuggccgugcugaaggggcucuacaacguggcgaccugcggccugaucgggcuggucacguuccuccugcugugcggccgcuccugcaccaccacccucuacaaggggguguacgagcugcagacgcuggagcucaacauggagacccugaacaugugcaugccgcugagcugcaccaagaacaacucccaccacuacauccgggugggcaacgagaccggccucgagcugacgcugaccaacaccagcaucaucaaccacaaguucugcaaccucuccgacgcccacaagaagaaccuguacgaccacgcccugaugagcaucaucuccaccuuccaccucagcauccccaacuucaaccaguacgaggccauguccugcgacuucaacgggggcaagaucagcguccaguacaaccugucccacagcuacgccggggacgcggccaaccacugcggcacgguggccaacggggugcugcagaccuucaugcgcauggccuggggcggcuccuacaucgcgcucgacagcgggcggggcaacugggacugcaucaugaccuccuaccaguaccugaucauccagaacaccacgugggacgaccacugccaguucagccgccccucccccaucggguaccugggccuccugagccagcggacccgcgacgucuacaucucccggcgccugcucggcaccuucaccuggacgcugagcgacagcgaggggaaggacaccccgggcggguacugccugacccgguggaugcucaucgaggccgagcugaagugcuucggcaacaccgccguggccaagugcaacgagaagcacgacgaggaguucugcgacaugcugcgccucuucgacuucugcaagcaggccauccagcggcugaaggcgcccgcccagauguccauccagcugaucaacaaggccgugaacgcccucaucaacgaccagcugaucaugaagaaccaccuccgcgacaucauggggauccccuacugcaacuacagcaaguacugcuaccugaacaacacggccaccggcaagaccucccugcccaagugcugccugaucagcaacggcuccuaccucaacgagacccacuucagcgacgacaucgagcaggaggcggacaacaugaucacggagaugcugcagaaggaguacauggagcggcaggggaagaccccgcugggccuggucgaccucuucguguucuccaccagcuucuaccugaucuccaucuuccugcaccucgugaagauccccacccaccgccacaucgucggcaagagcugccccaagccccaccggcugaaccacauggggaucugcuccugcgggcuguacaagcagccgggcgugcccgugcgcuggaagcggugaggacuagucccuguucccagagcccacuuuuuuuucuuuuuuugaaauaaaauagccugucuuucagaucucaaaggcucuuuucagagccaccaaaaaaaaaaaaaaaaaaaaaaaaaaaaaaaaaaaaaaaaaaaaaaaaaaaaaaaaaaaaaaaaaaaaaaaaaaaaaaaaaaaaaaaaaaaaaaaaaaaaa

SEQ ID NO: 33853 - RNA, 1767 nt, Artificial Sequence
  mRNA product Design a-2 (hSL-A100) comprising derived and/or modified sequence from LASV(G3010-SLE-2013;Clade IV)__AIT17344__GPCmut8 (opt1)
aggagaguccgcucagccagguugcagaagcggcuuagcguguguccuaaucuucucucugcguguagguaggccugugccgcaaacaagcuuaccaugggccagaucgugaccuucuuccaggaggucccccacgugaucgaggaggugaugaacaucguccugaucgcccucagcauccuggccgugcugaaggggcucuacaacuucgcgaccugcggccugguggggcuggucacguuccuccugcugugcggccgcuccugcaccaccagccucuacaaggggguguacgagcugcagacccuggagcucaacauggagacgcugaacaugugcaugccgcuguccugcaccaagaacaacagccaccacuacaucauggugggcaacgagaccggccucgagcugacccugacgaacaccuccaucaucaaccacaaguucugcaaccucagcgacgcccacaagaagaaccuguacaaccacgcccugauguccaucaucagcaccuuccaccucuccauccccaacuucaaccaguacgaggccaugagcugcgacuucaacgggggcaagaucuccguccaguacaaccugagccacuccuacgccggggacgcggccagccacugcggcaccguggccaacggggugcugcagacguucaugcggauggccuggggcggcuccuacaucgcgcucgacagcggguacggcaagugggacugcaucaugaccuccuaccaguaccugaucauccagaacaccaccugggaggaccacugccaguucagccgccccucccccaucggguaccugggccuccugagccagcggacgcgcgacaucuacaucagccggcgccugcucggcaccuucaccuggacccuguccgacagcgaggggaaggacacgccgggcggguacugccugacccgguggaugcucaucgaggccgagcugaagugcuucggcaacaccgccgucgccaagugcaacgagaagcacgacgaggaguucugcgacaugcugcgccucuucgacuucugcaagcaggccauccagcggcugaagacccccgcgcagauguccauccagcugaucaacaaggccgugaacgcccucaucaacgaccagcugaucaugaagaaccaccuccgcgacaucauggggauccccuacugcaacuacagcaaguacugcuaccugaaccacacgaccaccggcaagaccucccugcccaagugcugccuggugagcaacggcuccuaccucaacgagacgcacuucagcgacgacaucgagcagcaggccgacaacaugaucaccgagaugcugcagaaggaguacauggagcggcaggggaagaccccgcugggccuggucgaccucuucguguucuccaccagcuucuaccugaucuccaucuuccugcaccucgugaagauccccacgcaccgccacaucgucggcaagagcugccccaagccccaccggcugaaccacauggggaucugcuccugcgggcuguacaagcagccgggcgugcccgugcgcuggaagcggugaggacuagucccuguucccagagcccacuuuuuuuucuuuuuuugaaauaaaauagccugucuuucagaucucaaaggcucuuuucagagccaccaaaaaaaaaaaaaaaaaaaaaaaaaaaaaaaaaaaaaaaaaaaaaaaaaaaaaaaaaaaaaaaaaaaaaaaaaaaaaaaaaaaaaaaaaaaaaaaaaaaaa

SEQ ID NO: 33854 - RNA, 1767 nt, Artificial Sequence
  mRNA product Design a-2 (hSL-A100) comprising derived and/or modified sequence from LASV(G502-SLE-2009;Clade IV)__AIT17126__GPCmut8 (opt1)
aggagaguccgcucagccagguugcagaagcggcuuagcguguguccuaaucuucucucugcguguagguaggccugugccgcaaacaagcuuaccaugggccagaucgugaccuucuuccaggaggucccccacgugaucgaggaggugaugaacaucguccugaucgcccucagcauccuggccgugcugaaggggcucuacaacuucgcgaccugcggccugguggggcugcucacguuccugcugcucugcggccgcuccugcaccaccgggcuguacaagggcgucuacgagcugcagacccucgagcugaacauggagacgcugaacaugugcaugccgcucagcugcaccaagaacaacucccaccacuacaucauggugggcaacgagaccgggcuggagcugacccucacgaacaccagcaucaucaaccacaaguucugcaaccuguccgacgcccacaagaagaaccuguacgaccacgcccucaugagcaucaucuccaccuuccaccugagcauccccaacuucaaccaguacgaggccauguccugcgacuucaacggcgggaagaucagcgugcaguacaaccugucccacagcuacgccggcgacgcggccgaccacugcgggaccgucgccaacggcgugcuccagacguucaugcggauggccuggggcggguccuacaucgcgcuggacagcggccgcgggcggugggacugcaucaugaccuccuaccaguaccugaucauccagaacaccaccugggaggaccacugccaguucagccgccccucccccaucggcuaccucggccugcugagccagcggacgcgcgacaucuacaucucccggcgccuccuggggaccuucaccuggacccugagcgacagcgagggcaaggacacgcccgggggcuacugccucacccgguggaugcugaucgaggccgagcugaagugcuucgggaacaccgccguggccaagugcaacgagaagcacgacgaggaguucugcgacaugcuccgccuguucgacuucugcaagcaggccauccagcggcugaaggcgccggcccagauguccauccagcucaucaacaaggccgucaacgcccugaucaacgaccagcuggugaugaagaaccaccuccgcgacaucaugggcauccccuacugcaacuacagccgguacugcuaccugaaccacaccacgaccggccgcaccucccugcccaagugcugccucgugagcaacggguccuaccugaacgagacccacuucagcgacgacaucgagcagcaggccgacaacaugaucacggagaugcugcagaaggaguacauggagcggcagggcaagaccccgcuggggcucgucgaccuguucguguucuccaccagcuucuaccugaucuccaucuuccuccaccuggugaagauccccacccaccgccacaucgucggcaagagcugccccaagccccaccggcugaaccacauggggaucugcuccugcggccucuacaagcagccgggcgugcccgugaaguggaagcgcugaggacuagucccuguucccagagcccacuuuuuuuucuuuuuuugaaauaaaauagccugucuuucagaucucaaaggcucuuuucagagccaccaaaaaaaaaaaaaaaaaaaaaaaaaaaaaaaaaaaaaaaaaaaaaaaaaaaaaaaaaaaaaaaaaaaaaaaaaaaaaaaaaaaaaaaaaaaaaaaaaaaaa

SEQ ID NO: 33855 - RNA, 1767 nt, Artificial Sequence
  mRNA product Design a-2 (hSL-A100) comprising derived and/or modified sequence from LASV(G733-SLE-2010;Clade IV)__AIT17154__GPCmut8 (opt1)
aggagaguccgcucagccagguugcagaagcggcuuagcguguguccuaaucuucucucugcguguagguaggccugugccgcaaacaagcuuaccaugggccagaucgugaccuucuuccaggaggucccccacgugaucgaggaggugaugaacaucguccugaucgcccucagcauccuggccgugcugaaggggcucuacaacuucgcgaccugcggcaucguggggcuggucuccuuccugcuccugugcggccgcagcugcacgaccucccuguacaaggggguguacgagcuccagacccuggagcugaacauggagacccucaacaugugcaugccgcugagcugcacgaagaacaacucccaccacuacaucauggugggcaacgagaccggccuggagcucacccugaccaacacgagcaucaucaaccacaaguucugcaaccuguccgacgcccacaagaagaaccucuacgaccacgcccugaugagcaucaucuccaccuuccaccugagcauccccaacuucaaccaguacgaggccauguccugcgacuucaacgggggcaagaucagcguccaguacaaccucucccacagcuacgccggggacgcggccaaccacugcggcaccaucgccaacggggugcugcagaccuucaugcggauggccuggggcggcuccuacaucgcgcuggacagcgggcgcgaccggugggacugcaucaugacguccuaccaguaccucaucauccagaacaccaccugggaggaccacugccaguucagccgccccucccccaucggcuaccuggggcugcucagccagcggacccgcgacaucuacaucagccggcgccugcugggcacguucaccuggacccucuccgacagcgagggcaaggacacccccgggggcuacugccugacgcgguggaugcugaucgaggccgagcucaagugcuucgggaacaccgccguggccaagugcaacgagaagcacgacgaggaguucugcgacaugcugcgccuguucgacuucugcaagcaggccauccagcggcucaaggcgccggcccagauguccauccagcugaucaacaaggccgucaacgcccugaucaacgaccagcucaucaugaagaaccaccuccgcgacaucaugggcauccccuacugcaacuacagcaaguacugcuaccugaaccacaccaccacggggaagaccucccugcccaagugcugccuggugagcaacggcuccuaccugaacgagacccacuucagcgacgacaucgagcagcaggccgacaacaugaucaccgagaugcuccagaaggaguacauggagcggcagggcaagacgccgcuggggcugguggaccuguucgucuucuccaccagcuucuaccucaucuccaucuuccugcaccuggugaagauccccacccaccgccacguggucggcaagagcugccccaagccccaccggcucaaccacauggggaucugcuccugcggccuguacgggcagccgggcgugcccgugaaguggaagcgcugaggacuagucccuguucccagagcccacuuuuuuuucuuuuuuugaaauaaaauagccugucuuucagaucucaaaggcucuuuucagagccaccaaaaaaaaaaaaaaaaaaaaaaaaaaaaaaaaaaaaaaaaaaaaaaaaaaaaaaaaaaaaaaaaaaaaaaaaaaaaaaaaaaaaaaaaaaaaaaaaaaaaa

SEQ ID NO: 33856 - RNA, 1767 nt, Artificial Sequence
  mRNA product Design a-2 (hSL-A100) comprising derived and/or modified sequence from MOPV/LASV reassortant(IGS-1;Clade IV)__AFY05576__GPCmut8 (opt1)
aggagaguccgcucagccagguugcagaagcggcuuagcguguguccuaaucuucucucugcguguagguaggccugugccgcaaacaagcuuaccaugggccagaucgugaccuucuuccaggaggucccccacgugaucgaggaggugaugaacaucguccugaucgcccucagcgugcuggccgugcugaaggggcucuacaacuucgcgaccugcggccuggucgggcuggugacguuccuccugcugugcggccgcuccugcaccaccagccucuacaaggggguguacgagcugcagacccuggagcucaacauggagacgcugaacaugugcaugccgcuguccugcaccaagaacaacagccaccacuacaucauggucggcaacgagaccggccucgagcugacccugacgaacaccuccaucaucaaccacaaguucugcaaccucagcgacgcccacaagaagaaccuguacgaccacgcccugauguccaucaucagcaccuuccaccucuccauccccaacuucaaccaguacgaggccaugagcugcgacuucaacgggggcaagaucuccgugcaguacaaccugagccacuccuacgccggggacgcggccaaccacugcggcaccguggccaacgggguccugcagacguucaugcggauggccuggggcggcagcuacaucgcgcucgacuccgggcgcggcaacugggacugcaucaugaccagcuaccaguaccugaucauccagaacaccaccugggaggaccacugccaguucucccggcccagccccaucggguaccugggccuccugucccagcgcacgcgggacaucuacaucagccgccggcugcucggcaccuucaccuggacccugagcgacuccgagggggaggacacgccgggcggguacugccugacccgcuggaugcucaucgaggccgagcugaagugcuucggcaacaccgccguggccaagugcaacgagaagcacgacgaggaguucugcgacaugcugcggcuguucgacuucugcaagcaggccauccagcgccugaaggcgcccgcccagaugagcauccagcugaucaacaaggccgugaacgcccucaucaacgaccagcugaucaugaagaaccaccuccgggacaucauggggauccccuacugcaacuacuccaaguacugcuaccucaaccacaccacgaccggccgcaccagccugcccaagugcugccuggucuccaacggcagcuaccucaacgagacccacuucuccgacgacaucgagcagcaggccgacaacaugaucacggagaugcugcagaaggaguacauggagcggcaggggaagaccccgcugggccugguggaccucuucguguucagcaccuccuucuaccugaucagcaucuuccugcaccucgucaagauccccacccaccgccacaucguggggaaguccugccccaagccccaccggcugaaccacaugggcaucugcagcugcgggcuguacaagcagccgggcgugcccgucaaguggaagcgcugaggacuagucccuguucccagagcccacuuuuuuuucuuuuuuugaaauaaaauagccugucuuucagaucucaaaggcucuuuucagagccaccaaaaaaaaaaaaaaaaaaaaaaaaaaaaaaaaaaaaaaaaaaaaaaaaaaaaaaaaaaaaaaaaaaaaaaaaaaaaaaaaaaaaaaaaaaaaaaaaaaaaa

SEQ ID NO: 33857 - RNA, 1767 nt, Artificial Sequence
  mRNA product Design a-2 (hSL-A100) comprising derived and/or modified sequence from LASV(LM765-SLE-2012;Clade IV)__AIT17814__GPCmut8 (opt1)
aggagaguccgcucagccagguugcagaagcggcuuagcguguguccuaaucuucucucugcguguagguaggccugugccgcaaacaagcuuaccaugggccagaucgugaccuucuuccaggaggucccccacgugaucgaggaggugaugaacaucguccugaucgcccucagcauccuggccgugcugaaggggcucuacaacuucgcgaccugcggccugguggggcuggucacguuccuccugcugugcggccgcuccugcaccaccagccucuacaaggggguguacgagcugcagacccuggagcucaacauggagacgcugaacaugugcaugccgcuguccugcaccaagaacaacagccaccacuacaucauggugggcaacgagaccggccucgagcugacccugacgaacaccuccaucaucgaccacaaguucugcaaccucagcgacgcccaccggaagaaccuguacgaccacgcccugauguccaucaucagcaccuuccaccucuccauccccaacuucaaccaguacgaggccaugagcugcgacuucaacgggggcaagaucuccguccaguacaaccugagccacuccuacgccaaggacgcggccgaccacugcgggaccguggccaacggcgugcugcagacguucaugcgcauggccuggggcgggagcuacaucgcgcucgacuccggccgggggcgcugggacugcaucaugaccagcuaccaguaccugaucauccagaacaccaccugggaggaccacugccaguucucccggcccagccccaucggcuaccuggggcuccugucccagcgcacgcgggacaucuacaucagccgccggcugcucggcaccuucaccuggacccugagcgacuccgagggcaaggacacgcccgggggcuacugccugacccgcuggaugcucaucgaggccgagcugaagugcuucgggaacaccgccgucgccaagugcaacgagaagcacgacgaggaguucugcgacaugcugcggcuguucgacuucugcaagcaggccauccagcgccugaaggcgccggcccagaugagcauccagcugaucaacaaggccgugaacgcccucaucaacgaccagcugaucaugaagaaccaccuccgggacaucaugggcauccccuacugcaacuacuccaaguacugcuaccucaaccacaccacgaccgggaagaccagccugcccaagugcugccugguguccaacggcagcuaccucaacgagacccacuucuccgacgacaucgagcagcaggccgacaacaugaucacggagaugcugcagaaggaguacauggagcgccagggcaagaccccgcuggggcuggucgaccucuucguguucagcaccuccuucuaccugaucagcaucuuccugcaccucgugaagauccccacccaccggcacaucgucggcaagcccugccccaagccgcaccgccugaaccacauggggaucugcuccugcggccuguacaagcagcccggggugcccgugaaguggaagcggugaggacuagucccuguucccagagcccacuuuuuuuucuuuuuuugaaauaaaauagccugucuuucagaucucaaaggcucuuuucagagccaccaaaaaaaaaaaaaaaaaaaaaaaaaaaaaaaaaaaaaaaaaaaaaaaaaaaaaaaaaaaaaaaaaaaaaaaaaaaaaaaaaaaaaaaaaaaaaaaaaaaaa

SEQ ID NO: 33858 - RNA, 1767 nt, Artificial Sequence
  mRNA product Design a-2 (hSL-A100) comprising derived and/or modified sequence from LASV(LM776-SLE-2012;Clade IV)__AIT17824__GPCmut8 (opt1)
aggagaguccgcucagccagguugcagaagcggcuuagcguguguccuaaucuucucucugcguguagguaggccugugccgcaaacaagcuuaccaugggccagaucgugaccuucuuccaggaggucccccacgugaucgaggaggugaugaacaucguccugaucgcccucagcauccuggccgugcugaaggggcucuacaacuucgcgaccugcggccugguggggcuggucacguuccuccugcugugcggccgcuccugcaccaccagcguguacaaggggguguacgagcuccagacccuggagcugaacauggagacgcucaacaugugcaugccgcuguccugcaccaagaacaacagccaccacuacaucauggucggcaacgagaccggccuggagcucacccugacgaacaccuccaucaucaaccacaaguucugcaaccugagcgacgcccacaagaagaaccucuacgaccacgcccugauguccaucaucagcaccuuccaccuguccauccccaacuucaaccaguacgaggccaugagcugcgacuucaacgggggcaagaucuccgugcaguacaaccucagccacuccuacgccggggacgcggccaaccacugcggcaccguggccaacgggguccugcagacguucaugcggauggccuggggcggcagcuacaucgcgcuggacuccgggcacggcaagugggacugcaucaugaccagcuaccaguaccucaucauccagaacaccaccugggaggaccacugccaguucucccgccccagccccaucggguaccugggccugcucucccagcggacgcgcgacaucuacaucagccggcgccugcugggcaccuucaccuggacccucagcgacuccgaggggaaggacacgccgggcggguacugccugacccgguggaugcugaucgaggccgagcucaagugcuucggcaacaccgccguggccaagugcaacgagaagcacgacgaggaguucugcgacaugcugcgccuguucgacuucugcaagcaggccauccagcggcucaaggcgcccgcccagaugagcauccagcugaucaacaaggccgugaacgcccugaucaacgaccagcucaucaugaagaaccaccuccgcgacaucauggggauccccuacugcaacuacuccaaguacugcuaccugaaccacaccacgaccggcaagaccagccugcccaagugcugccuggucuccaacggcagcuaccugaacgagacccacuucuccgacgacaucgagcagcaggccgacaacaugaucacggagaugcuccagaaggaguacauggagcggcaggggaagaccccgcugggccugguggaccuguucguguucagcaccuccuucuaccucaucagcaucuuccugcaccuggucaagauccccacccaccgccacaucguggggaaguccugccccaagccccaccggcucaaccacaugggcaucugcagcugcgggcuguacaagcagccgggcgugcccguccgcuggaagcggugaggacuagucccuguucccagagcccacuuuuuuuucuuuuuuugaaauaaaauagccugucuuucagaucucaaaggcucuuuucagagccaccaaaaaaaaaaaaaaaaaaaaaaaaaaaaaaaaaaaaaaaaaaaaaaaaaaaaaaaaaaaaaaaaaaaaaaaaaaaaaaaaaaaaaaaaaaaaaaaaaaaaa

SEQ ID NO: 33859 - RNA, 1767 nt, Artificial Sequence
  mRNA product Design a-2 (hSL-A100) comprising derived and/or modified sequence from LASV(Mad39;Clade IV)__ANH09722__GPCmut8 (opt1)
aggagaguccgcucagccagguugcagaagcggcuuagcguguguccuaaucuucucucugcguguagguaggccugugccgcaaacaagcuuaccaugggccagaucgugaccuucuuccaggaggucccccacgugaucgaggaggugaugaacaucguccugaucgcccucagcauccuggccgugcugaaggggcucuacaacguggcgaccugcggccugaucgggcuggucacguuccuccugcugugcggccgcuccugcaccaccacccucuacaaggggguguacgagcugcaggcccuggagcucaacauggagacgcugaacaugugcaugccgcugagcugcaccaagaacaacucccaccacuacauccgggugggcaacgagaccggccucgagcugacccugacgaacaccagccucaucaaccacaaguucugcaaccuguccgacgcccacaagaagaaccuguacgaccacgcccucaugagcaucaucuccaccuuccaccugagcauccccaacuucaaccaguacgaggccauguccugcgacuucaacgacgggaagaucagcguccaguacaaccugucccacaccuacgcgggcgacacggccaaccacugcgggaccguggccaacggcgugcuccagaccuucaugcgcauggccuggggcgggagcuacaucgcgcuggacuccggccgcgggggcugggacugcaucaugaccagcuaccaguaccugaucauccagaacacgaccugggaggaccacugccaguucucccggcccagccccaucggguaccucggccugcugucccagcggacccgcgacaucuacaucagccggcgccuccugggcaccuucacguggacccuguccgacagcgaggggaaggacaccccgggcggguacugccucacccgguggaugcugaucgaggccgagcugaagugcuucggcaacacggccgucgccaagugcaacgagaagcacgacgaggaguucugcgacaugcuccgccuguucgacuucugcaagcaggccauccagcggcugaaggcgcccgcccagaugagcauccagcucaucaacaaggccgugaacgcccugaucaacgaccagcugaucaugaagaaccaccuccgcgacaucauggggauccccuacugcaacuacuccaaguacugcuaccugaaccacaccgugaccggcaagaccagccugcccaagugcugccucgucuccaacggcagcuaccugaacgagacgcacuucuccgacgacaucgagcagcaggccgacaacaugaucaccgagaugcugcagaaggaguacauggagcggcaggggaagaccccgcugggccucguggaccuguucguguucagcaccuccuucuaccugaucagcaucuuccuccaccuggucaagauccccacgcaccgccacgugguggggaagcccugccccaagccgcaccggcugaaccacaugggcaucugcuccugcggguucuacaagcagcccggcguccccgugcgcuggaagcggugaggacuagucccuguucccagagcccacuuuuuuuucuuuuuuugaaauaaaauagccugucuuucagaucucaaaggcucuuuucagagccaccaaaaaaaaaaaaaaaaaaaaaaaaaaaaaaaaaaaaaaaaaaaaaaaaaaaaaaaaaaaaaaaaaaaaaaaaaaaaaaaaaaaaaaaaaaaaaaaaaaaaa

SEQ ID NO: 33860 - RNA, 1767 nt, Artificial Sequence
  mRNA product Design a-2 (hSL-A100) comprising derived and/or modified sequence from LASV(Z0947-SLE-2011;Clade IV)__AIT17840__GPCmut8 (opt1)
aggagaguccgcucagccagguugcagaagcggcuuagcguguguccuaaucuucucucugcguguagguaggccugugccgcaaacaagcuuaccaugggccagaucgugaccuucuuccaggaggucccccacgugaucgaggaggugaugaacaucguccugaucgcccucagcauccuggccgugcugaaggggcucuacaacuucgcgaccugcggccugguggggcuggucacguuccuccugcugugcggccgcuccugcaccaucagccucuacaaggggguguacgagcugcagacccuggagcucaacauggagacccugaacaugugcaugccgcuguccugcacgaagaacaacagccaccacuacaucauggugggcaacgagaccggccucgagcugacccugaccaacacguccaucaucaaccacaaguucugcaaccucagcgacgcccacaagaagaaccuguacgaccacgcccugauguccaucaucagcaccuuccaccucuccauccccaacuucaaccaguacgaggccaugagcugcgacuucaacgggggcaagaucuccguccaguacaaccugagccacuccuacgccggggacgcggccaaccacugcggcaccguggccaacggggugcugcagaccuucaugcggauggccuggggcggcagcuacaucgcgcucgacuccgggcgcgaccggugggacugcaucaugacgagcuaccaguaccugaucauccagaacaccaccugggaggaccacugccaguucucccgccccagccccaucggcuaccuggggcuccugucccagcggacccgcgacaucuacaucagccggcgccugcucggcacguucaccuggacccugagcgacuccgagggcaaggacacccccgggggcuacugccugacgcgguggaugcucaucgaggccgagcugaagugcuucgggaacaccgccgucgccaagugcaacgagaagcacgacgaggaguucugcgacaugcugcgccucuucgacuucugcaagcaggccauccagcggcugaaggcgccggcccagaugagcauccagcugaucaacaaggccgugaacgcccucaucaacgaccagcugaucaugaagaaccaccuccgcgacaucaugggcauccccuacugcaacuacuccaaguacugcuaccugaaccacaccaccacggggaagaccagccugcccaagugcugccugguguccaacggcagcuaccucaacgagacccacuucuccgacgacaucgagcagcaggccgacaacaugaucaccgagaugcugcagaaggaguacauggagcggcagggcaagacgccgcuggggcuggucgaccucuucguguucagcaccuccuucuaccugaucagcaucuuccugcaccucgugaagauccccacccaccgccacaucgucggcaagcccugccccaagccgcaccggcugaaccacauggggaucugcuccugcggccuguacaagcagcccggggugcccgugaaguggaagcgcugaggacuagucccuguucccagagcccacuuuuuuuucuuuuuuugaaauaaaauagccugucuuucagaucucaaaggcucuuuucagagccaccaaaaaaaaaaaaaaaaaaaaaaaaaaaaaaaaaaaaaaaaaaaaaaaaaaaaaaaaaaaaaaaaaaaaaaaaaaaaaaaaaaaaaaaaaaaaaaaaaaaaa

SEQ ID NO: 33861 - RNA, 1767 nt, Artificial Sequence
  mRNA product Design a-2 (hSL-A100) comprising derived and/or modified sequence from LASV(Josiah;Clade IV)__NP_694870__GPCmut8 (opt4)
aggagaguccgcucagccagguugcagaagcggcuuagcguguguccuaaucuucucucugcguguagguaggccugugccgcaaacaagcuuaccaugggccagaucgugaccuucuuccaggaggugccccacgugaucgaggaggugaugaacaucgugcugaucgcccugagcgugcuggccgugcugaagggccuguacaacuucgccaccugcggccuggugggccuggugaccuuccugcugcugugcggcagaagcugcaccaccagccuguacaagggcguguacgagcugcagacccuggagcugaacauggagacccugaacaugugcaugccccugagcugcaccaagaacaacagccaccacuacaucauggugggcaacgagaccggccuggagcugacccugaccaacaccagcaucaucaaccacaaguucugcaaccugagcgacgcccacaagaagaaccuguacgaccacgcccugaugagcaucaucagcaccuuccaccugagcauccccaacuucaaccaguacgaggccaugagcugcgacuucaacggcggcaagaucagcgugcaguacaaccugagccacagcuacgccggcgacgccgccaaccacugcggcaccguggccaacggcgugcugcagaccuucaugagaauggccuggggcggcagcuacaucgcccuggacagcggcagaggcaacugggacugcaucaugaccagcuaccaguaccugaucauccagaacaccaccugggaggaccacugccaguucagcagacccagccccaucggcuaccugggccugcugagccagagaaccagagacaucuacaucagcagaagacugcugggcaccuucaccuggacccugagcgacagcgagggcaaggacacccccggcggcuacugccugaccagauggaugcugaucgaggccgagcugaagugcuucggcaacaccgccguggccaagugcaacgagaagcacgacgaggaguucugcgacaugcugagacuguucgacuucugcaagcaggccauccagagacugaaggcccccgcccagaugagcauccagcugaucaacaaggccgugaacgcccugaucaacgaccagcugaucaugaagaaccaccugagagacaucaugggcauccccuacugcaacuacagcaaguacugcuaccugaaccacaccaccaccggcagaaccagccugcccaagugcugccuggugagcaacggcagcuaccugaacgagacccacuucagcgacgacaucgagcagcaggccgacaacaugaucaccgagaugcugcagaaggaguacauggagagacagggcaagaccccccugggccugguggaccuguucguguucagcaccagcuucuaccugaucagcaucuuccugcaccuggugaagauccccacccacagacacaucgugggcaagagcugccccaagccccacagacugaaccacaugggcaucugcagcugcggccuguacaagcagcccggcgugcccgugaaguggaagagaugaggacuagucccuguucccagagcccacuuuuuuuucuuuuuuugaaauaaaauagccugucuuucagaucucaaaggcucuuuucagagccaccaaaaaaaaaaaaaaaaaaaaaaaaaaaaaaaaaaaaaaaaaaaaaaaaaaaaaaaaaaaaaaaaaaaaaaaaaaaaaaaaaaaaaaaaaaaaaaaaaaaaa

SEQ ID NO: 33862 - RNA, 1764 nt, Artificial Sequence
  mRNA product Design a-2 (hSL-A100) comprising derived and/or modified sequence from LASV(LP;Clade I)__AAF86701__GPCmut8 (opt4)
aggagaguccgcucagccagguugcagaagcggcuuagcguguguccuaaucuucucucugcguguagguaggccugugccgcaaacaagcuuaccaugggccagaucaucaccuucuuccaggaggugccccacgugaucgaggaggugaugaacaucgugcugaucgcccugagccugcuggccauccugaagggccuguacaacaucgccaccugcggcaucaucggccugguggccuuccuguuccugugcggcaagagcugcagccugacccugaagggcggcuacgagcugcagacccuggagcugaacauggagacccugaacaugugcaugccccugagcugcaccaagaacagcagccaccacuacaucagagugggcaacgagaccggccuggagcugacccugaccaacaccagcaucaucaaccacaaguucugcaaccugagcgacgcccacaagaagaaccuguacgaccacgcccugaugagcaucaucagcaccuuccaccugagcauccccaacuucaaccaguacgaggccaugagcugcgacuucaacggcggcaagaucagcgugcaguacaaccugagccacagcuacgccggcgacgccgccgagcacugcggcaccguggccaacggcgugcugcagaccuucaugagaauggccuggggcggcagauacaucgcccuggacagcggcaagggcaacugggacugcaucaugaccagcuaccaguaccugaucauccagaacaccaccugggaggaccacugccaguucagcagacccagccccaucggcuaccugggccugcugagccagagaaccagagacaucuacaucagcagaagacugcugggcaccuucaccuggacccugagcgacagcgagggcaacgagacccccggcggcuacugccugaccagauggaugcugaucgaggccgagcugaagugcuucggcaacaccgccguggccaagugcaacgagaagcacgacgaggaguucugcgacaugcugagacuguucgacuucugcaagcaggccaucagaagacugaaggcccccgcccagaugagcauccagcugaucaacaaggccgugaacgcccugaucaacgaccagcugaucaugaagaaccaccugagagacaucaugggcauccccuacugcaacuacagcaaguacugcuaccugaaccacaccagcagcggcagaaccagccugcccaagugcugccugaucagcaacggcagcuaccugaacgagacccaguucagcgacgacaucgagcagcaggccgacaacaugaucaccgagaugcugcagaaggaguacaucgagagacagggcaagaccccccugggccugguggacaucuucaucuucagcaccagcuucuaccugaucagcaucuuccugcaccugaucaagauccccacccacagacacaucgugggcaagcccugccccaagccccacagacugaaccacaugggcgugugcagcugcggccuguacaagcaccccggcgugcccaccaaguggaagagaugaggacuagucccuguucccagagcccacuuuuuuuucuuuuuuugaaauaaaauagccugucuuucagaucucaaaggcucuuuucagagccaccaaaaaaaaaaaaaaaaaaaaaaaaaaaaaaaaaaaaaaaaaaaaaaaaaaaaaaaaaaaaaaaaaaaaaaaaaaaaaaaaaaaaaaaaaaaaaaaaaaaaa

SEQ ID NO: 33863 - RNA, 1764 nt, Artificial Sequence
  mRNA product Design a-2 (hSL-A100) comprising derived and/or modified sequence from LASV(803213;Clade II)__AAF86703__GPCmut8 (opt4)
aggagaguccgcucagccagguugcagaagcggcuuagcguguguccuaaucuucucucugcguguagguaggccugugccgcaaacaagcuuaccaugggccagaucaucaccuucuuccaggaggugccccacgugaucgaggaggugaugaacaucgugcugaucgcccugagccugcuggccauccugaagggcaucuacaacguggccaccugcggccuguucggccugaucagcuuccugcugcugugcggcagaagcugcagcgugaccuacaagggcguguacgagcugcagacccuggagcugaacauggccaaccugaacaugugcaugccccugagcugcaccaagaacaacagccaccacuacaucauggugggcaacgagaccggccuggagcugacccugaccaacaccagcaucaucaaccacaaguucugcaaccugagcgacgcccacaagaagaaccuguacgaccacgcccugaugagcaucaucagcaccuuccaccugagcauccccaacuucaaccaguacgaggccaugagcugcgacuucaacggcggcaagaucagcgugcaguacaaccugagccacagcuucgccguggacgccgccaaccacugcggcaccaucgccaacggcgugcugcagaccuucaugagaauggccuggggcggcagcuacaucgcccuggacagcggcaagggcaacugggacugcaucaugaccagcuaccaguaccugaucauccagaacaccaccugggaggaccacugccaguucagcagacccagccccaucggcuaccugggccugcugagccagagaaccagagacaucuacaucagcagaagacugcugggcaccuucaccuggacccugagcgacagcgagggcaacgaggcccccggcggcuacugccugaccagauggaugcugaucgaggccgagcugaagugcuucggcaacaccgccguggccaagugcaacgagaagcacgacgaggaguucugcgacaugcugagacuguucgacuucugcaagcaggccaucaagagacugaagacccccgcccagaugagcauccagcugaucaacaaggccgugaacgcccugaucaacgaccagcugaucaugaagaaccaccugagagacaucaugggcauccccuacugcaacuacagcagauacugcuaccugaaccacaccgugaccggcaagaccagccugcccagaugcugccuggugagcaacggcagcuaccugaacgagacccacuucagcgacgacaucgagcagcaggccgacaacaugaucaccgagaugcugcagaaggaguacauggacagacagggcaagaccccccugggccugguggaccuguucguguucagcaccagcuucuaccugaucagcaucuuccugcaccuggugaagauccccacccacagacacaucgugggcaagcccugccccaagccccacagacugaaccacaugggcaucugcagcugcggccuguacaagcaccccggcgugcccgugaaguggaagagaugaggacuagucccuguucccagagcccacuuuuuuuucuuuuuuugaaauaaaauagccugucuuucagaucucaaaggcucuuuucagagccaccaaaaaaaaaaaaaaaaaaaaaaaaaaaaaaaaaaaaaaaaaaaaaaaaaaaaaaaaaaaaaaaaaaaaaaaaaaaaaaaaaaaaaaaaaaaaaaaaaaaaa

SEQ ID NO: 33864 - RNA, 1764 nt, Artificial Sequence
  mRNA product Design a-2 (hSL-A100) comprising derived and/or modified sequence from LASV(GA391;Clade III)__CAA36645__GPCmut8 (opt4)
aggagaguccgcucagccagguugcagaagcggcuuagcguguguccuaaucuucucucugcguguagguaggccugugccgcaaacaagcuuaccaugggccagaucgugaccuucuuccaggaggugccccacgugaucgaggaggugaugaacaucgugcugaucgcccugagcauccuggccauccugaagggccuguacaacguggccaccugcggccugaucggccuggugaccuuccugcugcugagcggcagaagcugcagccugaucuacaagggcaccuacgagcugcagacccuggagcugaacauggagacccugaacaugugcaugccccugagcugcaccaagaacaacagccaccacuacaucagagugggcaacgagaccggccuggagcugacccugaccaacaccagcauccugaaccacaaguucugcaaccugagcgacgcccacaagagaaaccuguacgaccacagccugaugagcaucaucagcaccuuccaccugagcauccccaacuucaaccaguacgaggccaugagcugcgacuucaacggcggcaagaucaccgugcaguacaaccugagccacagcuucgccguggacgccgccggccacugcggcacccuggccaacggcgugcugcagaccuucaugagaauggccuggggcggcagcuacaucgcccuggacagcggcagaggcaacugggacugcaucaugaccagcuaccaguaccugaucauccagaacaccaccugggacgaccacugccaguucagcagacccagccccaucggcuaccugggccugcugagccagagaaccagagacaucuacaucagcagaagacugcugggcaccuucaccuggacccugagcgacagcgagggcaacgagacccccggcggcuacugccugaccagauggaugcugaucgaggccgagcugaagugcuucggcaacaccgccguggccaagugcaacgagaagcacgacgaggaguucugcgacaugcugagacuguucgacuucugcaagcaggccaucagaagacugaagacccccgcccagaugagcauccagcugaucaacaaggccgugaacgcccugaucaacgaccagcugaucaugaagaaccaccugagagacaucaugggcauccccuacugcaacuacagcagauacugcuaccugaaccacaccagcaccggcaagaccagccugcccagaugcugccugaucagcaacggcagcuaccugaacgagaccaaguucagcgacgacaucgagcagcaggccgacaacaugaucaccgagaugcugcagaaggaguacaucgacagacagggcaagaccccccugggccugguggaccuguucguguucagcaccagcuucuaccugaucagcaucuuccugcaccuggugaagauccccacccacagacacaucgugggcaagcccugccccaagccccacagacugaaccacaugggcaucugcagcugcggccuguacaagcagcccggcgugcccgugagauggaagagaugaggacuagucccuguucccagagcccacuuuuuuuucuuuuuuugaaauaaaauagccugucuuucagaucucaaaggcucuuuucagagccaccaaaaaaaaaaaaaaaaaaaaaaaaaaaaaaaaaaaaaaaaaaaaaaaaaaaaaaaaaaaaaaaaaaaaaaaaaaaaaaaaaaaaaaaaaaaaaaaaaaaaa

SEQ ID NO: 33865 - RNA, 1767 nt, Artificial Sequence
  mRNA product Design a-2 (hSL-A100) comprising derived and/or modified sequence from LASV(AV;Clade V)__CCA30314__GPCmut8 (opt4)
aggagaguccgcucagccagguugcagaagcggcuuagcguguguccuaaucuucucucugcguguagguaggccugugccgcaaacaagcuuaccaugggccagaucgugaccuucuuccaggaggugccccacgugaucgaggaggugaugaacaucgugcugaucgcccugagcauccuggccgugcugaagggccuguacaacaucgccaccugcggccugaucggccugaucaccuuccugcugcugugcggcagaagcugcagcagcaaccuguacaagggcguguacgagcugcagagccuggaccugaacauggagacccugaacaugugcaugccccugagcugcaccaagaacaacagccaccacuacaucagagugggcaacgacaccggccuggagcugacccugaccaacaccagcauccugaaccacaaguucugcaaccugagcgacgcccacaagaaggaccuguacgaccacgcccugaugagcaucaucagcaccuuccaccugagcauccccaacuucaaccaguacgaggccaugagcugcgacuucaacggcggcaagaucagcgugcaguacaaccugagccacagcuacgccaucgacgccgccaaccacugcggcaccguggccaacggcauccugcagaccuucaugagaauggccuggggcggcagcuacaucgcccuggacagcggcagaggcaacugggacugcaucaugaccagcuaccaguaccugaucauccagaacaccaccugggagaaccacugccaguucagcagacccagccccaucggcuaccugggccugcugagccagagaaccagagacaucuacaucagcagaagacugcugggcaccuucaccuggacccugagcgacagcgagggcaacgccacccccggcggcuacugccugaccagauggaugcugaucgaggccgagcugaagugcuucggcaacaccgccguggccaagugcaacgagaagcacgacgaggaguucugcgacaugcugagacuguucgacuucugcaagcaggccaucagcagacugaagagccccgcccagaugagcauccagcugaucaacaaggccgugaacgcccugaucaacgaccagcugaucaugaagaaccaccugagagacaucaugggcauccccuacugcaacuacagcaaguacugcuaccugaaccacaccaucaccggcaagaccagccugcccaagugcugccuggugagcaacggcagcuaccugaacgagacccacuucagcgacgacaucgagcagcaggccgacaacaugaucaccgagaugcugcagaaggaguacauggagagacagggcaagaccccccugggccugguggaccuguucguguucagcaccagcuucuaccugaucagcaucuuccugagacuggugaagauccccacccacagacacaucgugggcaagcccugccccaagccccacagacugaaccacaugggcaucugcagcugcggccuguacaagcagcccggcgugcccgugagauggaagagaugaggacuagucccuguucccagagcccacuuuuuuuucuuuuuuugaaauaaaauagccugucuuucagaucucaaaggcucuuuucagagccaccaaaaaaaaaaaaaaaaaaaaaaaaaaaaaaaaaaaaaaaaaaaaaaaaaaaaaaaaaaaaaaaaaaaaaaaaaaaaaaaaaaaaaaaaaaaaaaaaaaaaa

SEQ ID NO: 33866 - RNA, 1764 nt, Artificial Sequence
  mRNA product Design a-2 (hSL-A100) comprising derived and/or modified sequence from LASV(Togo/2016/7082;Clade VI)__AMR44577__GPCmut8 (opt4)
aggagaguccgcucagccagguugcagaagcggcuuagcguguguccuaaucuucucucugcguguagguaggccugugccgcaaacaagcuuaccaugggccagaucaucaccuucuuccaggaggugccccacgugaucgaggaggugaugaacaucgugcugaucgcccugagccugcuggccauccugaagggcguguacaacguggccaccugcggcaucaucggccuggugaccuuccuguuccugugcggcagaagcugcagccugaucuacaagggcagcuacgagcugcagacccuggagcugaacauggagacccugaacaugugcaugccccugagcugcaccaagaacagcagccaccacuacaucagagugggcaacgagaccggccuggagcugacccugaccaacaccagcaucaucaaccacaaguucugcaaccugagcgacgcccacaagagaaaccuguacgaccacgcccugaugagcauccugagcaccuuccaccugagcauccccaacuucaaccaguacgaggccaugagcugcgacuucaacggcggcaagaucagcgugcaguacaaccugagccacgccuacgccguggacgccgccgagcacugcggcaccguggccaacggcgugcugcagaccuucaugagaauggccuggggcggcagcuacaucgcccuggacagcggcagaggcaacugggacugcaucaugaccagcuaccaguaccugaucauccagaacaccaccugggaggaccacugccaguucagcagacccagccccaucggcuaccugggccugcugagccagagaaccagagacaucuacaucagcagaagacugcugggcaccuucaccuggacccugagcgacagcgagggcaacgagacccccggcggcuacugccugaccagauggaugcugaucgaggccgagcugaagugcuucggcaacaccgccguggccaagugcaacgagaagcacgacgaggaguucugcgacaugcugagacuguucgacuucugcaagcaggccauccagagacugaagagccccgcccagaugagcauccagcugaucaacaaggccgugaacgcccugaucaacgaccagcugaucaugaagaaccaccugagagacaugaugggcauccccuacugcaacuacagcaaguacugcuaccugaaccacaccagcagcggcagaaccagccugcccaagugcugccuggugagcaacggcagcuaccugaacgagacccacuucagcgacgacaucgagcagcaggccgacaacaugaucaccgagaugcugcagaaggaguacaucgacagacagggcaagaccccccugggccugguggaccuguucguguucagcaccagcuucuaccugaucagcaucuuccugcaccugaucaagauccccacccacagacacaucgugggcaagcccugccccaagccccacagacugaaccacaugggcaucugcagcugcggccuguacaagcagcccggcgugcccaccagauggaagagaugaggacuagucccuguucccagagcccacuuuuuuuucuuuuuuugaaauaaaauagccugucuuucagaucucaaaggcucuuuucagagccaccaaaaaaaaaaaaaaaaaaaaaaaaaaaaaaaaaaaaaaaaaaaaaaaaaaaaaaaaaaaaaaaaaaaaaaaaaaaaaaaaaaaaaaaaaaaaaaaaaaaaa

SEQ ID NO: 33867 - RNA, 1764 nt, Artificial Sequence
  mRNA product Design a-2 (hSL-A100) comprising derived and/or modified sequence from LASV(KAK-428;Clade n.d. (VII))__ANH09740__GPCmut8 (opt4)
aggagaguccgcucagccagguugcagaagcggcuuagcguguguccuaaucuucucucugcguguagguaggccugugccgcaaacaagcuuaccaugggccagaucgugaccuucuuccaggaggugccccacgugaucgaggaggugaugaacaucgugcugaucgcccugagccugcuggccauccugaagggccuguacaacuucgccaccugcggcgugaucggccugaucaccuuccugcugcugugcggcagaagcugcagcgccaccuacaagggccaguacgagcugcagacccuggagcugaacauggagagccugaacaugugcaugccccugagcugcaccaagaacaacagccaccacuacaucagagccggcaacaacaccggccuggagcugacccugaccaacaccagcaucaucagccacaaguucugcaaccugagcgacgcccacaagaagaaccuguacgaccacacccugaugagcaucaucaccaccuuccaccugagcauccccaacuucaaccaguacgaggccaugagcugcgacuucaacggcggcaagaucagcauccaguacaaccugagccacagcuacgccggcgacgccgcccagcacugcggcaccguggccaacggcgugcugcagaccuucaugagaauggccuggggcggcagcuaccuggcccuggacagcggcagaagaggcugggacugcaucaucagcagcuaccaguaccugaucauccagaacaccaccugggacgaccacugccaguucagcagacccagccccaucggcuaccugggcuucgugagccagaagaccagagacaucuacaucagcagaagacugcugggcaccuucaccuggacccugagcgacagcgagggccacgacaugcccggcggcuacugccugaccagauggaugcugaucgaggccgaccugaagugcuucggcaacaccgccguggccaagugcaacgagaagcacgacgaggaguucugcgacauguggagacuguucgacuucugcaagcaggccauccagagacugaaggcccccgcccagaugaacauccagcugaucaacaaggccgugaacgcccugaucaacgaccagcugaugaugaagaaccaccugagagacaucaugggcauccccuacugcaacuacagcaaguucugcuaccugaacaacaccaccaccggcagaaccagccugcccagaugcugccugaucagcaacggcagcuaccugaacgagacccacuucagcgacgacaucgagcagcaggccgacaacaugaucaccgagaugcugcagaaggaguacauggacagacagggcaagaccccccugggccugguggaccuguucguguucagcaccagcuucuaccugaucaccaucuuccugcaccuggugaagauccccacccacagacacaucgugggcaagcccugccccaagccccacagacugaaccacaugggcaucugcagcugcggccuguacaagcagcccggcgugcccgugagauggaagagaugaggacuagucccuguucccagagcccacuuuuuuuucuuuuuuugaaauaaaauagccugucuuucagaucucaaaggcucuuuucagagccaccaaaaaaaaaaaaaaaaaaaaaaaaaaaaaaaaaaaaaaaaaaaaaaaaaaaaaaaaaaaaaaaaaaaaaaaaaaaaaaaaaaaaaaaaaaaaaaaaaaaaa

SEQ ID NO: 33868 - RNA, 1764 nt, Artificial Sequence; identical to SEQ ID NO: 33862
  mRNA product Design a-2 (hSL-A100) comprising derived and/or modified sequence from LASV(Pinneo-NIG-1969;Clade I)__AIT17836__GPCmut8 (opt4)

SEQ ID NO: 33869 - RNA, 1764 nt, Artificial Sequence
  mRNA product Design a-2 (hSL-A100) comprising derived and/or modified sequence from LASV(ISTH0009-NIG-2011;Clade II)__AIT17404__GPCmut8 (opt4)
aggagaguccgcucagccagguugcagaagcggcuuagcguguguccuaaucuucucucugcguguagguaggccugugccgcaaacaagcuuaccaugggccagaucaucaccuucuuccaggaggugccccacgugaucgaggaggugaugaacaucgugcugaucgcccugagccugcuggccauccugaagggcaucuacaacguggccaccugcggccuguucggccuggugagcuuccugcugcugugcggcagaagcugcagcaccaccuacaagggcguguacgagcugcagacccuggagcuggacauggccagccugaacaugugcaugccccugagcugcaccaagaacaacagccaccacuacaucauggugggcaacgagaccggccuggagcugacccugaccaacaccagcaucaucaaccacaaguucugcaaccugagcgacgcccacaagaagaaccuguacgaccacgcccugaugagcaucaucagcaccuuccaccugagcauccccaacuucaaccaguacgaggccaugagcugcgacuucaacggcggcaagaucagcgugcaguacaaccugagccacgccuacgccguggacgccgccaaccacugcggcaccaucgccaacggcgugcugcagaccuucaugagaauggccuggggcggcagcuacaucgcccuggacagcggcaagggcagcugggacugcaucaugaccagcuaccaguaccugaucauccagaacaccaccugggaggaccacugccaguucagcagacccagccccaucggcuaccugggccugcugagccagagaaccagagacaucuacaucagcagaagacugcugggcaccuucaccuggacccugagcgacagcgagggcaacgagacccccggcggcuacugccugaccagauggaugcugaucgaggccgagcugaagugcuucggcaacaccgccguggccaagugcaacgagaagcacgacgaggaguucugcgacaugcugagacuguucgacuucugcaagcaggccaucagaagacugaagacccccgcccagaugagcauccagcugaucaacaaggccgugaacgcccugaucaacgaccagcugaucaugaagaaccaccugagagacaucaugggcauccccuacugcaacuacagcaaguacugcuaccugaaccacaccgugaccggcaagaccagccugcccagaugcugccuggugagcaacggcagcuaccugaacgagacccacuucagcgacgacaucgagcagcaggccgacaacaugaucaccgagcugcugcagaaggaguacauggacagacagggcaagaccccccugggccugguggaccuguucguguucagcaccagcuucuaccugaucagcaucuuccugcaccugaucaagauccccacccacagacacaucaccggcaagcccugccccaagccccacagacugaaccacaugggcaucugcagcugcggccuguacaagcaccccggcgugcccgugaaguggaagagaugaggacuagucccuguucccagagcccacuuuuuuuucuuuuuuugaaauaaaauagccugucuuucagaucucaaaggcucuuuucagagccaccaaaaaaaaaaaaaaaaaaaaaaaaaaaaaaaaaaaaaaaaaaaaaaaaaaaaaaaaaaaaaaaaaaaaaaaaaaaaaaaaaaaaaaaaaaaaaaaaaaaaa

SEQ ID NO: 33870 - RNA, 1764 nt, Artificial Sequence
  mRNA product Design a-2 (hSL-A100) comprising derived and/or modified sequence from LASV(ISTH2010-NIG-2012;Clade II)__AIT17482__GPCmut8 (opt4)
aggagaguccgcucagccagguugcagaagcggcuuagcguguguccuaaucuucucucugcguguagguaggccugugccgcaaacaagcuuaccaugggccagaucaucaccuucuuccaggaggugccccacgugaucgaggaggugaugaacaucgugcugaucgcccugagccugcuggccauccugaagggcaucuacaacguggccaccugcggccuguucggccuggugagcuuccugcugcugugcggcagaagcugcagcaccaccuacaagggcguguacgagcugcagacccuggagcuggacauggccagccugaacaugugcaugccccugagcugcaccaagaacaacagccaccacuacaucauggugggcaacgagaccggccuggagcugacccugaccaacaccagcaucaucaaccacaaguucugcaaccugagcgacgcccacaagaagaaccuguacgaccacgcccugaugagcaucaucagcaccuuccaccugagcauccccaacuucaaccaguacgaggccaugagcugcgacuucaacggcggcaagaucagcgugcaguacaaccugagccacgccuacgccguggacgccgccaaccacugcggcaccaucgccaacggcgugcugcagaccuucaugagaauggccuggggcggcagcuacaucgcccuggacagcggcaagggcagcugggacugcaucaugaccagcuaccaguaccugaucauccagaacaucaccugggaggaccacugccaguucagcagacccagccccaucggcuaccugggccugcugagccagagaaccagagacaucuacaucagcagaagacugcugggcaccuucaccuggacccugagcgacagcgagggcaacgagacccccggcggcuacugccugaccagauggaugcugaucgaggccgagcugaagugcuucggcaacaccgccguggccaagugcaacgagaagcacgacgaggaguucugcgacaugcugagacuguucgacuucugcaagcaggccaucagaagacugaagacccccgcccagaugagcauccagcugaucaacaaggccgugaacgcccugaucaacgaccagcugaucaugaagaaccaccugagagacaucaugggcauccccuacugcaacuacagcaaguacugcuaccugaaccacaccgugaccggcaagaccagccugcccagaugcugccuggugagcaacggcagcuaccugaacgagacccacuucagcgacgacaucgagcagcaggccgacaacaugaucaccgagcugcugcagaaggaguacaucgacagacagggcaagaccccccugggccugguggaccuguucguguucagcaccagcuucuaccugaucagcaucuuccugcaccuggugaagauccccacccacagacacguggugggcaagcccugccccaagccccacagacugaaccacaugggcaucugcagcugcggccuguacaagcaccccggcgugcccgugaaguggaagagaugaggacuagucccuguucccagagcccacuuuuuuuucuuuuuuugaaauaaaauagccugucuuucagaucucaaaggcucuuuucagagccaccaaaaaaaaaaaaaaaaaaaaaaaaaaaaaaaaaaaaaaaaaaaaaaaaaaaaaaaaaaaaaaaaaaaaaaaaaaaaaaaaaaaaaaaaaaaaaaaaaaaaa

SEQ ID NO: 33871 - RNA, 1764 nt, Artificial Sequence
  mRNA product Design a-2 (hSL-A100) comprising derived and/or modified sequence from LASV(Lassa virus/H.sapiens-wt/NGA/2015/ISTH_0543;Clade II)__AVO03639__GPCmut8 (opt4)
aggagaguccgcucagccagguugcagaagcggcuuagcguguguccuaaucuucucucugcguguagguaggccugugccgcaaacaagcuuaccaugggccagaucaucaccuucuuccaggaggugccccacgugaucgaggaggugaugaacaucgugcugaucgcccugagccugcuggccauccugaagggcaucuacaacguggccaccugcggccuguucggccuggugagcuuccugcugcugugcggcagaagcugcagcaccaccuacaagggcguguacgagcugcagacccuggagcuggacauggccaaccugaacaugugcaugccccugagcugcaccaagaacaacagccaccacuacaucauggugggcaacgagaccggccuggagcugacccugaccaacaccagcaucaucaaccacaaguucugcaaccugagcgacgcccacaagaagaaccuguacgaccacgcccugaugagcaucaucagcaccuuccaccugagcauccccaacuucaaccaguacgaggccaugagcugcgacuucaacggcggcaagaucagcgugcaguacaaccugagccacaccuacgccguggacgccgccaaccacugcggcaccaucgccaacggcgugcugcagaccuucaugagaauggccuggggcggcagcuacaucgcccuggacagcggcaagggcagcugggacugcaucaugaccagcuaccaguaccuggugauccagaacaccaccugggaggaccacugccaguucagcagacccagccccaucggcuaccugggccugcugagccagagaaccagagacaucuacaucagcagaagacugcugggcaccuucaccuggacccugagcgacagcgagggcaacgagacccccggcggcuacugccugaccagauggaugcugaucgaggccgagcugaagugcuucggcaacaccgccguggccaagugcaacgagaagcacgacgaggaguucugcgacaugcugagacuguucgacuucugcaagcaggccaucagaagacugaagacccccgcccagaugagcauccagcugaucaacaaggccgugaacgcccugaucaacgaccagcugaucaugaagaaccaccugagagacaucaugggcauccccuacugcaacuacagcaaguacugcuaccugaaccacaccgugaccggcaagaccagccugcccagaugcugccuggugagcaacggcagcuaccugaacgagacccacuucagcgacgacaucgagcagcaggccgacaacaugaucaccgagcugcugcagaaggaguacaucgacagacagggcaagaccccccugggccugguggaccuguucguguucagcaccagcuucuaccugaucagcaucuuccugcaccuggugaagauccccacccacagacacaucaccggcaagcccugccccaagccccacagacugaaccacaugggcaucugcagcugcggccuguacaagcaccccggcgugcccgugaaguggaagagaugaggacuagucccuguucccagagcccacuuuuuuuucuuuuuuugaaauaaaauagccugucuuucagaucucaaaggcucuuuucagagccaccaaaaaaaaaaaaaaaaaaaaaaaaaaaaaaaaaaaaaaaaaaaaaaaaaaaaaaaaaaaaaaaaaaaaaaaaaaaaaaaaaaaaaaaaaaaaaaaaaaaaa

SEQ ID NO: 33872 - RNA, 1764 nt, Artificial Sequence
  mRNA product Design a-2 (hSL-A100) comprising derived and/or modified sequence from LASV(Lassa virus/H.sapiens-wt/NGA/2016/ISTH_0009;Clade II)__AVO03571__GPCmut8 (opt4)
aggagaguccgcucagccagguugcagaagcggcuuagcguguguccuaaucuucucucugcguguagguaggccugugccgcaaacaagcuuaccaugggccagaucaucaccuucuuccaggaggugccccacgugaucgaggaggugaugaacaucgugcugaucgcccugagccugcuggccauccugaagggcaucuacaacguggccaccugcggccugcugggccuggugagcuuccugcugcugugcggcagaagcugcagcaccaccuacaagggcguguacgagcugcagacccuggagcuggacauggccagccugaacaugugcaugccccugagcugcaccaagaacaacagccaccacuacaucauggugggcaacgagaccggccuggagcugacccugaccaacaccagcaucaucaaccacaaguucugcaaccugagcgacgcccacaagaagaaccuguacgaccacgcccugaugagcaucaucagcaccuuccaccugagcauccccaacuucaaccaguacgaggccaugagcugcgacuucaacggcggcagaaucagcgugcaguacaaccugagccacagcuacgccguggacgccgccaaccacugcggcaccaucgccaacggcgugcugcagaccuucaugagaauggccuggggcggcagcuacaucgcccuggacagcggcaagggcagcugggacugcaucaugaccagcuaccaguaccugaucauccagaacaccaccugggaggaccacugccaguucagcagacccagccccaucggcuaccugggccugcugagccagagaaccagagacaucuacaucagcagaagacugcugggcaccuucaccuggacccugagcgacagcgagggcaacgagacccccggcggcuacugccugaccagauggaugcugaucgaggccgagcugaagugcuucggcaacaccgccguggccaagugcaacgagaagcacgacgaggaguucugcgacaugcugagacuguucgacuucugcaagcaggccaucagaagacugaagacccccgcccagaugagcauccagcugaucaacaaggccgugaacgcccugaucaacgaccagcugaucaugaagaaccaccugagagacaucaugggcauccccuacugcaacuacagcaaguacugcuaccugaaccacaccgugaccggcaagaccagccugcccagaugcugccuggugagcaacggcagcuaccugaacgagacccacuucagcgacgacaucgagcagcaggccgacaacaugaucaccgagcugcugcagaaggaguacaucgacagacagggcaagaccccccugggccugguggaccuguucguguucagcaccagcuucuaccugaucagcaucuuccugcaccuggugaagauccccacccacagacacaucaccggcaagcccugccccaagccccacagacugaaccacaugggcaucugcagcugcggccuguacaaccaccccggcgugcccgugaaguggaagagaugaggacuagucccuguucccagagcccacuuuuuuuucuuuuuuugaaauaaaauagccugucuuucagaucucaaaggcucuuuucagagccaccaaaaaaaaaaaaaaaaaaaaaaaaaaaaaaaaaaaaaaaaaaaaaaaaaaaaaaaaaaaaaaaaaaaaaaaaaaaaaaaaaaaaaaaaaaaaaaaaaaaaa

SEQ ID NO: 33873 - RNA, 1764 nt, Artificial Sequence
  mRNA product Design a-2 (hSL-A100) comprising derived and/or modified sequence from LASV(Lassa virus/H.sapiens-wt/NGA/2016/ISTH_0017;Clade II)__AVO03567__GPCmut8 (opt4)
aggagaguccgcucagccagguugcagaagcggcuuagcguguguccuaaucuucucucugcguguagguaggccugugccgcaaacaagcuuaccaugggccagaucaucaccuucuuccaggaggugccccacgugaucgaggaggugaugaacaucgugcugaucgcccugagccugcuggccauccugaagggcaucuacaacguggccaccugcggccuguucggccuggugagcuuccugcugcugugcggcagaagcugcagcaccaccuacaagggcguguacgagcugcagacccuggagcuggacauggccagccugaacaugugcaugccccugagcugcaccaagaacaacagccaccacuacaucauggugggcaacgagaccggccuggagcugacccugaccaacaccagcaucaucaaccacaaguucugcaaccugagcgacgcccacaagaagaaccuguacgaccacgcccugaugagcaucaucagcaccuuccaccugagcauccccaacuucaaccaguacgaggccaugagcugcgacuucaacggcggcaagaucagcgugcaguacaaccugagccacaccuacgccaucgacgccgccaaccacugcggcaccaucgccaacggcgugcugcagaccuucaugagaauggccuggggcggcagcuacaucgcccuggacagcggcaagggcagcugggacugcaucaugaccagcuaccaguaccugaucauccagaacaccaccugggaggaccacugccaguucagcagacccagccccaucggcuaccugggccugcugagccagagaaccagagacaucuacaucagcagaagacugcugggcaccuucaccuggacccugagcgacagcgagggcaacgagacccccggcggcuacugccugaccagauggaugcugaucgaggccgagcugaagugcuucggcaacaccgccguggccaagugcaacgagaagcacgacgaggaguucugcgacaugcugagacuguucgacuucugcaagcaggccaucagaagacugaagacccccgcccagaugagcauccagcugaucaacaaggccgugaacgcccugaucaacgaccagcugaucaugaagaaccaccugagagacaucaugggcauccccuacugcaacuacagcaaguacugcuaccugaaccacaccgugaccggcaagaccagccugcccagaugcugccuggugagcaacggcagcuaccugaacgagacccacuucagcgacgacaucgagcagcaggccgacaacaugaucaccgagcugcugcagaaggaguacauggacagacagggcaagaccccccugggccugguggaccuguucguguucagcaccagcuucuaccugaucagcaucuuccugcaccuggugagaauccccacccacagacacgugaucggcaagcccugccccaagccccacagacugaaccacaugggcaucugcagcugcggccuguacaagcaccccggcgugcccgugaaguggaagagaugaggacuagucccuguucccagagcccacuuuuuuuucuuuuuuugaaauaaaauagccugucuuucagaucucaaaggcucuuuucagagccaccaaaaaaaaaaaaaaaaaaaaaaaaaaaaaaaaaaaaaaaaaaaaaaaaaaaaaaaaaaaaaaaaaaaaaaaaaaaaaaaaaaaaaaaaaaaaaaaaaaaaa

SEQ ID NO: 33874 - RNA, 1764 nt, Artificial Sequence
  mRNA product Design a-2 (hSL-A100) comprising derived and/or modified sequence from LASV(Lassa virus/H.sapiens-wt/NGA/2018/ISTH_0959;Clade II)__AVV65099__GPCmut8 (opt4)
aggagaguccgcucagccagguugcagaagcggcuuagcguguguccuaaucuucucucugcguguagguaggccugugccgcaaacaagcuuaccaugggccagaucaucaccuucuuccaggaggugccccacgugaucgaggaggugaugaacaucgugcugaucgcccugagccugcuggccauccugaagggcaucuacaacguggugaccugcggccuguucggccuggugagcuuccugcugcugugcggcagaagcugcagcaccaccuacaagggcguguacgagcugcagacccuggagcuggacauggccagccugaacaugugcaugccccugagcugcaccaagaacaacagccaccacuacaucauggugggcaacgagaccggccuggagcugacccugaccaacaccagcaucaucaaccacaaguucugcaaccugagcgacgcccacaagaagaaccuguacgaccacgcccugaugagcaucaucagcaccuuccaccugagcauccccaacuucaaccaguacgaggccaugagcugcgacuucaacggcggcaagaucagcgugcaguacaaccugagccacgccuacgccaucgacgccgccaaccacugcggcaccaucgccaacggcgugcugcagaccuucaugagaauggccuggggcggcagcuacaucgcccuggacagcggcaagggcagcugggacugcaucaugaccagcuaccaguaccugaucauccagaacaccaccugggaggaccacugccaguucagcagacccagccccaucggcuaccugggccugcugagccagagaaccagagacaucuacaucagcagaagacugcugggcaccuucaccuggacccugagcgacagcgagggcaacgagacccccggcggcuacugccugaccagauggaugcugaucgaggccgagcugaagugcuucggcaacaccgccguggccaagugcaacgagaagcacgacgaggaguucugcgacaugcugagacuguucgacuucugcaagcaggccaucagaagacugaagacccccgcccagaugagcauccagcugaucaacaaggccgugaacgcccugaucaacgaccagcugaucaugaagaaccaccugagagacaucaugggcauccccuacugcaacuacagcaaguacugcuaccugaaccacaccgugaccggcaagaccagccugcccagaugcugccuggugagcaacggcagcuaccugaacgagacccacuucagcgacgacaucgagcagcaggccgacaacaugaucaccgagcugcugcagaaggaguacaucgacagacagggcaagaccccccugggccugguggaccuguucguguucagcaccagcuucuaccugaucagcaucuuccugcaccuggugaagauccccacccacagacacgugaucggcaagcccugccccaagccccacagacugaaccacaugggcaucugcagcugcggccuguacaagcaccccggcgugcccgugaaguggaagagaugaggacuagucccuguucccagagcccacuuuuuuuucuuuuuuugaaauaaaauagccugucuuucagaucucaaaggcucuuuucagagccaccaaaaaaaaaaaaaaaaaaaaaaaaaaaaaaaaaaaaaaaaaaaaaaaaaaaaaaaaaaaaaaaaaaaaaaaaaaaaaaaaaaaaaaaaaaaaaaaaaaaaa

SEQ ID NO: 33875 - RNA, 1764 nt, Artificial Sequence
  mRNA product Design a-2 (hSL-A100) comprising derived and/or modified sequence from LASV(LASV003-NIG-2008;Clade II)__AIT17580__GPCmut8 (opt4)
aggagaguccgcucagccagguugcagaagcggcuuagcguguguccuaaucuucucucugcguguagguaggccugugccgcaaacaagcuuaccaugggccagaucaucaccuucuuccaggaggugccccacgugaucgaggaggugaugaacaucgugcugaucgcccugagccugcuggccauccugaagggcaucuacaacguggccaccugcggccuguucggccuggugagcuuccugcugcugugcggcagaagcugcagcaccaccuacaagggcguguacgagcugcagacccuggagcuggacauggccagccugaacaugugcaugccccugagcugcaccaagaacaacagccaccacuacaucauggugggcaacgagaccggccuggagcugacccugaccaacaccagcaucaucaaccacaaguucugcaaccugagcgacgcccacaagaagaaccuguacgaccacgcccugaugagcaucaucagcaccuuccaccugagcauccccaacuucaaccaguacgaggccaugagcugcgacuucaacggcggcaagaucagcgugcaguacaaccugagccacaccuacgccguggacgccgccaaccacugcggcaccaucgccaacggcgugcugcagaccuucaugagaauggccuggggcggcagcuacaucgcccuggacagcggcaagggcagcugggacugcaucaugaccagcuaccaguaccugaucauccagaacaccaccugggaggaccacugccaguucagcagacccagccccaucggcuaccugggccugcugagccagagaaccagagacaucuacaucagcagaagacugcugggcaccuucaccuggacccugagcgacagcgagagcaacgagacccccggcggcuacugccugaccagauggaugcugaucgaggccgagcugaagugcuucggcaacaccgccguggccaagugcaacgagaagcacgacgaggaguucugcgacaugcugagacuguucgacuucugcaagcaggccaucagaagacugaaggcccccgcccagaugagcauccagcugaucaacaaggccgugaacgcccugaucaacgaccagcugaucaugaagaaccaccugagagacaucaugggcauccccuacugcaacuacagcaaguacugcuaccugaaccacaccgugaccggcagaaccagccugcccagaugcugccuggugagcaacggcagcuaccugaacgagacccacuucagcgacgacaucgagcagcaggccgacaacaugaucaccgagcugcugcagaaggaguacauggacagacagggcaagaccccccugggccugguggaccuguucguguucagcaccagcuucuaccugaucagcaucuuccugcaccuggugaagauccccacccacagacacgugaucggcaagcccugccccaagccccacagacugaaccacaugggcaucugcagcugcggccuguacaagcaccccggcgugcccgugaaguggaagagaugaggacuagucccuguucccagagcccacuuuuuuuucuuuuuuugaaauaaaauagccugucuuucagaucucaaaggcucuuuucagagccaccaaaaaaaaaaaaaaaaaaaaaaaaaaaaaaaaaaaaaaaaaaaaaaaaaaaaaaaaaaaaaaaaaaaaaaaaaaaaaaaaaaaaaaaaaaaaaaaaaaaaa

SEQ ID NO: 33876 - RNA, 1764 nt, Artificial Sequence
  mRNA product Design a-2 (hSL-A100) comprising derived and/or modified sequence from LASV(LASV035-NIG-2009;Clade II)__AIT17588__GPCmut8 (opt4)
aggagaguccgcucagccagguugcagaagcggcuuagcguguguccuaaucuucucucugcguguagguaggccugugccgcaaacaagcuuaccaugggccagaucaucaccuucuuccaggaggugccccacgugaucgaggaggugaugaacaucgugcugaucgcccugagccugcuggccauccugaagggcaucuacaacguggccaccugcggccuguucggccuggugagcuuccugcugcugugcggcagaagcugcagcaccaccuacaagggcguguacgagcugcagacccuggagcuggacauggccagccugaacaugugcaugccccugagcugcaccaagaacaacagccaccacuacaucauggugggcaacgagaccggccuggagcugacccugaccaacaccagcaucaucaaccacaaguucugcaaccugagcgacgcccacaagaagaaccuguacgaccacgcccugaugagcaucaucagcaccuuccaccugagcauccccaacuucaaccaguacgaggccaugagcugcgacuucaacggcggcaagaucagcgugcaguacaaccugagccacgccuacgccguggacgccgccaaccacugcggcaccaucgccaacggcgugcugcagaccuucaugagaauggccuggggcggcagcuacaucgcccuggacagcggcaagggcagcugggacugcaucaugaccagcuaccaguaccugaucauccagaacaccaccugggaggaccacugccaguucagcagacccagccccaucggcuaccugggccugcugagccagagaaccagagacaucuacaucagcagaagacugcugggcaccuucaccuggacccugagcgacagcgagggcaacgagacccccggcggcuacugccugaccagauggaugcugaucgaggccgagcugaagugcuucggcaacaccgccguggccaagugcaacgagaagcacgacgaggaguucugcgacaugcugagacuguucgacuucugcaagcaggccaucagaagacugaaggcccccgcccagaugagcauccagcugaucaacaaggccgugaacgcccugaucaacgaccagcugaucaugaagaaccaccugagagacaucaugggcauccccuacugcaacuacagcaaguacugcuaccugaaccacaccgugaccggcaagaccagccugcccagaugcugccuggugagcaacggcagcuaccugaacgagacccacuucagcgacgacaucgagcagcaggccgacaacaugaucaccgagcugcugcagaaggaguacaucgacagacagggcaagaccccccugggccugguggaccuguucguguucagcaccagcuucuaccugaucagcaucuuccugcaccuggugaagauccccacccacagacacgugaucggcaagcccugccccaagccccacagacugaaccacaugggcaucugcagcugcggccuguacaagcaccccggcgugcccgugaaguggaagagaugaggacuagucccuguucccagagcccacuuuuuuuucuuuuuuugaaauaaaauagccugucuuucagaucucaaaggcucuuuucagagccaccaaaaaaaaaaaaaaaaaaaaaaaaaaaaaaaaaaaaaaaaaaaaaaaaaaaaaaaaaaaaaaaaaaaaaaaaaaaaaaaaaaaaaaaaaaaaaaaaaaaaa

SEQ ID NO: 33877 - RNA, 1764 nt, Artificial Sequence
  mRNA product Design a-2 (hSL-A100) comprising derived and/or modified sequence from LASV(LASV1000-NIG-2009;Clade II)__AIT17782__GPCmut8 (opt4)
aggagaguccgcucagccagguugcagaagcggcuuagcguguguccuaaucuucucucugcguguagguaggccugugccgcaaacaagcuuaccaugggccagaucaucaccuucuuccaggaggugccccacgugaucgaggaggugaugaacaucgugcugaucgcccugagccugcuggccauccugaagggcaucuacaacguggccaccugcggccuguucggccuggugagcuuccugcugcugugcggcagaagcugcagcaccaccuacaagggcguguacgagcugcagacccuggagcuggacauggccagccugaacaugugcaugccccugagcugcaccaagaacaacagccaccacuacaucauggugggcaacgagaccggccuggagcugacccugaccaacaccagcaucaucaaccacaaguucugcaaccugagcgacgcccacaagaagaaccuguacgaccacgcccugaugagcaucaucagcaccuuccaccugagcauccccaacuucaaccaguacgaggccaugagcugcgacuucaacggcggcaagaucagcgugcaguacaaccugagccacaccuacgccguggacgccgccaaccacugcggcaccaucgccaacggcgugcugcagaccuucaugagaauggccuggggcggcagcuacaucgcccuggacagcggcaagggcagcugggacugcaucaugaccagcuaccaguaccugaucauccagaacaccaccugggaggaccacugccaguucagcagacccagccccaucggcuaccugggccugcugagccagagaaccagagacaucuacaucagcagaagacugcugggcaccuucaccuggacccugagcgacagcgagggcaacgagacccccggcggcuacugccugaccagauggaugcugaucgaggccgagcugaagugcuucggcaacaccgccguggccaagugcaacgagaagcacgacgaggaguucugcgacaugcugagacuguucgacuucugcaagcaggccaucaagagacugaagacccccgcccagaugagcauccagcugaucaacaaggccgugaacgcccugaucaacgaccagcugaucaugaagaaccaccugagagacaucaugggcauccccuacugcaacuacagcaaguacugcuaccugaaccacaccgugaccggcaagaccagccugcccagaugcugccuggugagcaacggcagcuaccugaacgagacccacuucagcgacgacaucgagcagcaggccgacaacaugaucaccgagcugcugcagaaggaguacaucgacagacagggcaagaccccccugggccugguggaccuguucguguucagcaccagcuucuaccugaucagcaucuuccugcaccuggugaagauccccacccacagacacguggugggcaagcccugccccaagccccacagacugaaccacaugggcaucugcagcugcggccuguacaagcaccccggcgugcccgugaaguggaagagaugaggacuagucccuguucccagagcccacuuuuuuuucuuuuuuugaaauaaaauagccugucuuucagaucucaaaggcucuuuucagagccaccaaaaaaaaaaaaaaaaaaaaaaaaaaaaaaaaaaaaaaaaaaaaaaaaaaaaaaaaaaaaaaaaaaaaaaaaaaaaaaaaaaaaaaaaaaaaaaaaaaaaa

SEQ ID NO: 33878 - RNA, 1764 nt, Artificial Sequence
  mRNA product Design a-2 (hSL-A100) comprising derived and/or modified sequence from LASV(LASV221-NIG-2010;Clade II)__AIT17624__GPCmut8 (opt4)
aggagaguccgcucagccagguugcagaagcggcuuagcguguguccuaaucuucucucugcguguagguaggccugugccgcaaacaagcuuaccaugggccagaucaucaccuucuuccaggaggugccccacgugaucgaggaggugaugaacaucgugcugaucgcccugagccugcuggccauccugaagggcaucuacaacguggccaccugcggccuguucggccuggugagcuuccugcugcugugcggcagaagcugcagcaccaccuacaagggcguguacgagcugcagacccuggagcuggacauggccagccugaacaugugcaugccccugagcugcaccaagaacaacagccaccacuacaucauggugggcaacgagaccggccuggagcugacccugaccaacaccagcaucaucaaccacaaguucugcaaccugagcgacgcccacaagaagaaccuguacgaccacgcccugaugagcaucaucagcaccuuccaccugagcauccccaacuucaaccaguacgaggccaugagcugcgacuucaacggcggcaagaucagcgugcaguacaaccugagccacaccuacgccaucgacgccgccaaccacugcggcaccaucgccaacggcgugcugcagaccuucaugagaauggccuggggcggcagcuacaucgcccuggacagcggcaagggcagcugggacugcaucaugaccagcuaccaguaccugaucauccagaacaccaccugggaggaccacugccaguucagcagacccagccccaucggcuaccugggccugcugagccagagaaccagagacaucuacaucagcagaagacugcugggcaccuucaccuggacccugagcgacagcgagggcaacgagacccccggcggcuacugccugaccagauggaugcugaucgaggccgagcugaagugcuucggcaacaccgccguggccaagugcaacgagaagcacgacgaggaguucugcgacaugcugagacuguucgacuucugcaagcaggccaucagaagacugaagacccccgcccagaugagcauccagcugaucaacaaggccgugaacgcccugaucaacgaccagcugaucaugaagaaccaccugagagacaucaugggcauccccuacugcaacuacagcaaguacugcuaccugaaccacaccgugaccggcaagaccagccugcccagaugcugccuggugagcaacggcagcuaccugaacgagacccacuucagcgacgacaucgagcagcaggccgacaacaugaucaccgagaugcugcagaaggaguacauggacagacagggcaagaccccccugggccugguggaccuguucguguucagcaccagcuucuaccugaucagcaucuuccugcaccuggugaagauccccacccacagacacgugaucggcaagcccugccccaagccccacagacugaaccacaugggcaucugcagcugcggccuguacaagcaccccggcgugcccgugaaguggaagagaugaggacuagucccuguucccagagcccacuuuuuuuucuuuuuuugaaauaaaauagccugucuuucagaucucaaaggcucuuuucagagccaccaaaaaaaaaaaaaaaaaaaaaaaaaaaaaaaaaaaaaaaaaaaaaaaaaaaaaaaaaaaaaaaaaaaaaaaaaaaaaaaaaaaaaaaaaaaaaaaaaaaaa

SEQ ID NO: 33879 - RNA, 1764 nt, Artificial Sequence
  mRNA product Design a-2 (hSL-A100) comprising derived and/or modified sequence from LASV(LASV237-NIG-2010;Clade II)__AIT17638__GPCmut8 (opt4)
aggagaguccgcucagccagguugcagaagcggcuuagcguguguccuaaucuucucucugcguguagguaggccugugccgcaaacaagcuuaccaugggccagaucaucaccuucuuccaggaggugccccacgugaucgaggaggugaugaacaucgugcugaucgcccugagccugcuggccauccugaagggcaucuacaacguggccaccugcggccuguucggccuggugagcuuccugcugcugugcggcagaagcugcagcaccaccuacaagggcguguacgagcugcagacccuggagcuggacauggccagccugaacaugugcaugccccugagcugcaccaagaacaacagccaccacuacaucauggugggcaacgagaccggccuggagcugacccugaccaacaccagcaucaucaaccacaaguucugcaaccugagcgacgcccacaagaaggaccuguacgaccacgcccugaugagcaucaucagcaccuuccaccugagcauccccaacuucaaccaguacgaggccaugagcugcgacuucaacggcggcaagaucagcgugcaguacaaccugagccacaccuacgccguggacgccgccaaccacugcggcaccaucgccaacggcgugcugcagaccuucaugagaauggccuggggcggcagcuacaucgcccuggacagcggcaagggcagcugggacugcaucaugaccagcuaccaguaccugaucauccagaacaccaccugggaggaccacugccaguucagcagacccagccccaucggcuaccugggccugcugagccagagaaccagagacaucuacaucagcagaagacugcugggcaccuucaccuggacccugagcgacagcgagggcaacgagacccccggcggcuacugccugaccagauggaugcugaucgaggccgagcugaagugcuucggcaacaccgccguggccaagugcaacgagaagcacgacgaggaguucugcgacaugcugagacuguucgacuucugcaagcaggccaucagaagacugaagacccccgcccagaugagcauccagcugaucaacaaggccgugaacgcccugaucaacgaccagcugaucaugaagaaccaccugagagacaucaugggcauccccuacugcaacuacagcaaguacugcuaccugaaccacaccgugaccggcaagaccagccugcccagaugcugccuggugagcaacggcagcuaccugaacgagacccacuucagcgacgacaucgagcagcaggccgacaacaugaucaccgagcugcugcagaaggaguacauggacagacagggcaagaccccccugggccugguggaccuguucguguucagcaccagcuucuaccugaucagcaucuuccugcaccugaucaagauccccacccacagacacaucaccggcaagcccugccccaagccccacagacugaaccacaugggcaucugcagcugcggccuguacaagcaccccggcgugcccgugaaguggaagagaugaggacuagucccuguucccagagcccacuuuuuuuucuuuuuuugaaauaaaauagccugucuuucagaucucaaaggcucuuuucagagccaccaaaaaaaaaaaaaaaaaaaaaaaaaaaaaaaaaaaaaaaaaaaaaaaaaaaaaaaaaaaaaaaaaaaaaaaaaaaaaaaaaaaaaaaaaaaaaaaaaaaaa

SEQ ID NO: 33880 - RNA, 1764 nt, Artificial Sequence
  mRNA product Design a-2 (hSL-A100) comprising derived and/or modified sequence from LASV(LASV253-NIG-2011;Clade II)__AIT17670__GPCmut8 (opt4)
aggagaguccgcucagccagguugcagaagcggcuuagcguguguccuaaucuucucucugcguguagguaggccugugccgcaaacaagcuuaccaugggccagaucaucaccuucuuccaggaggugccccacgugaucgaggaggugaugaacaucgugcugaucgcccugagccugcuggccauccugaagggcaucuacaacguggccaccugcggccuguucggccuggugagcuuccugcugcugugcggcagaagcugcagcaccaccuacaagggcguguacgagcugcagacccuggagcuggacauggccagccugaacaugugcaugccccugagcugcaccaagaacaacagccaccacuacaucauggugggcaacgagaccggccuggagcugacccugaccaacaccagcaucaucaaccacaaguucugcaaccugagcgacgcccacaagaagaaccuguacgaccacgcccugaugagcaucaucagcaccuuccaccugagcauccccaacuucaaccaguacgaggccaugagcugcgacuucaacggcggcaagaucagcgugcaguacaaccugagccacaccuacgccguggacgccgccaaccacugcggcaccaucgccaacggcgugcugcagaccuucaugagaauggccuggggcggcagcuacaucgcccuggacagcggcaagggcagcugggacugcaucaugaccagcuaccaguaccugaucauccagaacaccaccugggaggaccacugccaguucagcagacccagccccaucggcuaccugggccugcugagccagagaaccagagacaucuacaucagcagaagacugcugggcaccuucaccuggacccugagcgacagcgagggcaacgagacccccggcggcuacugccugaccagauggaugcugaucgaggccgagcugaagugcuucggcaacaccgccguggccaagugcaacgagaagcacgacgaggaguucugcgacaugcugagacuguucgacuucugcaagcaggccaucagaagacugaaggcccccgcccagaugagcauccagcugaucaacaaggccgugaacgcccugaucaacgaccagcugaucaugaagaaccaccugagagacaucaugggcauccccuacugcaacuacagcaaguacugcuaccugaaccacaccgugaccggcagaaccagccugcccagaugcugccuggugagcaacggcagcuaccugaacgagacccacuucagcgacgacaucgagcagcaggccgacaacaugaucaccgagcugcugcagaaggaguacaucgacagacagggcaagaccccccugggccugguggaccuguucguguucagcaccagcuucuaccugaucagcaucuuccugcaccuggugaagauccccacccacagacacaucaucggcaagcccugccccaagccccacagacugaaccacaugggcaucugcagcugcggccuguacaagcaccccggcgugcccgugaaguggaagagaugaggacuagucccuguucccagagcccacuuuuuuuucuuuuuuugaaauaaaauagccugucuuucagaucucaaaggcucuuuucagagccaccaaaaaaaaaaaaaaaaaaaaaaaaaaaaaaaaaaaaaaaaaaaaaaaaaaaaaaaaaaaaaaaaaaaaaaaaaaaaaaaaaaaaaaaaaaaaaaaaaaaaa

SEQ ID NO: 33881 - RNA, 1764 nt, Artificial Sequence
  mRNA product Design a-2 (hSL-A100) comprising derived and/or modified sequence from LASV(LASV254-NIG-2011;Clade II)__AIT17674__GPCmut8 (opt4)
aggagaguccgcucagccagguugcagaagcggcuuagcguguguccuaaucuucucucugcguguagguaggccugugccgcaaacaagcuuaccaugggccagaucaucaccuucuuccaggaggugccccacgugaucgaggaggugaugaacaucgugcugaucgcccugagccugcuggccauccugaagggcaucuacaacguggccaccugcggccuguucggccuggugagcuuccugcugcugugcggcagaagcugcagcaccaccuacaagggcguguacgagcugcagacccuggagcuggacaugaccaaccugaacaugugcaugccccugagcugcaccaagaacaacagccaccacuacaucauggugggcaacgagaccggccuggagcugacccugaccaacaccagcaucaucaaccacaaguucugcaaccugagcgacgcccacaagaagaaccuguacaaccacgcccugaugagcaucaucagcaccuuccaccugagcauccccaacuucaaccaguacgaggccaugagcugcgacuucaacggcggcaagaucagcgugcaguacaaccugagccacagcuacgccguggacgccgccaaccacugcggcaccaucgccaacggcgugcugcagaccuucaugagaauggccuggggcggcagcuacaucgcccuggacagcggcaagggcaacugggacugcaucaugaccagcuaccaguaccugaucauccagaacaccaccugggaggaccacugccaguucagcagacccagccccaucggcuaccugggccugcugagccagagaaccagagacaucuacaucagcagaagacugcugggcaccuucaccuggacccugagcgacagcgagggcaacgagacccccggcggcuacugccugaccagauggaugcugaucgaggccgagcugaagugcuucggcaacaccgccguggccaagugcaacgagaagcacgacgaggaguucugcgacaugcugagacuguucgacuucugcaagcaggccaucagaagacugaagacccccgcccaggccaacauccagcugaucaacaaggccgugaacgcccugaucaacgaccagcugaucaugaagaaccaccugagagacaucaugggcauccccuacugcaacuacagcaaguacugcuaccugaaccacaccgugaccggcaagaccagccugcccagaugcugccuggugagcaacggcagcuaccugaacgagacccacuucagcgacgacaucgagcagcaggccgacaacaugaucaccgagcugcugcagaaggaguacauggacagacagggcaagaccccccugggccugguggaccuguucguguucagcaccagcuucuaccugaucagcaucuuccugcaccuggugaagauccccacccacagacacgugaucggcaagcccugccccaagccccacagacugaaccacaugggcaucugcagcugcggccuguacaagcaccccggcgugcccgugaaguggaagagaugaggacuagucccuguucccagagcccacuuuuuuuucuuuuuuugaaauaaaauagccugucuuucagaucucaaaggcucuuuucagagccaccaaaaaaaaaaaaaaaaaaaaaaaaaaaaaaaaaaaaaaaaaaaaaaaaaaaaaaaaaaaaaaaaaaaaaaaaaaaaaaaaaaaaaaaaaaaaaaaaaaaaa

SEQ ID NO: 33882 - RNA, 1764 nt, Artificial Sequence
  mRNA product Design a-2 (hSL-A100) comprising derived and/or modified sequence from LASV(Nig08-A19;Clade III)__ADU56618__GPCmut8 (opt4)
aggagaguccgcucagccagguugcagaagcggcuuagcguguguccuaaucuucucucugcguguagguaggccugugccgcaaacaagcuuaccaugggccagaucgugaccuucuuccaggaggugccccacgugaucgaggaggugaugaacaucgugcugaucgcccugagcauccuggccauccugaagggccuguacaacaucgccaccugcggccugaucggccuggugaccuuccugcugcugagcggcagaagcugcagcaugaccuacaagggcguguacgagcugcagacccuggagcugaacaugaacacccugaacaugugcaugccccugagcugcaccaagaacaacagccaccacuacaucauggugggcaacgagaccggccuggagcugacccugaccaacaccagccugcugcaccacaaguucugcaaccugagcgacgcccacaagaagaaccuguacgaccacacccugaugagcaucaucagcaccuuccaccugagcauccccaacuucaaccaguacgaggccaugagcugcgacuucaacggcggcaagaucaccgugcaguacaaccugagccacagcuacgccaucgacgccgccaaccacugcggcaccguggccaacggcgugcugcagaccuucaugagaauggccuggggcggcagcuacaucgcccuggacagcggcagaggcaagugggacugcaucaugaccagcuaccaguaccugaucauccagaacaccaccugggaggaccacugccaguucagcagacccagccccaucggcuaccugggccugcugagccagagaaccagagacaucuacaucagcagaagacugcugggcaccuucaccuggacccugagcgacagcgagggcaacgagacccccggcggcuacugccugaccagauggaugcugaucgaggccgagcugaagugcuucggcaacaccgccguggccaagugcaacgagaagcacgacgaggaguucugcgacaugcugagacuguucgacuucugcaagcaggccaucagaagacugaaggcccccgcccagaugagcauccagcugaucaacaaggccgugaacgcccugaucaacgaccagcugaucaugaagaaccaccugagagacaucaugggcauccccuacugcaacuacagcaaguacugcuaccugaaccacaccagcaccggcagaaccagccugcccagaugcugccuggugagcaacggcagcuaccugaacgagacccacuucagcgacgacaucgagcagcaggccgacaacaugaucaccgagaugcugcagaaggaguaccuggacagacagggcaagaccccccugggccugguggaccuguucguguucagcaccagcuucuaccugaucagcaucuuccugcaccuggugaagauccccacccacagacacaucgugggcaagcccugccccaagccccacagacugaaccacaugggcaucugcagcugcggccuguacaagcagcccggcgugcccgugagauggaagagaugaggacuagucccuguucccagagcccacuuuuuuuucuuuuuuugaaauaaaauagccugucuuucagaucucaaaggcucuuuucagagccaccaaaaaaaaaaaaaaaaaaaaaaaaaaaaaaaaaaaaaaaaaaaaaaaaaaaaaaaaaaaaaaaaaaaaaaaaaaaaaaaaaaaaaaaaaaaaaaaaaaaaa

SEQ ID NO: 33883 - RNA, 1767 nt, Artificial Sequence
  mRNA product Design a-2 (hSL-A100) comprising derived and/or modified sequence from LASV(G1180-SLE-2010;Clade IV)__AIT17168__GPCmut8 (opt4)
aggagaguccgcucagccagguugcagaagcggcuuagcguguguccuaaucuucucucugcguguagguaggccugugccgcaaacaagcuuaccaugggccagaucgugaccuucuuccaggaggugccccacgugaucgaggaggugaugaacaucgugcugaucgcccugagcauccuggccgugcugaagggccuguacaacuucgccaccugcggccuggugggccugcugaccuuccugcugcugugcggcagaagcugcaccgccagcagauacaagggcguguacgagcugcagacccuggagcugaacauggagacccugaacaugugcaugccccugagcugcaccaagaacaacagccaccacuacaucauggugggcaacgagaccggccuggagcugacccugaccaacaccagcaucaucaaccacaaguucugcaaccugagcgacgcccacaagaagaaccuguacgaccacgcccugaugagcaucaucagcaccuuccaccugagcauccccaacuucaaccaguacgaggccaugagcugcgacuucaacggcggcaagaucagcgugcaguacaaccugagccacagcuacgccggcgacgccgccaaccacugcggcaccguggccaacggcgugcugcagaccuucaugagaauggccuggggcggcagcuacaucgcccuggacagcggccacggcagcugggacugcaucaugaccagcuaccaguaccugaucauccagaacaccaccugggaggaccacugccaguucagcagacccagccccaucggcuaccugggccugcugagccagagaaccagagacaucuacaucagcagaagacugcugggcaccuucaccuggacccugagcgacagcgagggcaaggacacccccggcggcuacugccugaccagauggaugcugaucgaggccgagcugaagugcuucggcaacaccgccguggccaagugcaacgagaagcacgacgaggaguucugcgacaugcugagacuguucgacuucugcaagcaggccauccagagacugaaggcccccgcccagaugagcauccagcugaucaacaaggccgugaacgcccugaucaacgaccagcugaucaugaagaaccaccugagagacaucaugggcauccccuacugcaacuacagcaaguacugcuaccugaaccacaccaccaccggcaagaccagccugcccaagugcugccuggugagcaacggcagcuaccugaacgagacccacuucagcgacgacaucgagcagcaggccgacaacaugaucaccgagaugcugcagaaggaguacauggagagacagggcaagaccccccugggccugguggaccuguucguguucagcaccagcuucuaccugaucagcaucuuccugcaccuggugaagauccccacccacagacacaucgugggcaagagcugccccaagccccacagacugaaccacaugggcaucugcagcugcggccuguacaagcagcccggcgugcccgugaaguggaagagaugaggacuagucccuguucccagagcccacuuuuuuuucuuuuuuugaaauaaaauagccugucuuucagaucucaaaggcucuuuucagagccaccaaaaaaaaaaaaaaaaaaaaaaaaaaaaaaaaaaaaaaaaaaaaaaaaaaaaaaaaaaaaaaaaaaaaaaaaaaaaaaaaaaaaaaaaaaaaaaaaaaaaa

SEQ ID NO: 33884 - RNA, 1767 nt, Artificial Sequence
  mRNA product Design a-2 (hSL-A100) comprising derived and/or modified sequence from LASV(G1442-SLE-2011;Clade IV)__AIT17180__GPCmut8 (opt4)
aggagaguccgcucagccagguugcagaagcggcuuagcguguguccuaaucuucucucugcguguagguaggccugugccgcaaacaagcuuaccaugggccagaucgugaccuucuuccaggaggugccccacgugaucgaggaggugaugaacaucgugcugaucgcccugagcauccuggccgugcugaagggccuguacaacguggccaccugcggccugaucggccuggugaccuuccugcugcugugcggcagaagcugcaccaccacccuguacaagggcguguacgagcugcagacccuggagcugaacauggagacccugaacaugugcaugccccugagcugcaccaagaacaacagccaccacuacaucagagugggcaacgagaccggccuggagcugacccugaccaacaccagcaucaucaaccacaaguucugcaaccugagcgacgcccacaagaagaaccuguacgaccacgcccugaugagcaucaucagcaccuuccaccugagcauccccaacuucaaccaguacgaggccaugagcugcgacuucaacggcggcaagaucagcgugcaguacaaccugagccacagcuacgccggcgacgccgccaaccacugcggcaccguggccaacggcgugcugcagaccuucaugagaauggccuggggcggcagcuacaucgcccuggacagcggcagaggcaacugggacugcaucaugaccagcuaccaguaccugaucauccagaacaccaccugggacgaccacugccaguucagcagacccagccccaucggcuaccugggccugcugagccagagaaccagagacguguacaucagcagaagacugcugggcaccuucaccuggacccugagcgacagcgagggcaaggacacccccggcggcuacugccugaccagauggaugcugaucgaggccgagcugaagugcuucggcaacaccgccguggccaagugcaacgagaagcacgacgaggaguucugcgacaugcugagacuguucgacuucugcaagcaggccauccagagacugaaggcccccgcccagaugagcauccagcugaucaacaaggccgugaacgcccugaucaacgaccagcugaucaugaagaaccaccugagagacaucaugggcauccccuacugcaacuacagcaaguacugcuaccugaacaacaccgccaccggcaagaccagccugcccaagugcugccugaucagcaacggcagcuaccugaacgagacccacuucagcgacgacaucgagcaggaggccgacaacaugaucaccgagaugcugcagaaggaguacauggagagacagggcaagaccccccugggccugguggaccuguucguguucagcaccagcuucuaccugaucagcaucuuccugcaccuggugaagauccccacccacagacacaucgugggcaagagcugccccaagccccacagacugaaccacaugggcaucugcagcugcggccuguacaagcagcccggcgugcccgugagauggaagagaugaggacuagucccuguucccagagcccacuuuuuuuucuuuuuuugaaauaaaauagccugucuuucagaucucaaaggcucuuuucagagccaccaaaaaaaaaaaaaaaaaaaaaaaaaaaaaaaaaaaaaaaaaaaaaaaaaaaaaaaaaaaaaaaaaaaaaaaaaaaaaaaaaaaaaaaaaaaaaaaaaaaaa

SEQ ID NO: 33885 - RNA, 1767 nt, Artificial Sequence
  mRNA product Design a-2 (hSL-A100) comprising derived and/or modified sequence from LASV(G3010-SLE-2013;Clade IV)__AIT17344__GPCmut8 (opt4)
aggagaguccgcucagccagguugcagaagcggcuuagcguguguccuaaucuucucucugcguguagguaggccugugccgcaaacaagcuuaccaugggccagaucgugaccuucuuccaggaggugccccacgugaucgaggaggugaugaacaucgugcugaucgcccugagcauccuggccgugcugaagggccuguacaacuucgccaccugcggccuggugggccuggugaccuuccugcugcugugcggcagaagcugcaccaccagccuguacaagggcguguacgagcugcagacccuggagcugaacauggagacccugaacaugugcaugccccugagcugcaccaagaacaacagccaccacuacaucauggugggcaacgagaccggccuggagcugacccugaccaacaccagcaucaucaaccacaaguucugcaaccugagcgacgcccacaagaagaaccuguacaaccacgcccugaugagcaucaucagcaccuuccaccugagcauccccaacuucaaccaguacgaggccaugagcugcgacuucaacggcggcaagaucagcgugcaguacaaccugagccacagcuacgccggcgacgccgccagccacugcggcaccguggccaacggcgugcugcagaccuucaugagaauggccuggggcggcagcuacaucgcccuggacagcggcuacggcaagugggacugcaucaugaccagcuaccaguaccugaucauccagaacaccaccugggaggaccacugccaguucagcagacccagccccaucggcuaccugggccugcugagccagagaaccagagacaucuacaucagcagaagacugcugggcaccuucaccuggacccugagcgacagcgagggcaaggacacccccggcggcuacugccugaccagauggaugcugaucgaggccgagcugaagugcuucggcaacaccgccguggccaagugcaacgagaagcacgacgaggaguucugcgacaugcugagacuguucgacuucugcaagcaggccauccagagacugaagacccccgcccagaugagcauccagcugaucaacaaggccgugaacgcccugaucaacgaccagcugaucaugaagaaccaccugagagacaucaugggcauccccuacugcaacuacagcaaguacugcuaccugaaccacaccaccaccggcaagaccagccugcccaagugcugccuggugagcaacggcagcuaccugaacgagacccacuucagcgacgacaucgagcagcaggccgacaacaugaucaccgagaugcugcagaaggaguacauggagagacagggcaagaccccccugggccugguggaccuguucguguucagcaccagcuucuaccugaucagcaucuuccugcaccuggugaagauccccacccacagacacaucgugggcaagagcugccccaagccccacagacugaaccacaugggcaucugcagcugcggccuguacaagcagcccggcgugcccgugagauggaagagaugaggacuagucccuguucccagagcccacuuuuuuuucuuuuuuugaaauaaaauagccugucuuucagaucucaaaggcucuuuucagagccaccaaaaaaaaaaaaaaaaaaaaaaaaaaaaaaaaaaaaaaaaaaaaaaaaaaaaaaaaaaaaaaaaaaaaaaaaaaaaaaaaaaaaaaaaaaaaaaaaaaaaa

SEQ ID NO: 33886 - RNA, 1767 nt, Artificial Sequence
  mRNA product Design a-2 (hSL-A100) comprising derived and/or modified sequence from LASV(G502-SLE-2009;Clade IV)__AIT17126__GPCmut8 (opt4)
aggagaguccgcucagccagguugcagaagcggcuuagcguguguccuaaucuucucucugcguguagguaggccugugccgcaaacaagcuuaccaugggccagaucgugaccuucuuccaggaggugccccacgugaucgaggaggugaugaacaucgugcugaucgcccugagcauccuggccgugcugaagggccuguacaacuucgccaccugcggccuggugggccugcugaccuuccugcugcugugcggcagaagcugcaccaccggccuguacaagggcguguacgagcugcagacccuggagcugaacauggagacccugaacaugugcaugccccugagcugcaccaagaacaacagccaccacuacaucauggugggcaacgagaccggccuggagcugacccugaccaacaccagcaucaucaaccacaaguucugcaaccugagcgacgcccacaagaagaaccuguacgaccacgcccugaugagcaucaucagcaccuuccaccugagcauccccaacuucaaccaguacgaggccaugagcugcgacuucaacggcggcaagaucagcgugcaguacaaccugagccacagcuacgccggcgacgccgccgaccacugcggcaccguggccaacggcgugcugcagaccuucaugagaauggccuggggcggcagcuacaucgcccuggacagcggcagaggcagaugggacugcaucaugaccagcuaccaguaccugaucauccagaacaccaccugggaggaccacugccaguucagcagacccagccccaucggcuaccugggccugcugagccagagaaccagagacaucuacaucagcagaagacugcugggcaccuucaccuggacccugagcgacagcgagggcaaggacacccccggcggcuacugccugaccagauggaugcugaucgaggccgagcugaagugcuucggcaacaccgccguggccaagugcaacgagaagcacgacgaggaguucugcgacaugcugagacuguucgacuucugcaagcaggccauccagagacugaaggcccccgcccagaugagcauccagcugaucaacaaggccgugaacgcccugaucaacgaccagcuggugaugaagaaccaccugagagacaucaugggcauccccuacugcaacuacagcagauacugcuaccugaaccacaccaccaccggcagaaccagccugcccaagugcugccuggugagcaacggcagcuaccugaacgagacccacuucagcgacgacaucgagcagcaggccgacaacaugaucaccgagaugcugcagaaggaguacauggagagacagggcaagaccccccugggccugguggaccuguucguguucagcaccagcuucuaccugaucagcaucuuccugcaccuggugaagauccccacccacagacacaucgugggcaagagcugccccaagccccacagacugaaccacaugggcaucugcagcugcggccuguacaagcagcccggcgugcccgugaaguggaagagaugaggacuagucccuguucccagagcccacuuuuuuuucuuuuuuugaaauaaaauagccugucuuucagaucucaaaggcucuuuucagagccaccaaaaaaaaaaaaaaaaaaaaaaaaaaaaaaaaaaaaaaaaaaaaaaaaaaaaaaaaaaaaaaaaaaaaaaaaaaaaaaaaaaaaaaaaaaaaaaaaaaaaa

SEQ ID NO: 33887 - RNA, 1767 nt, Artificial Sequence
  mRNA product Design a-2 (hSL-A100) comprising derived and/or modified sequence from LASV(G733-SLE-2010;Clade IV)__AIT17154__GPCmut8 (opt4)
aggagaguccgcucagccagguugcagaagcggcuuagcguguguccuaaucuucucucugcguguagguaggccugugccgcaaacaagcuuaccaugggccagaucgugaccuucuuccaggaggugccccacgugaucgaggaggugaugaacaucgugcugaucgcccugagcauccuggccgugcugaagggccuguacaacuucgccaccugcggcaucgugggccuggugagcuuccugcugcugugcggcagaagcugcaccaccagccuguacaagggcguguacgagcugcagacccuggagcugaacauggagacccugaacaugugcaugccccugagcugcaccaagaacaacagccaccacuacaucauggugggcaacgagaccggccuggagcugacccugaccaacaccagcaucaucaaccacaaguucugcaaccugagcgacgcccacaagaagaaccuguacgaccacgcccugaugagcaucaucagcaccuuccaccugagcauccccaacuucaaccaguacgaggccaugagcugcgacuucaacggcggcaagaucagcgugcaguacaaccugagccacagcuacgccggcgacgccgccaaccacugcggcaccaucgccaacggcgugcugcagaccuucaugagaauggccuggggcggcagcuacaucgcccuggacagcggcagagacagaugggacugcaucaugaccagcuaccaguaccugaucauccagaacaccaccugggaggaccacugccaguucagcagacccagccccaucggcuaccugggccugcugagccagagaaccagagacaucuacaucagcagaagacugcugggcaccuucaccuggacccugagcgacagcgagggcaaggacacccccggcggcuacugccugaccagauggaugcugaucgaggccgagcugaagugcuucggcaacaccgccguggccaagugcaacgagaagcacgacgaggaguucugcgacaugcugagacuguucgacuucugcaagcaggccauccagagacugaaggcccccgcccagaugagcauccagcugaucaacaaggccgugaacgcccugaucaacgaccagcugaucaugaagaaccaccugagagacaucaugggcauccccuacugcaacuacagcaaguacugcuaccugaaccacaccaccaccggcaagaccagccugcccaagugcugccuggugagcaacggcagcuaccugaacgagacccacuucagcgacgacaucgagcagcaggccgacaacaugaucaccgagaugcugcagaaggaguacauggagagacagggcaagaccccccugggccugguggaccuguucguguucagcaccagcuucuaccugaucagcaucuuccugcaccuggugaagauccccacccacagacacguggugggcaagagcugccccaagccccacagacugaaccacaugggcaucugcagcugcggccuguacggccagcccggcgugcccgugaaguggaagagaugaggacuagucccuguucccagagcccacuuuuuuuucuuuuuuugaaauaaaauagccugucuuucagaucucaaaggcucuuuucagagccaccaaaaaaaaaaaaaaaaaaaaaaaaaaaaaaaaaaaaaaaaaaaaaaaaaaaaaaaaaaaaaaaaaaaaaaaaaaaaaaaaaaaaaaaaaaaaaaaaaaaaa

SEQ ID NO: 33888 - RNA, 1767 nt, Artificial Sequence
  mRNA product Design a-2 (hSL-A100) comprising derived and/or modified sequence from MOPV/LASV reassortant(IGS-1;Clade IV)__AFY05576__GPCmut8 (opt4)
aggagaguccgcucagccagguugcagaagcggcuuagcguguguccuaaucuucucucugcguguagguaggccugugccgcaaacaagcuuaccaugggccagaucgugaccuucuuccaggaggugccccacgugaucgaggaggugaugaacaucgugcugaucgcccugagcgugcuggccgugcugaagggccuguacaacuucgccaccugcggccuggugggccuggugaccuuccugcugcugugcggcagaagcugcaccaccagccuguacaagggcguguacgagcugcagacccuggagcugaacauggagacccugaacaugugcaugccccugagcugcaccaagaacaacagccaccacuacaucauggugggcaacgagaccggccuggagcugacccugaccaacaccagcaucaucaaccacaaguucugcaaccugagcgacgcccacaagaagaaccuguacgaccacgcccugaugagcaucaucagcaccuuccaccugagcauccccaacuucaaccaguacgaggccaugagcugcgacuucaacggcggcaagaucagcgugcaguacaaccugagccacagcuacgccggcgacgccgccaaccacugcggcaccguggccaacggcgugcugcagaccuucaugagaauggccuggggcggcagcuacaucgcccuggacagcggcagaggcaacugggacugcaucaugaccagcuaccaguaccugaucauccagaacaccaccugggaggaccacugccaguucagcagacccagccccaucggcuaccugggccugcugagccagagaaccagagacaucuacaucagcagaagacugcugggcaccuucaccuggacccugagcgacagcgagggcgaggacacccccggcggcuacugccugaccagauggaugcugaucgaggccgagcugaagugcuucggcaacaccgccguggccaagugcaacgagaagcacgacgaggaguucugcgacaugcugagacuguucgacuucugcaagcaggccauccagagacugaaggcccccgcccagaugagcauccagcugaucaacaaggccgugaacgcccugaucaacgaccagcugaucaugaagaaccaccugagagacaucaugggcauccccuacugcaacuacagcaaguacugcuaccugaaccacaccaccaccggcagaaccagccugcccaagugcugccuggugagcaacggcagcuaccugaacgagacccacuucagcgacgacaucgagcagcaggccgacaacaugaucaccgagaugcugcagaaggaguacauggagagacagggcaagaccccccugggccugguggaccuguucguguucagcaccagcuucuaccugaucagcaucuuccugcaccuggugaagauccccacccacagacacaucgugggcaagagcugccccaagccccacagacugaaccacaugggcaucugcagcugcggccuguacaagcagcccggcgugcccgugaaguggaagagaugaggacuagucccuguucccagagcccacuuuuuuuucuuuuuuugaaauaaaauagccugucuuucagaucucaaaggcucuuuucagagccaccaaaaaaaaaaaaaaaaaaaaaaaaaaaaaaaaaaaaaaaaaaaaaaaaaaaaaaaaaaaaaaaaaaaaaaaaaaaaaaaaaaaaaaaaaaaaaaaaaaaaa

SEQ ID NO: 33889 - RNA, 1767 nt, Artificial Sequence
  mRNA product Design a-2 (hSL-A100) comprising derived and/or modified sequence from LASV(LM765-SLE-2012;Clade IV)__AIT17814__GPCmut8 (opt4)
aggagaguccgcucagccagguugcagaagcggcuuagcguguguccuaaucuucucucugcguguagguaggccugugccgcaaacaagcuuaccaugggccagaucgugaccuucuuccaggaggugccccacgugaucgaggaggugaugaacaucgugcugaucgcccugagcauccuggccgugcugaagggccuguacaacuucgccaccugcggccuggugggccuggugaccuuccugcugcugugcggcagaagcugcaccaccagccuguacaagggcguguacgagcugcagacccuggagcugaacauggagacccugaacaugugcaugccccugagcugcaccaagaacaacagccaccacuacaucauggugggcaacgagaccggccuggagcugacccugaccaacaccagcaucaucgaccacaaguucugcaaccugagcgacgcccacagaaagaaccuguacgaccacgcccugaugagcaucaucagcaccuuccaccugagcauccccaacuucaaccaguacgaggccaugagcugcgacuucaacggcggcaagaucagcgugcaguacaaccugagccacagcuacgccaaggacgccgccgaccacugcggcaccguggccaacggcgugcugcagaccuucaugagaauggccuggggcggcagcuacaucgcccuggacagcggcagaggcagaugggacugcaucaugaccagcuaccaguaccugaucauccagaacaccaccugggaggaccacugccaguucagcagacccagccccaucggcuaccugggccugcugagccagagaaccagagacaucuacaucagcagaagacugcugggcaccuucaccuggacccugagcgacagcgagggcaaggacacccccggcggcuacugccugaccagauggaugcugaucgaggccgagcugaagugcuucggcaacaccgccguggccaagugcaacgagaagcacgacgaggaguucugcgacaugcugagacuguucgacuucugcaagcaggccauccagagacugaaggcccccgcccagaugagcauccagcugaucaacaaggccgugaacgcccugaucaacgaccagcugaucaugaagaaccaccugagagacaucaugggcauccccuacugcaacuacagcaaguacugcuaccugaaccacaccaccaccggcaagaccagccugcccaagugcugccuggugagcaacggcagcuaccugaacgagacccacuucagcgacgacaucgagcagcaggccgacaacaugaucaccgagaugcugcagaaggaguacauggagagacagggcaagaccccccugggccugguggaccuguucguguucagcaccagcuucuaccugaucagcaucuuccugcaccuggugaagauccccacccacagacacaucgugggcaagcccugccccaagccccacagacugaaccacaugggcaucugcagcugcggccuguacaagcagcccggcgugcccgugaaguggaagagaugaggacuagucccuguucccagagcccacuuuuuuuucuuuuuuugaaauaaaauagccugucuuucagaucucaaaggcucuuuucagagccaccaaaaaaaaaaaaaaaaaaaaaaaaaaaaaaaaaaaaaaaaaaaaaaaaaaaaaaaaaaaaaaaaaaaaaaaaaaaaaaaaaaaaaaaaaaaaaaaaaaaaa

SEQ ID NO: 33890 - RNA, 1767 nt, Artificial Sequence
  mRNA product Design a-2 (hSL-A100) comprising derived and/or modified sequence from LASV(LM776-SLE-2012;Clade IV)__AIT17824__GPCmut8 (opt4)
aggagaguccgcucagccagguugcagaagcggcuuagcguguguccuaaucuucucucugcguguagguaggccugugccgcaaacaagcuuaccaugggccagaucgugaccuucuuccaggaggugccccacgugaucgaggaggugaugaacaucgugcugaucgcccugagcauccuggccgugcugaagggccuguacaacuucgccaccugcggccuggugggccuggugaccuuccugcugcugugcggcagaagcugcaccaccagcguguacaagggcguguacgagcugcagacccuggagcugaacauggagacccugaacaugugcaugccccugagcugcaccaagaacaacagccaccacuacaucauggugggcaacgagaccggccuggagcugacccugaccaacaccagcaucaucaaccacaaguucugcaaccugagcgacgcccacaagaagaaccuguacgaccacgcccugaugagcaucaucagcaccuuccaccugagcauccccaacuucaaccaguacgaggccaugagcugcgacuucaacggcggcaagaucagcgugcaguacaaccugagccacagcuacgccggcgacgccgccaaccacugcggcaccguggccaacggcgugcugcagaccuucaugagaauggccuggggcggcagcuacaucgcccuggacagcggccacggcaagugggacugcaucaugaccagcuaccaguaccugaucauccagaacaccaccugggaggaccacugccaguucagcagacccagccccaucggcuaccugggccugcugagccagagaaccagagacaucuacaucagcagaagacugcugggcaccuucaccuggacccugagcgacagcgagggcaaggacacccccggcggcuacugccugaccagauggaugcugaucgaggccgagcugaagugcuucggcaacaccgccguggccaagugcaacgagaagcacgacgaggaguucugcgacaugcugagacuguucgacuucugcaagcaggccauccagagacugaaggcccccgcccagaugagcauccagcugaucaacaaggccgugaacgcccugaucaacgaccagcugaucaugaagaaccaccugagagacaucaugggcauccccuacugcaacuacagcaaguacugcuaccugaaccacaccaccaccggcaagaccagccugcccaagugcugccuggugagcaacggcagcuaccugaacgagacccacuucagcgacgacaucgagcagcaggccgacaacaugaucaccgagaugcugcagaaggaguacauggagagacagggcaagaccccccugggccugguggaccuguucguguucagcaccagcuucuaccugaucagcaucuuccugcaccuggugaagauccccacccacagacacaucgugggcaagagcugccccaagccccacagacugaaccacaugggcaucugcagcugcggccuguacaagcagcccggcgugcccgugagauggaagagaugaggacuagucccuguucccagagcccacuuuuuuuucuuuuuuugaaauaaaauagccugucuuucagaucucaaaggcucuuuucagagccaccaaaaaaaaaaaaaaaaaaaaaaaaaaaaaaaaaaaaaaaaaaaaaaaaaaaaaaaaaaaaaaaaaaaaaaaaaaaaaaaaaaaaaaaaaaaaaaaaaaaaa

SEQ ID NO: 33891 - RNA, 1767 nt, Artificial Sequence
  mRNA product Design a-2 (hSL-A100) comprising derived and/or modified sequence from LASV(Mad39;Clade IV)__ANH09722__GPCmut8 (opt4)
aggagaguccgcucagccagguugcagaagcggcuuagcguguguccuaaucuucucucugcguguagguaggccugugccgcaaacaagcuuaccaugggccagaucgugaccuucuuccaggaggugccccacgugaucgaggaggugaugaacaucgugcugaucgcccugagcauccuggccgugcugaagggccuguacaacguggccaccugcggccugaucggccuggugaccuuccugcugcugugcggcagaagcugcaccaccacccuguacaagggcguguacgagcugcaggcccuggagcugaacauggagacccugaacaugugcaugccccugagcugcaccaagaacaacagccaccacuacaucagagugggcaacgagaccggccuggagcugacccugaccaacaccagccugaucaaccacaaguucugcaaccugagcgacgcccacaagaagaaccuguacgaccacgcccugaugagcaucaucagcaccuuccaccugagcauccccaacuucaaccaguacgaggccaugagcugcgacuucaacgacggcaagaucagcgugcaguacaaccugagccacaccuacgccggcgacaccgccaaccacugcggcaccguggccaacggcgugcugcagaccuucaugagaauggccuggggcggcagcuacaucgcccuggacagcggcagaggcggcugggacugcaucaugaccagcuaccaguaccugaucauccagaacaccaccugggaggaccacugccaguucagcagacccagccccaucggcuaccugggccugcugagccagagaaccagagacaucuacaucagcagaagacugcugggcaccuucaccuggacccugagcgacagcgagggcaaggacacccccggcggcuacugccugaccagauggaugcugaucgaggccgagcugaagugcuucggcaacaccgccguggccaagugcaacgagaagcacgacgaggaguucugcgacaugcugagacuguucgacuucugcaagcaggccauccagagacugaaggcccccgcccagaugagcauccagcugaucaacaaggccgugaacgcccugaucaacgaccagcugaucaugaagaaccaccugagagacaucaugggcauccccuacugcaacuacagcaaguacugcuaccugaaccacaccgugaccggcaagaccagccugcccaagugcugccuggugagcaacggcagcuaccugaacgagacccacuucagcgacgacaucgagcagcaggccgacaacaugaucaccgagaugcugcagaaggaguacauggagagacagggcaagaccccccugggccugguggaccuguucguguucagcaccagcuucuaccugaucagcaucuuccugcaccuggugaagauccccacccacagacacguggugggcaagcccugccccaagccccacagacugaaccacaugggcaucugcagcugcggcuucuacaagcagcccggcgugcccgugagauggaagagaugaggacuagucccuguucccagagcccacuuuuuuuucuuuuuuugaaauaaaauagccugucuuucagaucucaaaggcucuuuucagagccaccaaaaaaaaaaaaaaaaaaaaaaaaaaaaaaaaaaaaaaaaaaaaaaaaaaaaaaaaaaaaaaaaaaaaaaaaaaaaaaaaaaaaaaaaaaaaaaaaaaaaa

SEQ ID NO: 33892 - RNA, 1767 nt, Artificial Sequence
  mRNA product Design a-2 (hSL-A100) comprising derived and/or modified sequence from LASV(Z0947-SLE-2011;Clade IV)__AIT17840__GPCmut8 (opt4)
aggagaguccgcucagccagguugcagaagcggcuuagcguguguccuaaucuucucucugcguguagguaggccugugccgcaaacaagcuuaccaugggccagaucgugaccuucuuccaggaggugccccacgugaucgaggaggugaugaacaucgugcugaucgcccugagcauccuggccgugcugaagggccuguacaacuucgccaccugcggccuggugggccuggugaccuuccugcugcugugcggcagaagcugcaccaucagccuguacaagggcguguacgagcugcagacccuggagcugaacauggagacccugaacaugugcaugccccugagcugcaccaagaacaacagccaccacuacaucauggugggcaacgagaccggccuggagcugacccugaccaacaccagcaucaucaaccacaaguucugcaaccugagcgacgcccacaagaagaaccuguacgaccacgcccugaugagcaucaucagcaccuuccaccugagcauccccaacuucaaccaguacgaggccaugagcugcgacuucaacggcggcaagaucagcgugcaguacaaccugagccacagcuacgccggcgacgccgccaaccacugcggcaccguggccaacggcgugcugcagaccuucaugagaauggccuggggcggcagcuacaucgcccuggacagcggcagagacagaugggacugcaucaugaccagcuaccaguaccugaucauccagaacaccaccugggaggaccacugccaguucagcagacccagccccaucggcuaccugggccugcugagccagagaaccagagacaucuacaucagcagaagacugcugggcaccuucaccuggacccugagcgacagcgagggcaaggacacccccggcggcuacugccugaccagauggaugcugaucgaggccgagcugaagugcuucggcaacaccgccguggccaagugcaacgagaagcacgacgaggaguucugcgacaugcugagacuguucgacuucugcaagcaggccauccagagacugaaggcccccgcccagaugagcauccagcugaucaacaaggccgugaacgcccugaucaacgaccagcugaucaugaagaaccaccugagagacaucaugggcauccccuacugcaacuacagcaaguacugcuaccugaaccacaccaccaccggcaagaccagccugcccaagugcugccuggugagcaacggcagcuaccugaacgagacccacuucagcgacgacaucgagcagcaggccgacaacaugaucaccgagaugcugcagaaggaguacauggagagacagggcaagaccccccugggccugguggaccuguucguguucagcaccagcuucuaccugaucagcaucuuccugcaccuggugaagauccccacccacagacacaucgugggcaagcccugccccaagccccacagacugaaccacaugggcaucugcagcugcggccuguacaagcagcccggcgugcccgugaaguggaagagaugaggacuagucccuguucccagagcccacuuuuuuuucuuuuuuugaaauaaaauagccugucuuucagaucucaaaggcucuuuucagagccaccaaaaaaaaaaaaaaaaaaaaaaaaaaaaaaaaaaaaaaaaaaaaaaaaaaaaaaaaaaaaaaaaaaaaaaaaaaaaaaaaaaaaaaaaaaaaaaaaaaaaa

SEQ ID NO: 33893 - RNA, 1767 nt, Artificial Sequence
  mRNA product Design a-2 (hSL-A100) comprising derived and/or modified sequence from LASV(Josiah;Clade IV)__NP_694870__GPCmut8 (opt5)
aggagaguccgcucagccagguugcagaagcggcuuagcguguguccuaaucuucucucugcguguagguaggccugugccgcaaacaagcuuaccaugggccagaucgugaccuucuuucaagaggucccccacguuauugaagaggugaugaacaucgugcugauugcccucagcguccuggcugugcuuaaggggcuguacaauuucgccacaugcggacucguuggccuggugacguuucuucugcucugugggagauccugcaccacaucucuguauaaaggagucuacgaacugcagacccucgagcugaacauggaaacacuuaauauguguaugccucugagcugcaccaagaacaauucccaucacuauaucauggugggcaacgagacagggcucgagcugacccuuacgaauaccucuauuaucaaccauaaauucuguaaucugagcgacgcgcacaagaaaaaccucuacgaucaugcucugauguccaucauuucuacauuucaccugagcaucccgaauuucaaccaguaugaagccauguccugcgacuuuaauggaggcaagauuagcguucaguacaaccucucucacuccuaugccggcgaugcugccaaucauugugggaccguggcuaacggaguccugcaaacauucaugcggauggccuggggcgggagcuacaucgcgcuugacucuggacgcggcaacugggauugcauuaugaccuccuaccaguaucugaucauucagaauacgacaugggaggaccacugucaguuuagcagacccucuccuaucggguaccucggacugcuuucccaacggacccgcgauaucuauauuagcagacggcugcucggcacauucaccuggacccuguccgacucugaaggcaaggauacacccgggggauacugccugacgcgcuggaugcucaucgaggccgagcugaaauguuuuggcaacaccgcuguggccaagugcaaugaaaaacaugacgaggaguucugcgauaugcuuagacuguuugacuucuguaagcaggcuauucagcggcucaaagccccugcgcagaugagcauccaacugauuaacaaggccgugaaugcucuuaucaacgaucagcugaucaugaagaaucaccuccgcgacauuauggggauccccuauugcaacuacuccaaauauuguuaccugaaucacacaaccacaggaagaaccagccugccuaagugcugucucgucucuaacggcuccuaccugaaugaaacgcauuucagcgacgauauugaacagcaagccgacaacaugaucacagagaugcuucagaaagaguauauggaacggcaggggaagaccccgcugggacucguugaucuguuuguguucucuaccagcuuuuaccugauuuccaucuuccuucaccucgugaaaauccccacacaucgccacauugucggcaagucuugcccuaaaccccauagacugaaucacaugggcaucuguagcugcgggcuguauaagcagccuggagugcccguuaaguggaaacggugaggacuagucccuguucccagagcccacuuuuuuuucuuuuuuugaaauaaaauagccugucuuucagaucucaaaggcucuuuucagagccaccaaaaaaaaaaaaaaaaaaaaaaaaaaaaaaaaaaaaaaaaaaaaaaaaaaaaaaaaaaaaaaaaaaaaaaaaaaaaaaaaaaaaaaaaaaaaaaaaaaaaa

SEQ ID NO: 33894 - RNA, 1764 nt, Artificial Sequence
  mRNA product Design a-2 (hSL-A100) comprising derived and/or modified sequence from LASV(LP;Clade I)__AAF86701__GPCmut8 (opt5)
aggagaguccgcucagccagguugcagaagcggcuuagcguguguccuaaucuucucucugcguguagguaggccugugccgcaaacaagcuuaccaugggccagaucauuaccuucuuucaagaggugccccacgucaucgaagagguuaugaacauugugcugaucgcccucagccugcuugcuauucugaaggggcucuacaauaucgccacaugcggaaucauuggccugguggcguuccuuuuucugugugggaaauccugcucucucacgcugaagggaggcuaugaacugcagacccucgagcugaacauggaaacacuuaauauguguaugccucugagcugcaccaaaaacuccucucaucacuacaucagagucgggaaugagacaggacucgagcugacccuuacaaacaccagcauuaucaaucauaaguucuguaaccuguccgacgcucacaaaaagaaucucuaugaucaugcccugaugucuauuaucagcacguuucaccuguccauuccgaacuucaaucaguacgaagccaugagcugcgacuuuaacggcggcaagaucucugugcaguauaaucucucccacagcuacgcuggggaugccgcugagcauuguggaaccguugccaacggcgugcugcaaacauucaugcggauggcguggggagggcgcuauaucgcccuugacucuggcaaagggaauugggauugcauuaugaccuccuaccaguaccugaucauucagaacacaaccugggaagaccacugucaguuuagcagacccucuccuaucggauaucucggccugcuuucccaacggacgcgcgauauuuacaucagcagacggcugcucggcacauucaccuggacacuguccgacucugaggggaacgagacccccggaggcuauugccugacccgcuggaugcucaucgaagcugagcugaaguguuuugggaauacagccgucgcuaaaugcaacgaaaagcaugaugaggaguucugcgacaugcuuagacuguuugauuucuguaaacaggccauucggcgccucaaggcgccugcccagaugagcauccagcugauuaauaaggcugugaacgcccuuaucaaugaccaacugauuaugaaaaaccaccucagagauaucaugggaauccccuacugcaauuauuccaaguacuguuaucugaaccacacgagcucuggccggaccucccugccuaaaugcugucucauuagcaaugggucuuaccugaacgaaacacaguucagcgacgacaucgagcagcaagcugauaauaugauuaccgaaaugcuucagaaggaguacaucgaacgccagggaaaaacaccgcugggccucguugacauuuuuaucuucuccaccucuuuuuaucugauuagcaucuuccugcaucuuaucaagauucccacgcacagacauaucgugggcaaaccuugccccaagccucaccggcucaaccauaugggggucuguuccugcggacuguacaagcaccccggcgugccgacaaaauggaagcgcugaggacuagucccuguucccagagcccacuuuuuuuucuuuuuuugaaauaaaauagccugucuuucagaucucaaaggcucuuuucagagccaccaaaaaaaaaaaaaaaaaaaaaaaaaaaaaaaaaaaaaaaaaaaaaaaaaaaaaaaaaaaaaaaaaaaaaaaaaaaaaaaaaaaaaaaaaaaaaaaaaaaaa

SEQ ID NO: 33895 - RNA, 1764 nt, Artificial Sequence
  mRNA product Design a-2 (hSL-A100) comprising derived and/or modified sequence from LASV(803213;Clade II)__AAF86703__GPCmut8 (opt5)
aggagaguccgcucagccagguugcagaagcggcuuagcguguguccuaaucuucucucugcguguagguaggccugugccgcaaacaagcuuaccaugggccagaucauuaccuucuuucaagaggugccccacgucaucgaagagguuaugaacauugugcugaucgcccucagccugcuugcuauucugaaggggaucuacaauguggccacaugcggacucuucggccugaucuccuuucuucugcucugugggagaucuugcagcgucacguauaaaggaguguacgaacugcagacccuggagcucaacauggcgaaucugaacauguguaugccucuuuccugcacaaagaauaacucucaucacuauauuaugguuggcaaugaaaccgggcuggagcucacacugaccaacacaagcaucauuaaucauaaauucuguaaccuuuccgacgcucacaagaaaaaucuguacgaucaugcccucaugucuaucauuagcaccuuucaccuguccaucccgaacuucaaucaguaugaggccaugagcugcgacuuuaacggaggcaagauuucugugcaguacaaucugucccacagcuucgcugucgaugccgcuaaccauuguggcacgaucgccaacggggugcuccaaaccuuuaugcggauggcguggggaggcucuuauaucgcccuggacuccgggaagggaaauugggauugcauuaugacaagcuaccaguaccuuaucauucagaacaccacaugggaagaccacugucaguucucucgccccuccccuaucggcuaucuggggcuccugagccaaagaacccgggauauuuacaucucccgcagacuucugggaacguuuacauggacccucucugacagcgagggcaaugaagcucccggcggguauugccugacacgguggaugcugaucgaggccgagcucaaauguuucggaaacaccgcuguugccaagugcaaugaaaaacaugaugaggaauuuugcgacaugcugcgccuuuucgauuucuguaagcaggcgauuaaaagacugaagaccccugcccagauguccauccagcucauuaacaaggcugugaaugcccugaucaacgaccaacuuauuaugaaaaaucaucugcgggauaucaugggcauccccuacugcaacuauagccgcuacuguuaucucaaucacacagucacggggaagaccucucugccuagaugcugucugguguccaacggaagcuaccucaaugagacacacuuuucugacgacauugaacagcaggcugauaacaugaucaccgagaugcugcaaaaagaguacauggaccggcagggcaagacaccgcuugggcugguggaucucuucgucuuuagcaccuccuucuaucugauuucuaucuuucugcaccuuguuaaaauucccacgcaucgccacaucgugggaaagccuugccccaaaccucauagacucaaucacaugggcauuuguagcugcggccuguacaagcaccccggggugccggucaaguggaaacggugaggacuagucccuguucccagagcccacuuuuuuuucuuuuuuugaaauaaaauagccugucuuucagaucucaaaggcucuuuucagagccaccaaaaaaaaaaaaaaaaaaaaaaaaaaaaaaaaaaaaaaaaaaaaaaaaaaaaaaaaaaaaaaaaaaaaaaaaaaaaaaaaaaaaaaaaaaaaaaaaaaaaa

SEQ ID NO: 33896 - RNA, 1764 nt, Artificial Sequence
  mRNA product Design a-2 (hSL-A100) comprising derived and/or modified sequence from LASV(GA391;Clade III)__CAA36645__GPCmut8 (opt5)
aggagaguccgcucagccagguugcagaagcggcuuagcguguguccuaaucuucucucugcguguagguaggccugugccgcaaacaagcuuaccaugggccagaucgugaccuucuuucaagaggucccccacguuauugaagaggugaugaacaucgugcugauugcccucagcauccuggcuauucuuaaggggcuguacaaugucgccacaugcggacucaucggccuggugacguuccuucugcucuccgggagaucuuguagccugaucuauaaaggaaccuacgaacugcagacacucgagcugaacauggaaacccuuaauaugugcaugccucuguccuguacaaagaacaauucucaucacuauauucggguuggcaacgagaccgggcucgagcugacacuuaccaauacgagcauccugaaccauaaauuuugcaaucucuccgacgcgcacaagcgcaaccuguacgaucauucucugaugagcauuaucuccaccuuccaccucagcauuccgaauuuuaaccaguaugaagcuaugucuugugacuucaauggaggcaaaaucacagugcaguacaaccugucccacagcuuugccgucgaugccgcuggccauugcgggacccuugccaauggagugcugcaaacauucaugagaauggcuuggggcgggucuuauauugcccucgacuccggacggggcaacugggauuguaucaugaccagcuaccaguaccugaucauucagaacacgacaugggacgaucacugccaguuuucucgccccuccccuaucggguaucuuggacugcucagccaaagaacccgggacauuuacaucucccgcagacugcugggcacauucaccuggacccucucugauagcgagggcaaugaaacacccgggggauauugucugacgcgguggaugcuuauugaggcggagcugaagugcuuuggcaacaccgccguugcuaaguguaaugaaaaacaugacgaggaguucugcgauaugcuccgccuguuugacuucugcaagcaggccaucagacggcuuaaaaccccugcucagauguccauccagcugauuaacaaggccgugaaugcgcucaucaacgaucaacugauuaugaaaaaucaucugcgcgacaucauggggauucccuacuguaacuauagcagauacugcuaucucaaucacacaucuacaggaaagaccucccugccucgguguugccuuaucagcaacggcucuuaccugaaugaaacgaaguucagcgacgauaucgaacagcaggccgacaacaugauuacagagaugcuccaaaaagaguacaucgaucgccaggggaagaccccgcugggacuggucgaccuuuuuguguucuccaccucuuuuuaucucauuagcaucuuccugcaccuggugaaaauucccacacacagacauaucgucggcaagccuugucccaaaccucaccggcucaaucauaugggcauuugcuccugugggcuguacaagcagcccggaguuccggugagauggaaacgcugaggacuagucccuguucccagagcccacuuuuuuuucuuuuuuugaaauaaaauagccugucuuucagaucucaaaggcucuuuucagagccaccaaaaaaaaaaaaaaaaaaaaaaaaaaaaaaaaaaaaaaaaaaaaaaaaaaaaaaaaaaaaaaaaaaaaaaaaaaaaaaaaaaaaaaaaaaaaaaaaaaaaa

SEQ ID NO: 33897 - RNA, 1767 nt, Artificial Sequence
  mRNA product Design a-2 (hSL-A100) comprising derived and/or modified sequence from LASV(AV;Clade V)__CCA30314__GPCmut8 (opt5)
aggagaguccgcucagccagguugcagaagcggcuuagcguguguccuaaucuucucucugcguguagguaggccugugccgcaaacaagcuuaccaugggccagaucgugaccuucuuucaagaggucccccacguuauugaagaggugaugaacaucgugcugauugcccucagcauccuggcuguccuuaaggggcuguacaauauugccacaugcggacucaucggccugaucacguuccuucugcucugugggagauccugcucuagcaaccuguauaaaggaguguacgaacugcagucccucgaccugaauauggagacccuuaacauguguaugccucugucuugcacaaagaauaacagccaucacuauauucggguuggcaaugauaccgggcucgaacugacacuuaccaacacauccauccugaaucauaaauuuuguaaccucucugacgcgcacaagaaagaucuguacgaccaugcucugaugagcauuaucuccaccuuccaccucagcauuccgaauuuuaaccaguaugaggccaugucuugcgauuucaauggaggcaagaucuccgugcaguacaaccugagccacucuuaugccauugacgcugccaaucauuguggcacggucgcuaacgggauccuucaaaccuuuaugcgcauggccuggggaggcuccuacaucgcgcuggauagcgggagaggaaacugggacugcauuaugacaucuuaccaguaucucaucauucagaauaccacaugggagaaccacugucaguucucccggcccagcccuaucggcuaccuggggcuucugucccaacgcaccagagauauuuauaucucucggcgccuccugggaacguuuacauggacccugagcgacuccgaaggcaaugccacacccggcggguacugccucaccagauggaugcugaucgaggcugaacuuaaguguuucggaaacaccgccguggcuaaaugcaaugagaagcaugaugaggaauuuugcgacaugcugcgccucuucgauuuuuguaaacaggccauuagccggcugaagucuccugcgcagauguccauccagcuuauuaacaaagccguuaaugcucugaucaacgaccaacucauuaugaagaaucaccugagagacaucaugggcauccccuauugcaacuacagcaaguauuguuaccugaaucacacaauuacggggaaaaccucucucccuaagugcugucuggugagcaacggauccuaccuuaaugagacacauuucucugaugacaucgaacagcaggccgauaacaugauuaccgagaugcugcaaaaagaauauauggagcggcagggcaagacaccgcucgggcuggucgaccuguucguguuuagcaccuccuucuaccuuaucagcauuuuucuccgccuggugaaaauccccacgcacagacauauugucggaaagccuugccccaaaccucaccggcugaaucauaugggcaucuguucuugcggccucuauaagcagcccgggguuccggugcgcuggaagagaugaggacuagucccuguucccagagcccacuuuuuuuucuuuuuuugaaauaaaauagccugucuuucagaucucaaaggcucuuuucagagccaccaaaaaaaaaaaaaaaaaaaaaaaaaaaaaaaaaaaaaaaaaaaaaaaaaaaaaaaaaaaaaaaaaaaaaaaaaaaaaaaaaaaaaaaaaaaaaaaaaaaaa

SEQ ID NO: 33898 - RNA, 1764 nt, Artificial Sequence
  mRNA product Design a-2 (hSL-A100) comprising derived and/or modified sequence from LASV(Togo/2016/7082;Clade VI)__AMR44577__GPCmut8 (opt5)
aggagaguccgcucagccagguugcagaagcggcuuagcguguguccuaaucuucucucugcguguagguaggccugugccgcaaacaagcuuaccaugggccagaucauuaccuucuuucaagaggugccccacgucaucgaagagguuaugaacauugugcugaucgcccucagccugcuugcuauucugaaggggguguacaaugucgccacaugcggaaucaucggccucgugacguuccuguuucuuugugggagauccugcucucugauuuauaaaggaagcuacgaacuccagacccuggagcugaacauggaaacacucaauauguguaugccucuguccugcaccaagaacucuagccaucacuauauccggguuggcaaugagacagggcuugagcugacccucacaaacaccuccauuaucaaucauaaauucuguaaccugucugacgcgcacaagcgcaaucuuuacgaucaugcucugaugagcauucucuccacguuucaccugagcaucccgaacuucaaucaguaugaagccaugucuugcgacuuuaacggaggcaaaauuuccgugcaguacaaucugagccacgccuaugcugucgaugccgcugagcauuguggcaccguggccaacgggguucuccaaacauucaugagaauggcguggggaggcucuuacaucgcccuggacuccgggcggggaaauugggauugcaucaugaccagcuaccaguaucuuauuauccagaacacaaccugggaagaccacugucaguuuucucgccccuccccuauuggcuaccuggggcuccugagccaaagaacgcgggauaucuauauuucccgcagacuucugggaacauucaccuggacacucucugacagcgagggcaacgagacccccggcggguacugccugacccgguggaugcugaucgaagcugagcucaaguguuuuggaaauacagccguggcuaagugcaacgaaaaacaugaugaggaguucugcgacaugcugcgccuuuuugauuucuguaagcaggccauccagagacugaaauccccugcgcagaugagcauucaacucaucaauaaggccgucaacgcucugauuaaugaccagcuuaucaugaaaaaccaucugcgggauaugaugggcauucccuauugcaauuacucuaaguauuguuaccucaaccacacguccagcgggcgcaccucucugccuaagugcugucuggugagcaauggauccuaccucaacgaaacacacuucucugacgacaucgagcagcaagccgauaauaugaucaccgaaaugcugcagaaagaguauauugacagacagggcaagacaccgcuugggcugguggaucucuuugucuucagcaccuccuuuuaccugaucagcauuuuccugcaccuuaucaaaauucccacgcaucggcacaucguuggaaagccuugccccaaaccucaucgccucaaccacaugggcauuuguucuugcggccuguauaagcagcccggggugccgacaagauggaaacggugaggacuagucccuguucccagagcccacuuuuuuuucuuuuuuugaaauaaaauagccugucuuucagaucucaaaggcucuuuucagagccaccaaaaaaaaaaaaaaaaaaaaaaaaaaaaaaaaaaaaaaaaaaaaaaaaaaaaaaaaaaaaaaaaaaaaaaaaaaaaaaaaaaaaaaaaaaaaaaaaaaaaa

SEQ ID NO: 33899 - RNA, 1764 nt, Artificial Sequence
  mRNA product Design a-2 (hSL-A100) comprising derived and/or modified sequence from LASV(KAK-428;Clade n.d. (VII))__ANH09740__GPCmut8 (opt5)
aggagaguccgcucagccagguugcagaagcggcuuagcguguguccuaaucuucucucugcguguagguaggccugugccgcaaacaagcuuaccaugggccagaucgugaccuucuuucaagaggucccccacguuauugaagaggugaugaacaucgugcugauugcccucagccugcuugcuauccugaaggggcucuacaauuucgccacaugcggagucauuggccugaucacguuucuucugcucugugggagauccugcucugcgaccuauaaaggacaguacgaacugcagacacuggagcucaacauggaaagccugaauauguguaugccucuuuccugcaccaagaacaauucucaucacuauauccgggcuggcaacaauacagggcuggagcucacccugacaaacaccagcauuaucucccauaaauucuguaaucuuucugacgcccacaagaaaaaccuguacgaucauacgcucaugagcauuaucaccacauuucaccuguccauuccgaauuucaaccaguaugaggccaugagcugcgacuuuaauggaggcaagaucucuauucaauacaaccugucccacagcuaugcuggcgaugccgcucagcauugugggaccguggccaauggaguucuccagacauucaugcgcauggcguggggcgggucuuaccuggcccuugacuccggaagacggggcugggauugcaucaucagcucuuaccaguaucugauuauccaaaacaccacgugggacgaucacugucaguuuucccgccccagcccuauuggguaccucggauucgugucccagaagacaagagacaucuauauuucucggcgccugcuuggcaccuuuacauggacccugagcgauuccgaaggccaugacaugcccgggggauacugccucaccagauggaugcugaucgaggcugaucugaaauguuucggcaacacagccgucgcuaagugcaaugaaaaacacgacgaggaguuuugcgauauguggcgccucuucgacuucuguaagcaggccauccaacggcugaaagcgccugcccagaugaacauucagcuuaucaauaaggcugugaacgcccugauuaaugaccaacucaugaugaagaaccaccugagagauaucauggggauucccuauugcaauuacagcaaauuuuguuaucuuaacaauacgaccacaggacggaccucucugccucgcugcugucucaucuccaacggcagcuaccugaaugaaacacauuucucugacgauaucgagcagcaggcugacaacaugauuaccgaaaugcugcagaaggaguacauggauagacaagggaaaacgccgcucggacugguugaccuuuuuguguucagcacauccuuuuaucugaucaccauuuuccuccaccuggucaagauccccacccaucggcacauugugggcaaaccuugccccaagccucaucgccugaaucacaugggcaucuguucuugcgggcuuuacaaacagcccggagugccggucagauggaagcggugaggacuagucccuguucccagagcccacuuuuuuuucuuuuuuugaaauaaaauagccugucuuucagaucucaaaggcucuuuucagagccaccaaaaaaaaaaaaaaaaaaaaaaaaaaaaaaaaaaaaaaaaaaaaaaaaaaaaaaaaaaaaaaaaaaaaaaaaaaaaaaaaaaaaaaaaaaaaaaaaaaaaa

SEQ ID NO: 33900 - RNA, 1764 nt, Artificial Sequence; identical to SEQ ID NO: 33894
  mRNA product Design a-2 (hSL-A100) comprising derived and/or modified sequence from LASV(Pinneo-NIG-1969;Clade I)__AIT17836__GPCmut8 (opt5)

SEQ ID NO: 33901 - RNA, 1764 nt, Artificial Sequence
  mRNA product Design a-2 (hSL-A100) comprising derived and/or modified sequence from LASV(ISTH0009-NIG-2011;Clade II)__AIT17404__GPCmut8 (opt5)
aggagaguccgcucagccagguugcagaagcggcuuagcguguguccuaaucuucucucugcguguagguaggccugugccgcaaacaagcuuaccaugggccagaucauuaccuucuuucaagaggugccccacgucaucgaagagguuaugaacauugugcugaucgcccucagccugcuugcuauucugaaggggaucuacaauguggccacaugcggacucuucggccuggucuccuuucuucugcucugugggagaucuugcagcacgaccuauaaaggaguguacgaacugcagacacuggagcucgacauggcgucccugaacauguguaugccucuuucuugcaccaagaauaacagccaucacuauaucaugguuggcaaugaaacagggcuggagcucacccugacaaacaccuccauuaucaaucauaaauucuguaaccuuucugaugcucacaagaaaaaucuguacgaccaugcccucaugagcauuaucuccacguuucaccugagcauuccgaacuucaaucaguaugaggccaugucuugcgauuuuaacggaggcaagaucuccgugcaguacaaucugagccacgcuuaugccgucgacgcugccaaccauuguggcaccauugcgaauggggugcuccaaacauucaugcggauggccuggggaggcucuuacaucgcucuggauuccgggaagggaagcugggacugcaucaugaccucuuaccaguaucuuauuauccagaacacaaccugggaagaucacugucaguuuucccgccccagcccuauuggcuaccuggggcuccugucccaaagaacgcgggacaucuauauuucucgcagacuucugggaacauucaccuggacacucagcgauuccgagggcaacgaaacccccggcggguacugccugacccgguggaugcugaucgaggccgagcucaaauguuuuggaaauacagcuguugccaagugcaacgaaaaacaugacgaggaguucugcgauaugcugcgccuuuuugacuucuguaagcaggcgaucagacggcugaaaacgccugcccagaugagcauucagcucaucaauaaggcugugaacgcccugauuaaugaucaacuuaucaugaagaaccaucugcgcgacauuaugggcauccccuauugcaauuacucuaaauauuguuaccucaaccacaccgucacagggaagaccucccugccuagaugcugucuggugagcaauggaucuuaccucaacgaaacacacuucagcgacgauaucgaacagcaggcugacaauaugauuaccgagcugcuucaaaaagaguauauggaucggcagggcaagacgccgcuggggcucguggaccuguuugucuucuccacaucuuuuuaccugaucagcauuuuccuucaccucaucaaaauucccacccaucgccacaucaccggaaagccuugccccaaaccucauagacugaaccacaugggcauuuguuccugcggccuguauaagcaccccgggguuccggugaaguggaaacggugaggacuagucccuguucccagagcccacuuuuuuuucuuuuuuugaaauaaaauagccugucuuucagaucucaaaggcucuuuucagagccaccaaaaaaaaaaaaaaaaaaaaaaaaaaaaaaaaaaaaaaaaaaaaaaaaaaaaaaaaaaaaaaaaaaaaaaaaaaaaaaaaaaaaaaaaaaaaaaaaaaaaa

SEQ ID NO: 33902 - RNA, 1764 nt, Artificial Sequence
  mRNA product Design a-2 (hSL-A100) comprising derived and/or modified sequence from LASV(ISTH2010-NIG-2012;Clade II)__AIT17482__GPCmut8 (opt5)
aggagaguccgcucagccagguugcagaagcggcuuagcguguguccuaaucuucucucugcguguagguaggccugugccgcaaacaagcuuaccaugggccagaucauuaccuucuuucaagaggugccccacgucaucgaagagguuaugaacauugugcugaucgcccucagccugcuugcuauucugaaggggaucuacaauguggccacaugcggacucuucggccuggucuccuuucuucugcucugugggagaucuugcagcacgaccuauaaaggaguguacgaacugcagacacuggagcucgacauggcgucccugaacauguguaugccucuuucuugcaccaagaauaacagccaucacuauaucaugguuggcaaugaaacagggcuggagcucacccugacaaacaccuccauuaucaaucauaaauucuguaaccuuucugaugcucacaagaaaaaucuguacgaccaugcccucaugagcauuaucuccacguuucaccugagcauuccgaacuucaaucaguaugaggccaugucuugcgauuuuaacggaggcaagaucuccgugcaguacaaucugagccacgcuuaugccgucgacgcugccaaccauuguggcaccauugcgaauggggugcuccaaacauucaugcggauggccuggggaggcucuuacaucgcucuggauuccgggaagggaagcugggacugcaucaugaccucuuaccaguaucuuauuauccagaacauuacaugggaagaucacugucaguuuucccgccccagcccuaucggcuaccuggggcuccugucccaaagaacccgggacauuuauaucucucgcagacuucugggaacguucacauggacccucagcgauuccgagggcaacgaaacacccggcggguacugccugacccgguggaugcugaucgaggccgagcucaaauguuuuggaaauaccgcuguugccaagugcaacgaaaaacaugacgaggaguucugcgauaugcugcgccuuuuugacuucuguaagcaggcgauuagacggcugaaaacgccugcccagaugagcauccagcucauuaauaaggcugugaacgcccugaucaaugaucaacuuauuaugaagaaccaucugcgcgacaucaugggcauccccuauugcaauuacucuaaauauuguuaccucaaccacacagucaccgggaagacaucccugccuagaugcugucuggugagcaauggaucuuaccucaacgaaacccacuucagcgacgauauugaacagcaggcugacaauaugaucacagagcugcuucaaaaagaguauauugaucggcagggcaagaccccgcuggggcucguggaccuguuugucuucuccacgucuuuuuaccugaucagcauuuuccuucaccucguuaaaauccccacacaucgccacguggugggaaagccuugccccaaaccucauagacugaaccacaugggcauuuguuccugcggccuguauaagcaccccggggucccggugaaguggaaacggugaggacuagucccuguucccagagcccacuuuuuuuucuuuuuuugaaauaaaauagccugucuuucagaucucaaaggcucuuuucagagccaccaaaaaaaaaaaaaaaaaaaaaaaaaaaaaaaaaaaaaaaaaaaaaaaaaaaaaaaaaaaaaaaaaaaaaaaaaaaaaaaaaaaaaaaaaaaaaaaaaaaaa

SEQ ID NO: 33903 - RNA, 1764 nt, Artificial Sequence
  mRNA product Design a-2 (hSL-A100) comprising derived and/or modified sequence from LASV(Lassa virus/H.sapiens-wt/NGA/2015/ISTH_0543;Clade II)__AVO03639__GPCmut8 (opt5)
aggagaguccgcucagccagguugcagaagcggcuuagcguguguccuaaucuucucucugcguguagguaggccugugccgcaaacaagcuuaccaugggccagaucauuaccuucuuucaagaggugccccacgucaucgaagagguuaugaacauugugcugaucgcccucagccugcuugcuauucugaaggggaucuacaauguggccacaugcggacucuucggccuggucuccuuucuucugcucugugggagaucuugcagcacgaccuauaaaggaguguacgaacugcagacacuggagcucgacauggcgaaccugaauauguguaugccucuuuccugcaccaagaacaauucucaucacuauaucaugguuggcaacgaaacagggcuggagcucacccugacaaauaccagcauuaucaaccauaaauucuguaaucuuuccgaugcucacaagaaaaaccuguacgaccaugcccucaugucuauuaucagcacguuucaccuguccauuccgaauuucaaccaguaugaggccaugagcugcgauuuuaauggaggcaagaucucugugcaguacaaccugucccacaccuaugcugucgacgccgcuaaucauuguggcacaauugccaacggggugcuccaaaccuucaugcggauggcguggggaggcagcuacaucgcccuggauucugggaagggauccugggacugcaucaugacaagcuaccaguaucuuguuauucagaacaccacgugggaagaucacugucaguuuucucgccccuccccuaucggcuaccuggggcuccugagccaaagaacacgggacauuuauaucucccgcagacuucugggaaccuucacauggacccucucugauagcgagggcaaugaaacccccggcggguacugccugacacgguggaugcugauugaggcugagcucaaauguuuuggaaacacggccguggcuaagugcaaugaaaaacaugacgaggaguucugcgauaugcugcgccuuuuugacuucuguaagcaggccaucagacggcugaaaaccccugcgcagauguccauccagcucauuaacaaggccgucaaugcucugaucaacgaucaacuuauuaugaagaaucaucugcgcgacaucaugggcauucccuauugcaacuacagcaaauauuguuaccucaaucacacagugaccgggaagacaucucugccuagaugcugucugguguccaacggaagcuaccucaaugaaacccacuucucugacgauaucgaacagcaggccgacaacaugaucacggagcugcuucaaaaagaguauauugaucggcagggcaagacaccgcuggggcucgucgaccuguuuguuuucagcaccuccuuuuaccugaucucuauuuuccuucaccucgugaaaauccccacccaucgccacauuacaggaaagccuugccccaaaccucauagacugaaucacaugggcaucuguagcugcggccuguauaagcaccccggggugccggucaaguggaaacggugaggacuagucccuguucccagagcccacuuuuuuuucuuuuuuugaaauaaaauagccugucuuucagaucucaaaggcucuuuucagagccaccaaaaaaaaaaaaaaaaaaaaaaaaaaaaaaaaaaaaaaaaaaaaaaaaaaaaaaaaaaaaaaaaaaaaaaaaaaaaaaaaaaaaaaaaaaaaaaaaaaaaa

SEQ ID NO: 33904 - RNA, 1764 nt, Artificial Sequence
  mRNA product Design a-2 (hSL-A100) comprising derived and/or modified sequence from LASV(Lassa virus/H.sapiens-wt/NGA/2016/ISTH_0009;Clade II)__AVO03571__GPCmut8 (opt5)
aggagaguccgcucagccagguugcagaagcggcuuagcguguguccuaaucuucucucugcguguagguaggccugugccgcaaacaagcuuaccaugggccagaucauuaccuucuuucaagaggugccccacgucaucgaagagguuaugaacauugugcugaucgcccucagccugcuugcuauucugaaggggaucuacaauguggccacaugcggacuccugggccuugucuccuuccugcuccugugugggagaucuugcagcacgaccuauaaaggaguguacgaacugcagacacucgagcuggacauggcgucccuuaacauguguaugccucugucuugcaccaagaauaacagccaucacuauaucaugguuggcaaugaaacagggcucgagcugacccuuacaaacaccuccauuaucaaucauaaauuuuguaaccugucugaugcucacaagaaaaaucucuacgaccaugcccugaugagcauuaucuccacguuccaccugagcauuccgaacuuuaaucaguaugaggccaugucuugcgauuucaacggaggccggaucuccgugcaguacaaucucagccacucuuaugcugucgacgccgcuaaccauuguggcaccauugccaauggggugcugcaaacauuuaugcgcauggcguggggaggcuccuacaucgcccuugauagcgggaagggaucuugggacugcaucaugaccuccuaccaguaucugauuauccagaacacaaccugggaagaucacugucaguucagcagacccuccccuauuggcuaccucgggcugcuuucucaacggacgcgcgacaucuauauuagcagacggcugcucggaacauuuaccuggacacuguccgauagcgagggcaacgaaacccccggcggguacugccugacccgcuggaugcucaucgaggcugagcugaaguguuucggaaauacagccguugcuaaaugcaacgaaaagcaugacgaggaauuuugcgauaugcuuagacuguucgacuuuuguaaacaggccauccggcgccucaagacgccugcgcagaugucuauucagcugaucaauaaagccgugaacgcucuuauuaaugaucaacugaucaugaagaaccaccucagagacauuaugggcauccccuauugcaauuacuccaaguauuguuaccugaaccacaccgucacagggaaaaccagccugccucggugcugucucgugucuaauggaagcuaccugaacgagacacauuucuccgacgauaucgaacagcaggccgacaauaugauuaccgagcuucugcaaaaggaguauaucgaucgccagggcaaaacgccgcucgggcugguggaccuguucgucuuuucuaccagcuucuaccuuauuuccaucuuucuccaccugguuaagauucccacacauagacacaucaccggaaaaccuugccccaagccucaucggcugaaccacaugggcauuuguagcugcggccucuauaaucaccccggggugccggugaaauggaagcgcugaggacuagucccuguucccagagcccacuuuuuuuucuuuuuuugaaauaaaauagccugucuuucagaucucaaaggcucuuuucagagccaccaaaaaaaaaaaaaaaaaaaaaaaaaaaaaaaaaaaaaaaaaaaaaaaaaaaaaaaaaaaaaaaaaaaaaaaaaaaaaaaaaaaaaaaaaaaaaaaaaaaaa

SEQ ID NO: 33905 - RNA, 1764 nt, Artificial Sequence
  mRNA product Design a-2 (hSL-A100) comprising derived and/or modified sequence from LASV(Lassa virus/H.sapiens-wt/NGA/2016/ISTH_0017;Clade II)__AVO03567__GPCmut8 (opt5)
aggagaguccgcucagccagguugcagaagcggcuuagcguguguccuaaucuucucucugcguguagguaggccugugccgcaaacaagcuuaccaugggccagaucauuaccuucuuucaagaggugccccacgucaucgaagagguuaugaacauugugcugaucgcccucagccugcuugcuauucugaaggggaucuacaauguggccacaugcggacucuucggccuggucuccuuucuucugcucugugggagaucuugcagcacgaccuauaaaggaguguacgaacugcagacacuggagcucgacauggcgucccugaacauguguaugccucuuucuugcaccaagaauaacagccaucacuauaucaugguuggcaaugaaacagggcuggagcucacccugacaaacaccuccauuaucaaucauaaauucuguaaccuuucugaugcucacaagaaaaaucuguacgaccaugcccucaugagcauuaucuccacguuucaccugagcauuccgaacuucaaucaguaugaggccaugucuugcgauuuuaacggaggcaagaucuccgugcaguacaaucugagccacaccuaugcuauugacgccgcuaaccauuguggcacaaucgccaaugggguccuccaaaccuucaugcggauggcguggggaggcucuuacaucgcccuggauuccgggaagggaagcugggacugcauuaugacaucuuaccaguaucuuaucauucagaacaccacgugggaagaucacugucaguuuucccgccccagcccuaucggcuaccuggggcuccugucccaaagaacacgggacauuuauaucucucgcagacuucugggaaccuucacauggacccucagcgauuccgagggcaacgaaacccccggcggguacugccugacacgguggaugcugaucgaggcugagcucaaauguuuuggaaauacggccguggcuaagugcaacgaaaaacaugacgaggaguucugcgauaugcugcgccuuuuugacuucuguaagcaggccauuagacggcugaaaaccccugcgcagaugagcauccagcucauuaauaaggccguuaacgcucugaucaaugaucaacuuauuaugaagaaccaucugcgcgacaucaugggcauccccuauugcaauuacucuaaauauuguuaccucaaccacacagugaccgggaagacaucccugccuagaugcugucuggucagcaauggaucuuaccucaacgaaacccacuucagcgacgauauugaacagcaggccgacaauaugaucacggagcugcuucaaaaagaguauauggaucggcagggcaagacaccgcuggggcucguggaccuguuuguguucuccaccucuuuuuaccugauuagcaucuuccuucaccucguccgcauucccacccauagacacguuaucggaaaaccuugccccaagccucaucggcugaaccacaugggcauuuguuccugcggccuguauaaacaccccggggugccggugaaguggaagcgcugaggacuagucccuguucccagagcccacuuuuuuuucuuuuuuugaaauaaaauagccugucuuucagaucucaaaggcucuuuucagagccaccaaaaaaaaaaaaaaaaaaaaaaaaaaaaaaaaaaaaaaaaaaaaaaaaaaaaaaaaaaaaaaaaaaaaaaaaaaaaaaaaaaaaaaaaaaaaaaaaaaaaa

SEQ ID NO: 33906 - RNA, 1764 nt, Artificial Sequence
  mRNA product Design a-2 (hSL-A100) comprising derived and/or modified sequence from LASV(Lassa virus/H.sapiens-wt/NGA/2018/ISTH_0959;Clade II)__AVV65099__GPCmut8 (opt5)
aggagaguccgcucagccagguugcagaagcggcuuagcguguguccuaaucuucucucugcguguagguaggccugugccgcaaacaagcuuaccaugggccagaucauuaccuucuuucaagaggugccccacgucaucgaagagguuaugaacauugugcugaucgcccucagccugcuugcuauucugaaggggaucuacaauguggucacaugcggacucuucggccugguguccuuucuucugcucugugggagaucuugcagcacgaccuauaaaggaguuuacgaacugcagacacuggagcucgacauggccucccugaacauguguaugccucuuucuugcaccaagaauaacagccaucacuauaucauggugggcaaugaaacagggcuggagcucacccugacaaacaccuccauuaucaaucauaaauucuguaaccuuucugaugcgcacaagaaaaaucuguacgaccaugcucucaugagcauuaucuccacguuucaccugagcauuccgaacuucaaucaguaugaggccaugucuugcgauuuuaacggaggcaagaucuccguccaguacaaucugagccacgccuaugcuauugacgccgcuaaccauuguggcaccaucgccaauggggugcuccaaacauucaugcggauggcguggggaggcucuuacaucgcccuggauuccgggaagggaagcugggacugcauuaugaccucuuaccaguaucuuaucauucagaacacaaccugggaagaucacugucaguuuucccgccccagcccuaucggcuaccuggggcuccugucccaaagaacgcgggacauuuauaucucucgcagacuucugggaacauucaccuggacacucagcgauuccgagggcaacgaaacccccggcggguacugccugacccgguggaugcugaucgaggcugagcucaaauguuuuggaaauacagccguugcuaagugcaacgaaaaacaugacgaggaguucugcgauaugcugcgccuuuuugacuucuguaagcaggccauuagacggcugaaaacgccugcgcagaugagcauccagcucauuaauaaggccgugaacgcucugaucaaugaucaacuuauuaugaagaaccaucugcgcgacaucaugggcauccccuauugcaauuacucuaaauauuguuaccucaaccacaccgucacagggaagaccucccugccuagaugcugucuggugagcaauggaucuuaccucaacgaaacacacuucagcgacgauauugaacagcaggccgacaauaugaucaccgagcugcuucaaaaagaguauauugaucggcagggcaagacgccgcuggggcucguggaccuguuugucuucuccacaucuuuuuaccugaucagcauuuuccuucaccucguuaaaauccccacccaucgccacgugauuggaaagccuugccccaaaccucauagacugaaccacaugggcaucuguuccugcggccuguauaagcaccccggggugccggucaaguggaaacggugaggacuagucccuguucccagagcccacuuuuuuuucuuuuuuugaaauaaaauagccugucuuucagaucucaaaggcucuuuucagagccaccaaaaaaaaaaaaaaaaaaaaaaaaaaaaaaaaaaaaaaaaaaaaaaaaaaaaaaaaaaaaaaaaaaaaaaaaaaaaaaaaaaaaaaaaaaaaaaaaaaaaa

SEQ ID NO: 33907 - RNA, 1764 nt, Artificial Sequence
  mRNA product Design a-2 (hSL-A100) comprising derived and/or modified sequence from LASV(LASV003-NIG-2008;Clade II)__AIT17580__GPCmut8 (opt5)
aggagaguccgcucagccagguugcagaagcggcuuagcguguguccuaaucuucucucugcguguagguaggccugugccgcaaacaagcuuaccaugggccagaucauuaccuucuuucaagaggugccccacgucaucgaagagguuaugaacauugugcugaucgcccucagccugcuugcuauucugaaggggaucuacaauguggccacaugcggacucuucggccuggucuccuuucuucugcucugugggagaucuugcagcacgaccuauaaaggaguguacgaacugcagacacuggagcucgacauggcgucccugaacauguguaugccucuuucuugcaccaagaauaacagccaucacuauaucaugguuggcaaugaaacagggcuggagcucacccugacaaacaccuccauuaucaaucauaaauucuguaaccuuucugaugcucacaagaaaaaucuguacgaccaugcccucaugagcauuaucuccacguuucaccugagcauuccgaacuucaaucaguaugaggccaugucuugcgauuuuaacggaggcaagaucuccgugcaguacaaucugagccacaccuaugcugucgacgccgcuaaccauuguggcacaauugccaauggggugcuccaaaccuucaugcggauggcguggggaggcucuuacaucgcccuggauuccgggaagggaagcugggacugcaucaugacaucuuaccaguaucuuauuauccagaacaccacgugggaagaucacugucaguuuucccgccccagcccuauuggcuaccuggggcuccugucccaaagaacacgggacaucuauauuucucgcagacuucugggaaccuucacauggacccucagcgauuccgagagcaacgaaacccccggcggcuacugccugacacgguggaugcugaucgaggcugagcucaaauguuuugggaauacggccguugcuaagugcaacgaaaaacaugacgaggaguucugcgauaugcugcgccuuuuugacuucuguaagcaggccaucagacggcugaaagcgccugcccagaugucuauucagcucaucaauaaggcugugaacgcccugauuaaugaucaacuuaucaugaagaaccaucugcgcgacauuaugggaauccccuauugcaauuacuccaaauauuguuaccucaaccacaccgucacaggcagaaccagccugccucggugcugucuggugucuaaugggagcuaccucaacgaaacacacuucuccgacgauaucgaacagcaggcugacaauaugauuaccgagcugcuucaaaaggaguauauggaucgccagggaaaaacgccgcugggccucguggaccuguuugucuucucuaccagcuuuuaccugaucuccauuuuccuucaccucguuaagauccccacacauagacacgugauugggaaaccuugccccaagccucaucggcugaaccacaugggaaucuguagcugcggccuguauaaacaccccggcgugccggucaaguggaagcgcugaggacuagucccuguucccagagcccacuuuuuuuucuuuuuuugaaauaaaauagccugucuuucagaucucaaaggcucuuuucagagccaccaaaaaaaaaaaaaaaaaaaaaaaaaaaaaaaaaaaaaaaaaaaaaaaaaaaaaaaaaaaaaaaaaaaaaaaaaaaaaaaaaaaaaaaaaaaaaaaaaaaaa

SEQ ID NO: 33908 - RNA, 1764 nt, Artificial Sequence
  mRNA product Design a-2 (hSL-A100) comprising derived and/or modified sequence from LASV(LASV035-NIG-2009;Clade II)__AIT17588__GPCmut8 (opt5)
aggagaguccgcucagccagguugcagaagcggcuuagcguguguccuaaucuucucucugcguguagguaggccugugccgcaaacaagcuuaccaugggccagaucauuaccuucuuucaagaggugccccacgucaucgaagagguuaugaacauugugcugaucgcccucagccugcuugcuauucugaaggggaucuacaauguggccacaugcggacucuucggccuggucuccuuucuucugcucugugggagaucuugcagcacgaccuauaaaggaguguacgaacugcagacacuggagcucgacauggcgucccugaacauguguaugccucuuucuugcaccaagaauaacagccaucacuauaucaugguuggcaaugaaacagggcuggagcucacccugacaaacaccuccauuaucaaucauaaauucuguaaccuuucugaugcucacaagaaaaaucuguacgaccaugcccucaugagcauuaucuccacguuucaccugagcauuccgaacuucaaucaguaugaggccaugucuugcgauuuuaacggaggcaagaucuccgugcaguacaaucugagccacgcuuaugccgucgacgcugccaaccauuguggcaccauugcgaauggggugcuccaaacauucaugcggauggccuggggaggcucuuacaucgcucuggauuccgggaagggaagcugggacugcaucaugaccucuuaccaguaucuuauuauccagaacacaaccugggaagaucacugucaguuuucccgccccagcccuauuggcuaccuggggcuccugucccaaagaacgcgggacaucuauauuucucgcagacuucugggaacauucaccuggacacucagcgauuccgagggcaacgaaacccccggcggguacugccugacccgguggaugcugaucgaggccgagcucaaauguuuuggaaauacagcuguugccaagugcaacgaaaaacaugacgaggaguucugcgauaugcugcgccuuuuugacuucuguaagcaggcgaucagacggcugaaagccccugcucagaugagcauucagcucaucaauaaggccgugaacgcucugauuaaugaucaacuuaucaugaagaaccaucugcgcgacauuaugggcauccccuauugcaauuacucuaaauauuguuaccucaaccacacggucaccgggaagacaucccugccuagaugcugucuggugagcaauggaucuuaccucaacgaaacccacuucagcgacgauaucgaacagcaggccgacaauaugauuacagagcugcuucaaaaagaguauaucgaucggcagggcaagaccccgcuggggcucguggaccuguuugucuucuccacgucuuuuuaccugauuagcaucuuccuucaccucguuaaaauucccacacaucgccacgugaucggaaagccuugccccaaaccucauagacugaaccacaugggcauuuguuccugcggccuguauaagcaccccggggugccggucaaguggaaacggugaggacuagucccuguucccagagcccacuuuuuuuucuuuuuuugaaauaaaauagccugucuuucagaucucaaaggcucuuuucagagccaccaaaaaaaaaaaaaaaaaaaaaaaaaaaaaaaaaaaaaaaaaaaaaaaaaaaaaaaaaaaaaaaaaaaaaaaaaaaaaaaaaaaaaaaaaaaaaaaaaaaaa

SEQ ID NO: 33909 - RNA, 1764 nt, Artificial Sequence
  mRNA product Design a-2 (hSL-A100) comprising derived and/or modified sequence from LASV(LASV1000-NIG-2009;Clade II)__AIT17782__GPCmut8 (opt5)
aggagaguccgcucagccagguugcagaagcggcuuagcguguguccuaaucuucucucugcguguagguaggccugugccgcaaacaagcuuaccaugggccagaucauuaccuucuuucaagaggugccccacgucaucgaagagguuaugaacauugugcugaucgcccucagccugcuugcuauucugaaggggaucuacaauguggccacaugcggacucuucggccuggucuccuuucuucugcucugugggagaucuugcagcacgaccuauaaaggaguguacgaacugcagacacuggagcucgacauggcgucccugaacauguguaugccucuuucuugcaccaagaauaacagccaucacuauaucaugguuggcaaugaaacagggcuggagcucacccugacaaacaccuccauuaucaaucauaaauucuguaaccuuucugaugcucacaagaaaaaucuguacgaccaugcccucaugagcauuaucuccacguuucaccugagcauuccgaacuucaaucaguaugaggccaugucuugcgauuuuaacggaggcaagaucuccgugcaguacaaucugagccacaccuaugcugucgacgccgcuaaccauuguggcacaauugccaauggggugcuccaaaccuucaugcggauggcguggggaggcucuuacaucgcccuggauuccgggaagggaagcugggacugcaucaugacaucuuaccaguaucuuauuauccagaacaccacgugggaagaucacugucaguuuucccgccccagcccuauuggcuaccuggggcuccugucccaaagaacacgggacaucuauauuucucgcagacuucugggaaccuucacauggacccucagcgauuccgagggcaacgaaacccccggcggguacugccugacacgguggaugcugaucgaggcugagcucaaauguuuuggaaauacggccguugcuaagugcaacgaaaaacaugacgaggaguucugcgauaugcugcgccuuuuugacuucuguaagcaggccaucaaaagacugaagaccccugcgcagaugagcauucagcucaucaauaaggccgugaacgcucugauuaaugaucaacuuaucaugaaaaaccaucugcgggacauuaugggcauccccuauugcaauuacucuaaguauuguuaccucaaccacacagucaccgggaaaacaucccugccucgcugcugucuggugagcaauggaucuuaccucaacgaaacccacuucagcgacgauaucgaacagcaggccgacaauaugauuacggagcugcuucaaaaggaguauaucgauagacagggcaaaacaccgcuggggcucguggaccuguuugucuucuccaccucuuuuuaccugauuagcaucuuccuucaccucguuaagauucccacccaucggcacguggugggaaaaccuugccccaagccucaucgccugaaccacaugggcaucuguuccugcggccuguauaagcaccccggggucccggugaaauggaagagaugaggacuagucccuguucccagagcccacuuuuuuuucuuuuuuugaaauaaaauagccugucuuucagaucucaaaggcucuuuucagagccaccaaaaaaaaaaaaaaaaaaaaaaaaaaaaaaaaaaaaaaaaaaaaaaaaaaaaaaaaaaaaaaaaaaaaaaaaaaaaaaaaaaaaaaaaaaaaaaaaaaaaa

SEQ ID NO: 33910 - RNA, 1764 nt, Artificial Sequence
  mRNA product Design a-2 (hSL-A100) comprising derived and/or modified sequence from LASV(LASV221-NIG-2010;Clade II)__AIT17624__GPCmut8 (opt5)
aggagaguccgcucagccagguugcagaagcggcuuagcguguguccuaaucuucucucugcguguagguaggccugugccgcaaacaagcuuaccaugggccagaucauuaccuucuuucaagaggugccccacgucaucgaagagguuaugaacauugugcugaucgcccucagccugcuugcuauucugaaggggaucuacaauguggccacaugcggacucuucggccuggucuccuuucuucugcucugugggagaucuugcagcacgaccuauaaaggaguguacgaacugcagacacuggagcucgacauggcgucccugaacauguguaugccucuuucuugcaccaagaauaacagccaucacuauaucaugguuggcaaugaaacagggcuggagcucacccugacaaacaccuccauuaucaaucauaaauucuguaaccuuucugaugcucacaagaaaaaucuguacgaccaugcccucaugagcauuaucuccacguuucaccugagcauuccgaacuucaaucaguaugaggccaugucuugcgauuuuaacggaggcaagaucuccgugcaguacaaucugagccacaccuaugcuauugacgccgcuaaccauuguggcacaaucgccaaugggguccuccaaaccuucaugcggauggcguggggaggcucuuacaucgcccuggauuccgggaagggaagcugggacugcauuaugacaucuuaccaguaucuuaucauucagaacaccacgugggaagaucacugucaguuuucccgccccagcccuaucggcuaccuggggcuccugucccaaagaacacgggacauuuauaucucucgcagacuucugggaaccuucacauggacccucagcgauuccgagggcaacgaaacccccggcggguacugccugacacgguggaugcugaucgaggcugagcucaaauguuuuggaaauacggccguggcuaagugcaacgaaaaacaugacgaggaguucugcgauaugcugcgccuuuuugacuucuguaagcaggccauuagacggcugaaaaccccugcgcagaugagcauccagcucauuaauaaggccguuaacgcucugaucaaugaucaacuuauuaugaagaaccaucugcgcgacaucaugggcauccccuauugcaauuacucuaaauauuguuaccucaaccacacagugaccgggaagacaucccugccuagaugcugucuggucagcaauggaucuuaccucaacgaaacccacuucagcgacgauauugaacagcaggccgacaauaugaucacggagaugcugcaaaaagaguauauggaucggcagggcaagacaccgcuugggcugguggaccucuuuguguucuccaccucuuuuuaccugauuagcaucuuccugcaccuugucaaaauucccacccaucgccacguuaucggaaagccuugccccaaaccucauagacucaaccacaugggcauuuguuccugcggccuguauaagcaccccggggugccggugaaguggaaacggugaggacuagucccuguucccagagcccacuuuuuuuucuuuuuuugaaauaaaauagccugucuuucagaucucaaaggcucuuuucagagccaccaaaaaaaaaaaaaaaaaaaaaaaaaaaaaaaaaaaaaaaaaaaaaaaaaaaaaaaaaaaaaaaaaaaaaaaaaaaaaaaaaaaaaaaaaaaaaaaaaaaaa

SEQ ID NO: 33911 - RNA, 1764 nt, Artificial Sequence
  mRNA product Design a-2 (hSL-A100) comprising derived and/or modified sequence from LASV(LASV237-NIG-2010;Clade II)__AIT17638__GPCmut8 (opt5)
aggagaguccgcucagccagguugcagaagcggcuuagcguguguccuaaucuucucucugcguguagguaggccugugccgcaaacaagcuuaccaugggccagaucauuaccuucuuucaagaggugccccacgucaucgaagagguuaugaacauugugcugaucgcccucagccugcuugcuauucugaaggggaucuacaauguggccacaugcggacucuucggccuggucuccuuucuucugcucugugggagaucuugcagcacgaccuauaaaggaguguacgaacugcagacacuggagcucgacauggcgucccugaacauguguaugccucuuucuugcaccaagaauaacagccaucacuauaucaugguuggcaaugaaacagggcuggagcucacccugacaaacaccuccauuaucaaucauaaauucuguaaccuuucugaugcucacaagaaagaccuguacgaucaugcccucaugagcauuaucuccacguuucaccugagcauuccgaauuucaaccaguaugaggccaugucuugcgacuuuaauggaggcaagaucuccgugcaguacaaccugagccacaccuaugcugucgaugccgcuaaucauuguggcacaauugccaacggggugcuccaaaccuucaugcggauggcguggggaggcucuuacaucgcccuggacuccgggaagggaagcugggauugcaucaugacaucuuaccaguaucuuauuauccagaauaccacgugggaagaccacugucaguuuucccgccccagcccuauuggcuaccuggggcuccugucccaaagaacacgggauaucuauauuucucgcagacuucugggaaccuucacauggacccucagcgacuccgagggcaacgaaacccccggcggguacugccugacacgguggaugcugaucgaggcugagcucaaauguuuuggaaacacggccguugcuaagugcaaugaaaaacaugaugaggaguucugcgacaugcugcgccuuuuugauuucuguaagcaggccaucagacggcugaaaaccccugcgcagaugagcauucagcucaucaacaaggccgugaaugcucugauuaacgaccaacuuaucaugaagaaucaucugcgcgacauuaugggcauccccuauugcaacuacucuaaauauuguuaccucaaucacacagucaccgggaagacaucccugccuagaugcugucuggugagcaacggaucuuaccucaaugaaacccacuucagcgaugacaucgaacagcaggccgauaacaugauuacggagcugcuucaaaaagaguauauggaccggcagggcaagacaccgcuggggcucguggaucuguuugucuucuccaccucuuuuuaccugaucagcauuuuccuucaccucaucaaaauucccacccaucgccacaucacaggaaagccuugccccaaaccucauagacugaaucacaugggcauuuguuccugcggccuguauaagcaccccgggguuccggugaaguggaaacggugaggacuagucccuguucccagagcccacuuuuuuuucuuuuuuugaaauaaaauagccugucuuucagaucucaaaggcucuuuucagagccaccaaaaaaaaaaaaaaaaaaaaaaaaaaaaaaaaaaaaaaaaaaaaaaaaaaaaaaaaaaaaaaaaaaaaaaaaaaaaaaaaaaaaaaaaaaaaaaaaaaaaa

SEQ ID NO: 33912 - RNA, 1764 nt, Artificial Sequence
  mRNA product Design a-2 (hSL-A100) comprising derived and/or modified sequence from LASV(LASV253-NIG-2011;Clade II)__AIT17670__GPCmut8 (opt5)
aggagaguccgcucagccagguugcagaagcggcuuagcguguguccuaaucuucucucugcguguagguaggccugugccgcaaacaagcuuaccaugggccagaucauuaccuucuuucaagaggugccccacgucaucgaagagguuaugaacauugugcugaucgcccucagccugcuugcuauucugaaggggaucuacaauguggccacaugcggacucuucggccuggucuccuuucuucugcucugugggagaucuugcagcacgaccuauaaaggaguguacgaacugcagacacuggagcucgacauggcgucccugaacauguguaugccucuuucuugcaccaagaauaacagccaucacuauaucaugguuggcaaugaaacagggcuggagcucacccugacaaacaccuccauuaucaaucauaaauucuguaaccuuucugaugcucacaagaaaaaucuguacgaccaugcccucaugagcauuaucuccacguuucaccugagcauuccgaacuucaaucaguaugaggccaugucuugcgauuuuaacggaggcaagaucuccgugcaguacaaucugagccacaccuaugcugucgacgccgcuaaccauuguggcacaauugccaauggggugcuccaaaccuucaugcggauggcguggggaggcucuuacaucgcccuggauuccgggaagggaagcugggacugcaucaugacaucuuaccaguaucuuauuauccagaacaccacgugggaagaucacugucaguuuucccgccccagcccuauuggcuaccuggggcuccugucccaaagaacacgggacaucuauauuucucgcagacuucugggaaccuucacauggacccucagcgauuccgagggcaacgaaacccccggcggguacugccugacacgguggaugcugaucgaggcugagcucaaauguuuuggaaauacggccguugcuaagugcaacgaaaaacaugacgaggaguucugcgauaugcugcgccuuuuugacuucuguaagcaggccaucagacggcugaaagcgccugcccagaugagcauucagcucaucaauaaggcugugaacgcccugauuaaugaucaacuuaucaugaagaaccaucugcgcgacauuaugggcauccccuauugcaauuacucuaaauauuguuaccucaaccacaccgucacagggagaaccucccugccucggugcugucuggugagcaauggaucuuaccucaacgaaacacacuucagcgacgauaucgaacagcaggcugacaauaugauuaccgagcugcuucaaaaggaguauaucgaucgccagggcaaaacgccgcuggggcucguggaccuguuugucuucuccacaucuuuuuaccugauuagcaucuuccuucaccucguuaagauucccacccauagacacaucauuggaaaaccuugccccaagccucaucggcugaaccacaugggcaucuguuccugcggccuguauaaacaccccggggugccggugaaguggaagcgcugaggacuagucccuguucccagagcccacuuuuuuuucuuuuuuugaaauaaaauagccugucuuucagaucucaaaggcucuuuucagagccaccaaaaaaaaaaaaaaaaaaaaaaaaaaaaaaaaaaaaaaaaaaaaaaaaaaaaaaaaaaaaaaaaaaaaaaaaaaaaaaaaaaaaaaaaaaaaaaaaaaaaa

SEQ ID NO: 33913 - RNA, 1764 nt, Artificial Sequence
  mRNA product Design a-2 (hSL-A100) comprising derived and/or modified sequence from LASV(LASV254-NIG-2011;Clade II)__AIT17674__GPCmut8 (opt5)
aggagaguccgcucagccagguugcagaagcggcuuagcguguguccuaaucuucucucugcguguagguaggccugugccgcaaacaagcuuaccaugggccagaucauuaccuucuuucaagaggugccccacgucaucgaagagguuaugaacauugugcugaucgcccucagccugcuugcuauucugaaggggaucuacaauguggccacaugcggacucuucggccuggucuccuuucuucugcucugugggagaucuugcagcacgaccuauaaaggaguguacgaacugcagacacuggagcucgacaugaccaaccugaauauguguaugccucuuuccugcacaaagaacaauucucaucacuauaucaugguuggcaacgaaaccgggcuggagcucacacugaccaauacgagcauuaucaaccauaaauucuguaaucuuuccgaugcgcacaagaaaaaccuguacaaucaugcucucaugucuauuaucagcaccuuucaccuguccauuccgaacuucaaucaguaugaggccaugagcugcgacuuuaacggaggcaagaucucugugcaguacaaucugucccacagcuaugccgucgaugcugccaaccauuguggcacaauugcuaacggggugcuccaaaccuucaugcggauggccuggggaggcucuuacaucgcgcuggacuccgggaagggaaauugggauugcaucaugacaagcuaccaguaucuuauuauccagaacaccacgugggaagaccacugucaguuuucucgccccuccccuauuggcuaccuggggcuccugagccaaagaacacgggauaucuauauuucccgcagacuucugggaaccuucacauggacccucucugacagcgagggcaaugaaacccccggcggguacugccugacacgguggaugcugaucgaggccgagcucaaauguuuuggaaacacggcuguugccaagugcaaugaaaaacaugaugaggaguucugcgacaugcugcgccuuuuugauuucuguaagcaggcuaucagacggcugaaaaccccugcccaggcgaacauucagcucaucaauaaggccgugaacgcucugauuaaugaccaacuuaucaugaagaaccaucugcgcgauauuaugggcauccccuauugcaauuacuccaaauauuguuaccucaaccacacagucaccgggaagacaagccugccuagaugcugucuggugucuaauggauccuaccucaacgaaacccacuucagcgacgacaucgaacagcaggccgauaauaugauuacggagcugcuucaaaaagaguauauggaccggcagggcaagacaccgcuggggcucguggaucuguuugucuucucuaccagcuuuuaccugaucuccauuuuccuucaccucguuaaaauccccacccaucgccacgugauuggaaagccuugccccaaaccucauagacugaaccacaugggcaucuguucuugcggccuguauaagcaccccggggugccggucaaguggaaacggugaggacuagucccuguucccagagcccacuuuuuuuucuuuuuuugaaauaaaauagccugucuuucagaucucaaaggcucuuuucagagccaccaaaaaaaaaaaaaaaaaaaaaaaaaaaaaaaaaaaaaaaaaaaaaaaaaaaaaaaaaaaaaaaaaaaaaaaaaaaaaaaaaaaaaaaaaaaaaaaaaaaaa

SEQ ID NO: 33914 - RNA, 1764 nt, Artificial Sequence
  mRNA product Design a-2 (hSL-A100) comprising derived and/or modified sequence from LASV(Nig08-A19;Clade III)__ADU56618__GPCmut8 (opt5)
aggagaguccgcucagccagguugcagaagcggcuuagcguguguccuaaucuucucucugcguguagguaggccugugccgcaaacaagcuuaccaugggccagaucgugaccuucuuucaagaggucccccacguuauugaagaggugaugaacaucgugcugauugcccucagcauccuggcuauucuuaaggggcuguacaauaucgccacaugcggacucaucggccuggucacguuccuucugcucuccgggagaucuuguagcaugaccuauaaaggaguguacgaacugcagacacuggagcucaacaugaauacccugaacaugugcaugccucuuuccuguacaaagaauaacucucaucacuauauuaugguuggcaaugaaaccgggcuggagcucacacugaccaacacgagccuucugcaucacaaauuuugcaaucucuccgacgcgcauaagaaaaaccuguacgaucacacccugaugucuaucauuagcacauuccaccucuccaucccgaauuuuaaccaguaugaggcuaugagcugugacuucaauggaggcaagauuaccgugcaguacaaccugucucauuccuaugccaucgaugccgcuaaucacugcggcacagucgccaacggggugcuucaaaccuuuaugcggauggcuuggggaggcagcuacauugcccuggacucugggcgcggaaagugggauuguaucaugacguccuaccaguaucucaucauucagaacacaaccugggaagaccauugccaguucagcagacccucuccuaucggcuaccuggggcuucugucccaacggacacgcgauauuuauaucagcagacggcuccugggaaccuuuaccuggacacuguccgacucugagggcaaugaaacgcccggcggguacugucucacccgcuggaugcugauugaggcggagcuuaaaugcuucggaaacacagccguugcuaaguguaaugaaaaacacgaugaggaauuuugcgacaugcugagacucuucgauuuuugcaagcaggccauccggcgccugaaagcuccugcccagaugagcauccagcuuauuaacaaggcggugaaugcccugaucaacgaccaacucauuaugaagaaucaccugagagauaucaugggcauucccuauuguaacuacuccaaauauugcuaccugaaucauaccagcacagggcggaccucucucccucgcuguugccuggucuccaacggaagcuaccuuaaugagacgcacuucucugacgacaucgaacagcaggcugauaacaugaucacagagaugcugcaaaaggaguaucucgacagacagggcaaaaccccgcuggggcugguggaucuuuucguguuuagcaccuccuucuaccucauuucuaucuuucugcaucuggucaagauucccacacaccggcauaucguuggaaaaccuugucccaagccucaccgccucaaucacaugggcauuugcagcuguggccuguauaaacagcccggggugccggugagauggaagcggugaggacuagucccuguucccagagcccacuuuuuuuucuuuuuuugaaauaaaauagccugucuuucagaucucaaaggcucuuuucagagccaccaaaaaaaaaaaaaaaaaaaaaaaaaaaaaaaaaaaaaaaaaaaaaaaaaaaaaaaaaaaaaaaaaaaaaaaaaaaaaaaaaaaaaaaaaaaaaaaaaaaaa

SEQ ID NO: 33915 - RNA, 1767 nt, Artificial Sequence
  mRNA product Design a-2 (hSL-A100) comprising derived and/or modified sequence from LASV(G1180-SLE-2010;Clade IV)__AIT17168__GPCmut8 (opt5)
aggagaguccgcucagccagguugcagaagcggcuuagcguguguccuaaucuucucucugcguguagguaggccugugccgcaaacaagcuuaccaugggccagaucgugaccuucuuucaagaggucccccacguuauugaagaggugaugaacaucgugcugauugcccucagcauccuggcuguccuuaaggggcuguacaauuucgccacaugcggacucgugggccugcuuacguuucugcuccugugugggagauccugcaccgcgucucgguauaaaggaguuuacgaacugcagacacucgagcugaacauggaaacccuuaauauguguaugccucugagcugcacaaagaacaauucccaucacuauauuauggugggcaacgagaccgggcucgagcugacacuuaccaauacgucuaucaucaaccauaaauucuguaaucugagcgacgcucacaagaaaaaccucuacgaucaugcccugauguccauuaucucuaccuuucaccugagcauuccgaauuucaaccaguaugaagccauguccugcgacuuuaauggaggcaagaucagcguccaguacaaccucucucacuccuaugcuggcgaugccgcuaaucauugugggacaguggccaacggaguucugcaaaccuucaugcgcauggcguggggcgggagcuacauugcccuugacucuggacacggcuccugggauugcaucaugacaagcuaccaguaucugauuauccagaacaccacgugggaggaccauugucaguuuucuagacccuccccuaucggguaccucggacugcuuagccaacggacacgcgauauuuauaucuccagacggcugcucggcaccuucacauggacccugucugacagcgaaggcaaggauacccccgggggauacugccugacacgcuggaugcucauugaggcugagcugaaauguuuuggcaauacggccguggcuaagugcaacgaaaaacacgacgaggaguucugcgauaugcuuagacuguuugacuucuguaagcaggccauccagcggcucaaagcgccugcccagauguccauucaacugaucaauaaggcugucaacgcccuuaucaaugaucagcugauuaugaagaaccaccuccgcgacaucauggggauucccuauugcaauuacagcaaauauuguuaccugaaccauaccacaaccggaaagacaucucugccuaaaugcugucucguguccaauggcagcuaccugaacgaaacccacuucucugacgauaucgaacagcaagcugacaauaugauuacggagaugcuucagaaggaguauauggaaagacaggggaaaacaccgcugggacucguggaucuguuugucuucagcaccuccuuuuaccugaucucuaucuuccuucaucucguuaagauucccacccaccggcauaucgugggcaaaagcugcccuaagccccaccgccugaaccacaugggcauuuguuccugcgggcuguauaagcagccuggagugcccgucaaauggaagagaugaggacuagucccuguucccagagcccacuuuuuuuucuuuuuuugaaauaaaauagccugucuuucagaucucaaaggcucuuuucagagccaccaaaaaaaaaaaaaaaaaaaaaaaaaaaaaaaaaaaaaaaaaaaaaaaaaaaaaaaaaaaaaaaaaaaaaaaaaaaaaaaaaaaaaaaaaaaaaaaaaaaaa

SEQ ID NO: 33916 - RNA, 1767 nt, Artificial Sequence
  mRNA product Design a-2 (hSL-A100) comprising derived and/or modified sequence from LASV(G1442-SLE-2011;Clade IV)__AIT17180__GPCmut8 (opt5)
aggagaguccgcucagccagguugcagaagcggcuuagcguguguccuaaucuucucucugcguguagguaggccugugccgcaaacaagcuuaccaugggccagaucgugaccuucuuucaagaggucccccacguuauugaagaggugaugaacaucgugcugauugcccucagcauccuggcuguccuuaaggggcuguacaauguggccacaugcggacucauuggccugguuacguuccuucugcucugugggagauccugcaccacaacccuguauaaaggaguguacgaacugcagacacucgagcugaacauggaaacccuuaauauguguaugccucugucuugcacaaagaacaauagccaucacuauauccgggucggcaacgagaccgggcucgagcugacgcuuaccaauacauccaucauuaaccauaaauuuuguaaucugucugacgcgcacaagaaaaaccucuacgaucaugcucugaugagcaucauuuccaccuuccaccugucuaucccgaauuuuaaccaguaugaagccaugagcugcgacuucaauggaggcaagauuuccgugcaguacaaccucagccacucuuaugccggcgaugcugccaaucauugugggacaguugcuaacggagugcugcaaaccuuuaugcgcauggccuggggcggguccuacaucgcgcuugacagcggaagaggcaacugggauugcauuaugacgucuuaccaguaucugaucauccagaauacaaccugggacgaucacugucaguucucccggcccagcccuauuggguaccucggacugcuuucucaacgcacaagagacgucuauaucucccggcgccugcucggcaccuuuaccuggacacugagcgauuccgagggcaaggacacgcccgggggauacugccugaccagauggaugcucauugaagccgagcugaaauguuucggcaacacagcuguggccaagugcaaugagaaacaugaugaagaguuuugcgacaugcuucggcuguucgauuuuuguaagcaggcuauccagcgccucaaagccccugcgcagaugucuauucaacugaucaacaaggccgugaaugcucuuaucaacgaccagcugauuaugaagaaucaccucagagacaucauggggauucccuauugcaacuacagcaaauauuguuaccugaauaacaccgccacaggaaagaccucccugccuaaaugcugucucaucagcaauggcucuuaccugaacgaaacgcacuucuccgaugacauugagcaggaagcugauaauaugaucacagagaugcuucaaaaggaguauauggaacggcaggggaaaaccccgcugggacucgucgaccuguucguuuuuagcaccucuuucuaccugaucagcauuuuucuucaucucgugaagauccccacacaccgccauauugugggcaaauccugcccuaagccccacagacugaaccauaugggcaucuguucuugcgggcuguauaagcagccuggaguccccgugcgguggaaacgcugaggacuagucccuguucccagagcccacuuuuuuuucuuuuuuugaaauaaaauagccugucuuucagaucucaaaggcucuuuucagagccaccaaaaaaaaaaaaaaaaaaaaaaaaaaaaaaaaaaaaaaaaaaaaaaaaaaaaaaaaaaaaaaaaaaaaaaaaaaaaaaaaaaaaaaaaaaaaaaaaaaaaa

SEQ ID NO: 33917 - RNA, 1767 nt, Artificial Sequence
  mRNA product Design a-2 (hSL-A100) comprising derived and/or modified sequence from LASV(G3010-SLE-2013;Clade IV)__AIT17344__GPCmut8 (opt5)
aggagaguccgcucagccagguugcagaagcggcuuagcguguguccuaaucuucucucugcguguagguaggccugugccgcaaacaagcuuaccaugggccagaucgugaccuucuuucaagaggucccccacguuauugaagaggugaugaacaucgugcugauugcccucagcauccuggcuguccuuaaggggcuguacaauuucgccacaugcggacucgugggccugguuacguuucuucugcucugugggagauccugcaccacaucucuguauaaaggaguguacgaacugcagacccucgagcugaacauggaaacacuuaauauguguaugccucugagcugcaccaagaacaauucccaucacuauauuauggucggcaacgagacagggcucgagcugacccuuacgaauaccucuaucaucaaccauaaauucuguaaucugagcgacgcgcacaagaaaaaccucuacaaucaugcucugauguccauuaucucuacauuucaccugagcauuccgaacuucaaucaguaugaagccauguccugcgauuuuaacggaggcaagaucagcgugcaguacaaucucucucacuccuaugccggcgacgcugccagccauugugggaccguugcuaacggagugcugcaaacauucaugcggauggccuggggcgggucuuacauugcgcuugauuccggauacggcaagugggacugcaucaugaccagcuaucaguaccugauuauccagaacacgacaugggaggaucacugucaguuuucucgccccuccccuaucggguaucucggacugcuuagccaaagaacccgggacauuuacaucucccgcagacugcucggcacauucaccuggacccugucugauagcgaaggcaaagacacacccgggggauauugccugacgcgguggaugcucauugaggccgagcugaaguguuuuggcaauaccgcugucgccaaaugcaacgaaaagcaugaugaggaguucugcgacaugcuucgccuguuugauuucuguaaacaggcuauccagagacucaagaccccugcccagauguccauucaacugaucaauaaggcggugaacgcccuuaucaaugaccagcugauuaugaaaaaccaccuccgggauaucauggggauucccuacugcaauuauagcaaguacuguuaccugaaccacacaacaaccggaaaaacgucucugccuaagugcugucucguguccaauggcagcuaucugaacgaaacacauuucucugacgacaucgaacagcaagcugauaauaugauuaccgagaugcuucagaaagaguacauggaacgccaggggaagaccccgcugggacucgucgaccuguuuguuuucagcacauccuuuuaucugaucucuaucuuccuucaccucgugaaaauucccacccauagacacaucgugggcaagagcugcccuaagccccaucggcugaaccacaugggcauuuguuccugcgggcuguacaaacagccuggaguccccgugcgcuggaagagaugaggacuagucccuguucccagagcccacuuuuuuuucuuuuuuugaaauaaaauagccugucuuucagaucucaaaggcucuuuucagagccaccaaaaaaaaaaaaaaaaaaaaaaaaaaaaaaaaaaaaaaaaaaaaaaaaaaaaaaaaaaaaaaaaaaaaaaaaaaaaaaaaaaaaaaaaaaaaaaaaaaaaa

SEQ ID NO: 33918 - RNA, 1767 nt, Artificial Sequence
  mRNA product Design a-2 (hSL-A100) comprising derived and/or modified sequence from LASV(G502-SLE-2009;Clade IV)__AIT17126__GPCmut8 (opt5)
aggagaguccgcucagccagguugcagaagcggcuuagcguguguccuaaucuucucucugcguguagguaggccugugccgcaaacaagcuuaccaugggccagaucgugaccuucuuucaagaggucccccacguuauugaagaggugaugaacaucgugcugauugcccucagcauccuggcuguccuuaaggggcuguacaauuucgccacaugcggacucgugggccugcuuacguuucugcuccugugugggagauccugcaccacaggacuguauaaaggcguuuacgaacuccagacccuggagcuuaacauggaaacacugaauauguguaugccucucucuugcaccaagaacaauagccaucacuauauuaugguggggaacgagacaggacuggagcuuacccugacgaauaccuccaucaucaaccauaaauucuguaaucucucugacgcgcacaagaaaaaccuguacgaucaugcucugaugagcauuaucuccacauuucaccucucuauuccgaauuucaaccaguaugaagccaugagcugcgacuuuaauggcggcaagaucuccguccaguacaaccugagccacucuuaugccggggaugcugccgaccauuguggaaccguggcuaauggcguucuucaaacauucaugcggauggccuggggaggguccuacauugcgcuggauagcggccgcgggagaugggacugcaucaugaccucuuaccaguaucucauuauccagaacacgacaugggaggaucacugucaguuuucccggcccagcccuaucggauaccugggccuucugucucaacgcaccagagacauuuauaucucccggcgccuccugggcacauucaccuggacccugagcgauuccgaagggaaggacacacccggaggcuacugccucacgagauggaugcugauugaggccgagcuuaaauguuuugggaacaccgcuguggccaagugcaaugaaaaacaugaugaggaguucugcgacaugcugcggcucuuugauuucuguaagcaggcuauccagcgccugaaagccccugcgcagaugucuauucaacuuaucaacaaggccgucaaugcucugaucaacgaccagcucgugaugaagaaucaccugagagacauuaugggaauccccuauugcaacuacagccgguauuguuaccugaaucacacaaccacaggccgcaccucccucccuaaaugcugucuggugagcaacgggucuuaccuuaaugaaacgcauuucuccgaugacauugaacagcaagccgauaacaugaucacagagaugcugcagaaggaguauauggaaagacagggaaaaaccccgcucggccuggucgaccuguuuguuuucagcaccucuuuuuaccuuauuagcaucuuccuccaccuggugaagauccccacacaucggcacauugugggcaaauccugcccuaagccccaucgccugaaucacauggggaucuguucuugcggacucuauaaacagccuggcguccccgugaaguggaagagaugaggacuagucccuguucccagagcccacuuuuuuuucuuuuuuugaaauaaaauagccugucuuucagaucucaaaggcucuuuucagagccaccaaaaaaaaaaaaaaaaaaaaaaaaaaaaaaaaaaaaaaaaaaaaaaaaaaaaaaaaaaaaaaaaaaaaaaaaaaaaaaaaaaaaaaaaaaaaaaaaaaaaa

SEQ ID NO: 33919 - RNA, 1767 nt, Artificial Sequence
  mRNA product Design a-2 (hSL-A100) comprising derived and/or modified sequence from LASV(G733-SLE-2010;Clade IV)__AIT17154__GPCmut8 (opt5)
aggagaguccgcucagccagguugcagaagcggcuuagcguguguccuaaucuucucucugcguguagguaggccugugccgcaaacaagcuuaccaugggccagaucgugaccuucuuucaagaggucccccacguuauugaagaggugaugaacaucgugcugauugcccucagcauccuggcuguccuuaaggggcuguacaauuucgccacaugcggaauugugggccucguuuccuuucugcuucugugugggagaucuugcacgaccagccucuauaaaggaguguacgaacugcagacacuggagcucaacauggaaacccugaauauguguaugccucuuuccugcacaaagaacaauucucaucacuauaucauggucggcaacgagaccgggcuggagcucacacugaccaauacgagcaucauuaaccauaaauucuguaaucuuuccgacgcgcacaagaaaaaccuguacgaucaugcucucaugucuaucauuagcaccuuucaccuguccaucccgaauuucaaccaguaugaagccaugagcugcgacuuuaauggaggcaagauuucugugcaguacaaccugucccacagcuaugccggcgaugcugccaaucauugugggacaaucgcuaacggaguucuccaaaccuucaugcggauggccuggggcgggucuuacauugcgcuggacuccggacgcgauagaugggacugcaucaugacaagcuaccaguaucuuaucauucagaacaccacgugggaggaucacugucaguuuucucggcccuccccuaucggcuaccuggggcuccugagccaacgcacaagagacauuuauaucucccggcgccuucugggaaccuucacauggacccucucugauagcgaaggcaaggacacccccggcggguacugccugacaagauggaugcugauugaggccgagcucaaauguuuuggaaauacggcuguggccaagugcaacgaaaaacaugaugaggaguucugcgacaugcugcggcuuuuugauuucuguaagcaggcuauccagcgccugaaagccccugcgcagauguccauccaacucauuaauaaggccgucaacgcucugaucaaugaccagcuuauuaugaagaaccaccugagagacaucaugggcauucccuauugcaauuacagcaaauauuguuaccucaaccacaccacaaccgggaagacaucucugccuaaaugcugucugguguccaauggaagcuaccucaacgaaacccauuucucugaugacaucgaacagcaagccgauaauaugaucacggagaugcugcagaaggaguauauggaacggcagggcaaaacaccgcuugggcugguggaccucuuugucuucagcaccuccuuuuaccugauuucuaucuuccugcaccuuguuaagauucccacccaucgccacguggugggaaaaagcugcccuaagccccauagacucaaccacaugggcaucuguuccugcggccuguaugggcagccuggaguccccgugaaguggaaacggugaggacuagucccuguucccagagcccacuuuuuuuucuuuuuuugaaauaaaauagccugucuuucagaucucaaaggcucuuuucagagccaccaaaaaaaaaaaaaaaaaaaaaaaaaaaaaaaaaaaaaaaaaaaaaaaaaaaaaaaaaaaaaaaaaaaaaaaaaaaaaaaaaaaaaaaaaaaaaaaaaaaaa

SEQ ID NO: 33920 - RNA, 1767 nt, Artificial Sequence
  mRNA product Design a-2 (hSL-A100) comprising derived and/or modified sequence from MOPV/LASV reassortant(IGS-1;Clade IV)__AFY05576__GPCmut8 (opt5)
aggagaguccgcucagccagguugcagaagcggcuuagcguguguccuaaucuucucucugcguguagguaggccugugccgcaaacaagcuuaccaugggccagaucgugaccuucuuucaagaggucccccacguuauugaagaggugaugaacaucgugcugauugcccucagcguccuggcugugcuuaaggggcuguacaauuucgccacaugcggacucguuggccuggugacguuucuucugcucugugggagauccugcaccacaucucuguauaaaggagucuacgaacugcagacccucgagcugaacauggaaacacuuaauauguguaugccucugagcugcaccaagaacaauucccaucacuauaucauggugggcaacgagacagggcucgagcugacccuuacgaauaccucuauuaucaaccauaaauucuguaaucugagcgacgcgcacaagaaaaaccucuacgaucaugcucugauguccaucauuucuacauuucaccugagcaucccgaauuucaaccaguaugaagccauguccugcgacuuuaauggaggcaagauuagcguucaguacaaccucucucacuccuaugccggcgaugcugccaaucauugugggaccguggcuaacggaguccugcaaacauucaugcggauggccuggggcgggagcuacaucgcgcuugacucuggacgcggcaacugggauugcauuaugaccuccuaccaguaucugaucauucagaauacgacaugggaggaccacugucaguuuagcagacccucuccuaucggguaccucggacugcuuucccaacggacccgcgauaucuauauuagcagacggcugcucggcacauucaccuggacccuguccgacucugaaggcgaggauacacccgggggauacugccugacgcgcuggaugcucaucgaggccgaacugaaguguuuuggcaacaccgcuguggccaaaugcaaugagaagcaugacgaagaguucugcgauaugcuuagacuguuugacuucuguaaacaggcuauucagcggcucaaggccccugcgcagaugagcauccaacugauuaacaaagccgugaaugcucuuaucaacgaucagcugaucaugaagaaucaccuccgcgacauuauggggauccccuauugcaacuacuccaaguauuguuaccugaaucacacaaccacaggaagaaccagccugccuaaaugcugucucgucucuaacggcuccuaccugaaugaaacgcauuucagcgacgauauugagcagcaagccgacaacaugaucacagagaugcuucagaaggaauauauggagcggcaggggaaaaccccgcugggacucguugaucuguuuguguucucuaccagcuuuuaccugauuuccaucuuccuucaccucgugaagauccccacacaucgccacauugucggcaaaucuugcccuaagccccauagacugaaucacaugggcaucuguagcugcgggcuguauaaacagccuggagugcccguuaaguggaagcggugaggacuagucccuguucccagagcccacuuuuuuuucuuuuuuugaaauaaaauagccugucuuucagaucucaaaggcucuuuucagagccaccaaaaaaaaaaaaaaaaaaaaaaaaaaaaaaaaaaaaaaaaaaaaaaaaaaaaaaaaaaaaaaaaaaaaaaaaaaaaaaaaaaaaaaaaaaaaaaaaaaaaa

SEQ ID NO: 33921 - RNA, 1767 nt, Artificial Sequence
  mRNA product Design a-2 (hSL-A100) comprising derived and/or modified sequence from LASV(LM765-SLE-2012;Clade IV)__AIT17814__GPCmut8 (opt5)
aggagaguccgcucagccagguugcagaagcggcuuagcguguguccuaaucuucucucugcguguagguaggccugugccgcaaacaagcuuaccaugggccagaucgugaccuucuuucaagaggucccccacguuauugaagaggugaugaacaucgugcugauugcccucagcauccuggcuguccuuaaggggcuguacaauuucgccacaugcggacucgugggccugguuacguuucuucugcucugugggagauccugcaccacaucucuguauaaaggaguguacgaacugcagacccucgagcugaacauggaaacacuuaauauguguaugccucugagcugcaccaagaacaauucccaucacuauauuauggucggcaacgagacagggcucgagcugacccuuacgaauaccucuaucaucgaccauaaauucuguaaccugagcgaugcgcaccggaagaaucucuacgaccaugcucugauguccauuaucucuacauuucaccugagcauuccgaacuucaaucaguaugaagccauguccugcgauuuuaacggaggcaaaaucagcgugcaguacaaucucucucacuccuaugccaaggacgcugccgaucauuguggcaccguugcuaacggggugcugcaaacauucaugcgcauggccuggggaggcagcuacauugcgcuugacucugggagaggacggugggauugcaucaugaccuccuaccaguaucugauuauccagaauacgacaugggaggaccacugucaguuuagccgccccucuccuaucggcuaccucgggcugcuuucccaaagaacccgggauauuuauaucagccgcagacugcucggaacauucaccuggacccuguccgacucugaaggcaaggauacacccggcggguacugccugacgcgguggaugcucauugaggccgagcugaaauguuuuggaaacaccgcugucgccaagugcaacgaaaaacaugacgaggaguucugcgauaugcuucgccuguuugacuucuguaagcaggcuauccagagacucaaagccccugcgcagaugagcauucaacugaucaauaaggccgugaacgcucuuaucaaugaccagcugauuaugaagaaccaccuccgggauaucaugggcauucccuauugcaauuacuccaaauauuguuaccugaaccacacaaccacagggaagaccagccugccuaaaugcugucucgugucuaauggauccuaccugaacgaaacgcauuucagcgacgauaucgaacagcaagccgacaauaugauuacagagaugcuucagaaggaguauauggaacgccagggcaaaaccccgcuggggcucgucgaucuguuuguuuucucuaccagcuuuuaccugaucuccaucuuccuucaccucgugaagauucccacacauagacacaucgugggaaaaccuugccccaagccucaucggcugaaccacaugggcauuuguucuugcggccuguauaagcagcccggggucccggugaaauggaagcgcugaggacuagucccuguucccagagcccacuuuuuuuucuuuuuuugaaauaaaauagccugucuuucagaucucaaaggcucuuuucagagccaccaaaaaaaaaaaaaaaaaaaaaaaaaaaaaaaaaaaaaaaaaaaaaaaaaaaaaaaaaaaaaaaaaaaaaaaaaaaaaaaaaaaaaaaaaaaaaaaaaaaaa

SEQ ID NO: 33922 - RNA, 1767 nt, Artificial Sequence
  mRNA product Design a-2 (hSL-A100) comprising derived and/or modified sequence from LASV(LM776-SLE-2012;Clade IV)__AIT17824__GPCmut8 (opt5)
aggagaguccgcucagccagguugcagaagcggcuuagcguguguccuaaucuucucucugcguguagguaggccugugccgcaaacaagcuuaccaugggccagaucgugaccuucuuucaagaggucccccacguuauugaagaggugaugaacaucgugcugauugcccucagcauccuggcuguccuuaaggggcuguacaauuucgccacaugcggacucgugggccugguuacguuucuucugcucugugggagauccugcaccacaucuguguauaaaggagucuacgaacugcagacccuggagcucaacauggaaacacugaauauguguaugccucuuagcugcaccaagaacaauucccaucacuauauuauggugggcaacgagacagggcuggagcucacccugacgaauaccucuaucaucaaccauaaauucuguaaucuuagcgacgcgcacaagaaaaaccuguacgaucaugcucucauguccauuaucucuacauuucaccugagcauuccgaauuucaaccaguaugaagccauguccugcgacuuuaauggaggcaagaucagcguucaguacaaccugucucacuccuaugccggcgaugcugccaaucauugugggaccguggcuaacggaguccuccaaacauucaugcggauggccuggggcgggagcuacauugcgcuggacucuggacacggcaagugggauugcaucaugaccuccuaccaguaucuuauuauccagaacacgacaugggaggaccauugucaguuuagccgccccucuccuaucggguaccugggacuccugucccaaagaacccgggauauuuauaucagccgcagacuucugggcacauucaccuggacccucuccgacucugaaggcaaagauacacccgggggauacugccugacgcgguggaugcugauugaggccgagcucaaguguuuuggcaauaccgcuguggccaaaugcaacgaaaagcacgacgaggaguucugcgauaugcugcgccuuuuugacuucuguaaacaggcuauccagagacugaaggccccugcgcagaugagcauucaacucaucaauaaggccgugaacgcucugaucaaugaucagcuuauuaugaaaaaccaucugcgggacaucauggggauucccuauugcaauuacuccaaguauuguuaccucaaccacacaaccacaggaaaaaccagccugccuaagugcugucuggucucuaauggcuccuaccucaacgaaacgcacuucagcgacgauaucgaacagcaagccgacaauaugauuacagagaugcugcagaaagaguauauggaacgccaggggaagaccccgcuuggacugguugaucucuuuguguucucuaccagcuuuuaccugaucuccaucuuccugcaucuugugaaaauucccacacacagacauaucgucggcaagucuugcccuaagccccaccggcucaaccacaugggcauuuguagcugcgggcuguauaaacagccuggagugcccguucgcuggaagagaugaggacuagucccuguucccagagcccacuuuuuuuucuuuuuuugaaauaaaauagccugucuuucagaucucaaaggcucuuuucagagccaccaaaaaaaaaaaaaaaaaaaaaaaaaaaaaaaaaaaaaaaaaaaaaaaaaaaaaaaaaaaaaaaaaaaaaaaaaaaaaaaaaaaaaaaaaaaaaaaaaaaaa

SEQ ID NO: 33923 - RNA, 1767 nt, Artificial Sequence
  mRNA product Design a-2 (hSL-A100) comprising derived and/or modified sequence from LASV(Mad39;Clade IV)__ANH09722__GPCmut8 (opt5)
aggagaguccgcucagccagguugcagaagcggcuuagcguguguccuaaucuucucucugcguguagguaggccugugccgcaaacaagcuuaccaugggccagaucgugaccuucuuucaagaggucccccacguuauugaagaggugaugaacaucgugcugauugcccucagcauccuggcuguccuuaaggggcuguacaauguggccacaugcggacucauuggccugguuacguuccuucugcucugugggagauccugcaccacaacccuguauaaaggaguguacgaacugcaggcgcucgagcugaacauggaaacacuuaauauguguaugccucugucuugcaccaagaacaauagccaucacuauauccgggucggcaacgagacagggcucgagcugacccuuacgaauaccucccugaucaaccauaaauuuuguaaucucucugacgcucacaagaaaaaccuguacgaucaugcccugaugagcauuaucuccacauuccaccucucuauuccgaauuuuaaccaguaugaagccaugagcugcgacuucaaugauggaaagaucuccgugcaguacaaccugagccacaccuaugcuggcgacacagccaaucauuguggcaccguugcuaacggggugcuucaaacguuuaugcgcauggccuggggaggcucuuacauugcgcuggauuccgggagaggaggcugggacugcaucaugacaagcuaccaguaucucauuauccagaacaccacaugggaggaucacugucaguucucucggcccuccccuaucggguaccugggacuucugagccaacgcaccagagacauuuauaucucucggcgccuccugggcaccuuuacauggacgcuguccgauagcgaaggcaaggacacccccgggggauacugccucacaagauggaugcugauugaggccgagcuuaaauguuucggcaauaccgcugucgccaagugcaacgaaaaacaugaugaggaauuuugcgacaugcugcgccucuucgauuuuuguaagcaggcuauccagcggcugaaagccccugcgcagauguccauucaacuuaucaauaaggccgugaacgcucugaucaaugaccagcucauuaugaagaaccaccugagagacaucauggggauucccuauugcaauuacucuaaauauuguuaccugaaccacacagugaccggaaagacgagccucccuaaaugcugucuggucuccaauggcagcuaccuuaacgagacacauuucucugaugacaucgaacagcaagccgauaauaugauuaccgagaugcugcagaaggaguauauggaacggcaggggaaaaccccgcucggacugguugaccuguucguguuuuccaccagcuucuaccuuaucucuaucuuucuccaccuggugaagauucccacacaucgccacgucgugggcaaaccuugccccaagccucauagacugaaccacaugggcaucuguagcugcggguucuauaagcagcccggaguuccggugcgguggaaacgcugaggacuagucccuguucccagagcccacuuuuuuuucuuuuuuugaaauaaaauagccugucuuucagaucucaaaggcucuuuucagagccaccaaaaaaaaaaaaaaaaaaaaaaaaaaaaaaaaaaaaaaaaaaaaaaaaaaaaaaaaaaaaaaaaaaaaaaaaaaaaaaaaaaaaaaaaaaaaaaaaaaaaa

SEQ ID NO: 33924 - RNA, 1767 nt, Artificial Sequence
  mRNA product Design a-2 (hSL-A100) comprising derived and/or modified sequence from LASV(Z0947-SLE-2011;Clade IV)__AIT17840__GPCmut8 (opt5)
aggagaguccgcucagccagguugcagaagcggcuuagcguguguccuaaucuucucucugcguguagguaggccugugccgcaaacaagcuuaccaugggccagaucgugaccuucuuucaagaggucccccacguuauugaagaggugaugaacaucgugcugauugcccucagcauccuggcuguccuuaaggggcuguacaauuucgccacaugcggacucgugggccugguuacguuucuucugcucugugggagauccugcaccauuucucuguauaaaggaguguacgaacugcagacacucgagcugaacauggaaacccuuaauauguguaugccucugagcugcacaaagaacaauucccaucacuauaucauggucggcaacgagaccgggcucgagcugacacuuaccaauacgucuaucauuaaccauaaauucuguaaucugagcgacgcgcacaagaaaaaccucuacgaucaugcucugauguccaucauuucuaccuuucaccugagcaucccgaauuucaaccaguaugaagccauguccugcgacuuuaauggaggcaagauuagcgugcaguacaaccucucucacuccuaugccggcgaugcugccaaucauugugggacaguugcuaacggagugcugcaaaccuucaugcggauggccuggggcgggagcuacaucgcgcuugacucuggacgcgauagaugggacugcauuaugacauccuaccaguaucugaucauccagaacaccacgugggaggaucacugucaguuuagccggcccucuccuauuggcuaccucgggcugcuuucccaacgcacaagagacaucuauauuagccggcgccugcucggaaccuucacauggacccuguccgauucugaaggcaaggacacccccggcggguacugccugacaagauggaugcucaucgaggccgagcugaaauguuuuggaaauacggcugucgccaagugcaacgaaaaacaugaugaggaguucugcgacaugcuucggcuguuugauuucuguaagcaggcuauucagcgccucaaagccccugcgcagaugagcauccaacugaucaauaaggccgugaacgcucuuauuaaugaccagcugaucaugaagaaccaccucagagacauuaugggcauccccuauugcaauuacuccaaauauuguuaccugaaccacaccacaaccgggaagacaagccugccuaaaugcugucucgugucuaauggauccuaccugaacgaaacccauuucagcgaugacauugaacagcaagccgauaauaugaucacggagaugcuucagaaggaguauauggaacggcagggcaaaacaccgcuggggcucgucgaccuguuuguuuucucuaccagcuuuuaccugaucuccauuuuccuucaccucgugaagauccccacccaucgccacauugugggaaaaccuugccccaagccucauagacugaaccacaugggcaucuguucuugcggccuguauaagcagcccggggucccggugaaauggaagcggugaggacuagucccuguucccagagcccacuuuuuuuucuuuuuuugaaauaaaauagccugucuuucagaucucaaaggcucuuuucagagccaccaaaaaaaaaaaaaaaaaaaaaaaaaaaaaaaaaaaaaaaaaaaaaaaaaaaaaaaaaaaaaaaaaaaaaaaaaaaaaaaaaaaaaaaaaaaaaaaaaaaaa

SEQ ID NO: 33925 - RNA, 1743 nt, Artificial Sequence
  mRNA product Design a-2 (A100) comprising derived and/or modified sequence from LASV(Josiah;Clade IV)__NP_694870__GPCmut8 (opt1)
aggagaguccgcucagccagguugcagaagcggcuuagcguguguccuaaucuucucucugcguguagguaggccugugccgcaaacaagcuuaccaugggccagaucgugaccuucuuccaggaggucccccacgugaucgaggaggugaugaacaucguccugaucgcccucagcgugcuggccgugcugaaggggcucuacaacuucgcgaccugcggccuggucgggcuggugacguuccuccugcugugcggccgcuccugcaccaccagccucuacaaggggguguacgagcugcagacccuggagcucaacauggagacgcugaacaugugcaugccgcuguccugcaccaagaacaacagccaccacuacaucauggucggcaacgagaccggccucgagcugacgcugaccaacaccuccaucaucaaccacaaguucugcaaccucagcgacgcccacaagaagaaccuguacgaccacgcccugauguccaucaucagcaccuuccaccucuccauccccaacuucaaccaguacgaggccaugagcugcgacuucaacgggggcaagaucuccgugcaguacaaccugagccacuccuacgccggggacgcggccaaccacugcggcacgguggccaacgggguccugcagaccuucaugcggauggccuggggcggcagcuacaucgcgcucgacuccgggcgcggcaacugggacugcaucaugaccagcuaccaguaccugaucauccagaacaccacgugggaggaccacugccaguucucccggcccagccccaucggguaccugggccuccugucccagcgcacccgggacaucuacaucagccgccggcugcucggcaccuucaccuggacgcugagcgacuccgaggggaaggacaccccgggcggguacugccugacccgcuggaugcucaucgaggccgagcugaagugcuucggcaacaccgccguggccaagugcaacgagaagcacgacgaggaguucugcgacaugcugcggcuguucgacuucugcaagcaggccauccagcgccugaaggcgcccgcccagaugagcauccagcugaucaacaaggccgugaacgcccucaucaacgaccagcugaucaugaagaaccaccuccgggacaucauggggauccccuacugcaacuacuccaaguacugcuaccucaaccacacgaccaccggccgcaccagccugcccaagugcugccuggucuccaacggcagcuaccucaacgagacgcacuucuccgacgacaucgagcagcaggccgacaacaugaucaccgagaugcugcagaaggaguacauggagcggcaggggaagacgccccugggccucguggaccuguucguguucagcaccuccuucuaccugaucagcaucuuccugcaccucgucaagaucccgacccaccgccacaucguggggaaguccugccccaagccccaccggcugaaccacaugggcaucugcagcugcgggcuguacaagcagcccggcgugccggucaaguggaagcgcugaggacuagucccuguucccagagcccacuuuuuuuucuuuuuuugaaauaaaauagccugucuuucagaucuaaaaaaaaaaaaaaaaaaaaaaaaaaaaaaaaaaaaaaaaaaaaaaaaaaaaaaaaaaaaaaaaaaaaaaaaaaaaaaaaaaaaaaaaaaaaaaaaaaaa

SEQ ID NO: 33926 - RNA, 1740 nt, Artificial Sequence
  mRNA product Design a-2 (A100) comprising derived and/or modified sequence from LASV(LP;Clade I)__AAF86701__GPCmut8 (opt1)
aggagaguccgcucagccagguugcagaagcggcuuagcguguguccuaaucuucucucugcguguagguaggccugugccgcaaacaagcuuaccaugggccagaucaucaccuucuuccaggaggugccccacgucaucgaggaggugaugaacaucgugcugaucgcccucagccugcuggccauccucaaggggcuguacaacaucgcgaccugcggcaucaucgggcuggucgccuuccucuuccugugcggcaaguccugcagccugacgcucaagggcggguacgagcugcagacccuggagcucaacauggagacccugaacaugugcaugccgcuguccugcacgaagaacagcucccaccacuacauccgcgugggcaacgagaccgggcucgagcugacccugaccaacacgagcaucaucaaccacaaguucugcaaccucuccgacgcccacaagaagaaccuguacgaccacgcccugaugagcaucaucuccaccuuccaccucagcauccccaacuucaaccaguacgaggccauguccugcgacuucaacggcgggaagaucagcgugcaguacaaccugucccacagcuacgcgggcgacgccgccgagcacugcgggaccgucgccaacggcgugcugcagaccuucaugcggauggcguggggcgggcgcuacaucgcccucgacuccggcaaggggaacugggacugcaucaugacgagcuaccaguaccugaucauccagaacaccaccugggaggaccacugccaguucucccggcccagccccaucggcuaccugggccuccugucccagcgcacccgggacaucuacaucagccgccggcugcucgggacguucaccuggacccugagcgacuccgagggcaacgagacccccgggggcuacugccugacgcgcuggaugcucaucgaggccgagcugaagugcuucgggaacaccgccguggccaagugcaacgagaagcacgacgaggaguucugcgacaugcugcggcuguucgacuucugcaagcaggcgauccgccggcugaaggcccccgcccagaugagcauccagcugaucaacaaggccgucaacgcccucaucaacgaccagcugaucaugaagaaccaccuccgcgacaucaugggcauccccuacugcaacuacuccaaguacugcuaccucaaccacaccagcuccggccggaccagccugcccaagugcugccugaucuccaacgggagcuaccucaacgagacgcaguucuccgacgacaucgagcagcaggcggacaacaugaucaccgagaugcugcagaaggaguacaucgagcgccagggcaagaccccgcuggggcucguggacaucuucaucuucagcaccuccuucuaccugaucagcaucuuccugcaccugaucaagaucccgacgcaccggcacaucgugggcaagcccugccccaagccccaccgccucaaccacaugggggucugcuccugcggccuguacaagcacccgggcgugcccaccaaguggaagcggugaggacuagucccuguucccagagcccacuuuuuuuucuuuuuuugaaauaaaauagccugucuuucagaucuaaaaaaaaaaaaaaaaaaaaaaaaaaaaaaaaaaaaaaaaaaaaaaaaaaaaaaaaaaaaaaaaaaaaaaaaaaaaaaaaaaaaaaaaaaaaaaaaaaaa

SEQ ID NO: 33927 - RNA, 1740 nt, Artificial Sequence
  mRNA product Design a-2 (A100) comprising derived and/or modified sequence from LASV(803213;Clade II)__AAF86703__GPCmut8 (opt1)
aggagaguccgcucagccagguugcagaagcggcuuagcguguguccuaaucuucucucugcguguagguaggccugugccgcaaacaagcuuaccaugggccagaucaucaccuucuuccaggaggugccccacgucaucgaggaggugaugaacaucgugcugaucgcccucagccugcuggccauccucaaggggaucuacaacgucgcgaccugcggccuguucgggcugaucuccuuccuccugcugugcggccgcagcugcuccgugacguacaaggggguguacgagcuccagacccuggagcugaacauggccaaccucaacaugugcaugccgcugagcugcaccaagaacaacucccaccacuacaucauggucggcaacgagacgggccuggagcucacccugaccaacaccagcaucaucaaccacaaguucugcaaccuguccgacgcccacaagaagaaccucuacgaccacgcccugaugagcaucaucuccacguuccaccugagcauccccaacuucaaccaguacgaggccauguccugcgacuucaacgggggcaagaucagcgugcaguacaaccucucccacagcuucgcgguggacgccgccaaccacugcgggaccaucgccaacggcguccugcagaccuucaugcggauggcguggggcggguccuacaucgcccuggacagcggcaaggggaacugggacugcaucaugaccuccuaccaguaccucaucauccagaacacgaccugggaggaccacugccaguucagccgccccucccccaucggcuaccuggggcugcucagccagcggacccgcgacaucuacaucagccggcgccugcugggcaccuucacguggacccucuccgacagcgagggcaacgaggcccccgggggcuacugccugacccgguggaugcugaucgaggccgagcucaagugcuucgggaacaccgccguggcgaagugcaacgagaagcacgacgaggaguucugcgacaugcugcgccuguucgacuucugcaagcaggccaucaagcggcucaagacgcccgcccagauguccauccagcugaucaacaaggccgugaacgcccugaucaacgaccagcucaucaugaagaaccaccuccgcgacaucaugggcauccccuacugcaacuacagccgguacugcuaccugaaccacaccgucaccgggaagaccucccugccccgcugcugccuggugagcaacggcuccuaccugaacgagacgcacuucagcgacgacaucgagcagcaggcggacaacaugaucaccgagaugcuccagaaggaguacauggaccggcagggcaagaccccgcuggggcugguggaccucuucgucuucuccaccagcuucuaccugaucuccaucuuccugcaccuggugaagaucccgacgcaccgccacaucgugggcaagcccugccccaagccccaccggcucaaccacauggggaucugcagcugcggccuguacaagcacccggggguccccgugaaguggaagcgcugaggacuagucccuguucccagagcccacuuuuuuuucuuuuuuugaaauaaaauagccugucuuucagaucuaaaaaaaaaaaaaaaaaaaaaaaaaaaaaaaaaaaaaaaaaaaaaaaaaaaaaaaaaaaaaaaaaaaaaaaaaaaaaaaaaaaaaaaaaaaaaaaaaaaa

SEQ ID NO: 33928 - RNA, 1740 nt, Artificial Sequence
  mRNA product Design a-2 (A100) comprising derived and/or modified sequence from LASV(GA391;Clade III)__CAA36645__GPCmut8 (opt1)
aggagaguccgcucagccagguugcagaagcggcuuagcguguguccuaaucuucucucugcguguagguaggccugugccgcaaacaagcuuaccaugggccagaucgugaccuucuuccaggaggucccccacgugaucgaggaggugaugaacaucguccugaucgcccucagcauccuggccauccugaaggggcucuacaacguggcgaccugcggccugaucgggcuggugacguuccuccugcuguccggccgcagcugcucccucaucuacaaggggaccuacgagcugcagacccuggagcucaacauggagacccugaacaugugcaugccgcugagcugcaccaagaacaacucccaccacuacauccgggucggcaacgagaccggccucgagcugacccugacgaacaccagcauccucaaccacaaguucugcaaccuguccgacgcccacaagcgcaaccuguacgaccacagccucauguccaucaucagcaccuuccaccuguccauccccaacuucaaccaguacgaggccaugagcugcgacuucaacgggggcaagaucaccgugcaguacaaccugucccacagcuucgccguggacgccgcggggcacugcggcacgcucgccaacgggguccugcagaccuucaugcggauggccuggggcggcuccuacaucgcccuggacagcgggcgcggcaacugggacugcaucaugaccuccuaccaguaccucaucauccagaacaccacgugggacgaccacugccaguucagccggcccucccccaucggguaccugggccugcucagccagcgcacccgggacaucuacaucagccgccggcugcugggcaccuucaccuggacgcucuccgacagcgaggggaacgagaccccgggcggguacugccugacccgcuggaugcugaucgaggcggagcucaagugcuucggcaacaccgccguggccaagugcaacgagaagcacgacgaggaguucugcgacaugcugcggcuguucgacuucugcaagcaggccauccgccggcucaagacgcccgcccagauguccauccagcugaucaacaaggcggugaacgcccugaucaacgaccagcucaucaugaagaaccaccuccgcgacaucauggggauccccuacugcaacuacagccgguacugcuaccugaaccacaccuccaccggcaagaccagccugccccgcugcugccugaucuccaacggcagcuaccugaacgagacgaaguucuccgacgacaucgagcagcaggccgacaacaugaucaccgagaugcuccagaaggaguacaucgaccggcaggggaagacgccccugggccuggucgaccuguucguguucagcaccuccuucuaccucaucagcaucuuccugcaccuggugaagaucccgacccaccgccacaucgucgggaagcccugccccaagccccaccggcucaaccacaugggcaucugcuccugcgggcuguacaagcagccgggcgugcccgugcgcuggaagcggugaggacuagucccuguucccagagcccacuuuuuuuucuuuuuuugaaauaaaauagccugucuuucagaucuaaaaaaaaaaaaaaaaaaaaaaaaaaaaaaaaaaaaaaaaaaaaaaaaaaaaaaaaaaaaaaaaaaaaaaaaaaaaaaaaaaaaaaaaaaaaaaaaaaaa

SEQ ID NO: 33929 - RNA, 1743 nt, Artificial Sequence
  mRNA product Design a-2 (A100) comprising derived and/or modified sequence from LASV(AV;Clade V)__CCA30314__GPCmut8 (opt1)
aggagaguccgcucagccagguugcagaagcggcuuagcguguguccuaaucuucucucugcguguagguaggccugugccgcaaacaagcuuaccaugggccagaucgugaccuucuuccaggaggucccccacgugaucgaggaggugaugaacaucguccugaucgcccucagcauccuggccgugcugaaggggcucuacaacaucgcgaccugcggccugaucgggcugaucacguuccuccugcugugcggccgcuccugcagcuccaaccucuacaaggggguguacgagcugcagagccuggaccucaacauggagacccugaacaugugcaugccgcuguccugcaccaagaacaacagccaccacuacauccgggucggcaacgacacgggccucgagcugacccugaccaacaccuccauccucaaccacaaguucugcaaccugagcgacgcccacaagaaggaccuguacgaccacgcccucauguccaucaucagcacguuccaccuguccauccccaacuucaaccaguacgaggccaugagcugcgacuucaacgggggcaagaucuccgugcaguacaaccugagccacuccuacgccaucgacgcggccaaccacugcgggaccguggccaacggcauccuccagaccuucaugcgcauggccuggggcgggagcuacaucgcgcuggacuccggccgggggaacugggacugcaucaugaccagcuaccaguaccugaucauccagaacacgaccugggagaaccacugccaguucucccgccccagccccaucggcuaccucgggcugcugagccagcggacccgcgacaucuacaucucccggcgccuccugggcaccuucacguggacccugagcgacuccgagggcaacgccacccccgggggcuacugccucacccgguggaugcugaucgaggccgagcugaagugcuucgggaacacggccgucgccaagugcaacgagaagcacgacgaggaguucugcgacaugcuccgccuguucgacuucugcaagcaggcgaucagccggcugaagucccccgcccagaugagcauccagcucaucaacaaggccgugaacgcccugaucaacgaccagcugaucaugaagaaccaccuccgcgacaucaugggcauccccuacugcaacuacuccaaguacugcuaccugaaccacaccaucaccgggaagaccagccugcccaagugcugccucguguccaacggcagcuaccugaacgagacgcacuucuccgacgacaucgagcagcaggccgacaacaugaucaccgagaugcugcagaaggaguacauggagcggcagggcaagaccccgcucgggcuggucgaccuguucguguucagcaccuccuucuaccugaucagcaucuuccuccgccuggugaagaucccgacgcaccggcacaucgucggcaagcccugccccaagccccaccgccugaaccacauggggaucugcuccugcggccucuacaagcagccgggggugcccgugcgguggaagcgcugaggacuagucccuguucccagagcccacuuuuuuuucuuuuuuugaaauaaaauagccugucuuucagaucuaaaaaaaaaaaaaaaaaaaaaaaaaaaaaaaaaaaaaaaaaaaaaaaaaaaaaaaaaaaaaaaaaaaaaaaaaaaaaaaaaaaaaaaaaaaaaaaaaaaa

SEQ ID NO: 33930 - RNA, 1740 nt, Artificial Sequence
  mRNA product Design a-2 (A100) comprising derived and/or modified sequence from LASV(Togo/2016/7082;Clade VI)__AMR44577__GPCmut8 (opt1)
aggagaguccgcucagccagguugcagaagcggcuuagcguguguccuaaucuucucucugcguguagguaggccugugccgcaaacaagcuuaccaugggccagaucaucaccuucuuccaggaggugccccacgucaucgaggaggugaugaacaucgugcugaucgcccucagccugcuggccauccucaagggggucuacaacguggcgaccugcggcaucaucgggcuggugacguuccuguuccucugcggccgcuccugcagccugaucuacaagggguccuacgagcugcagacccucgagcugaacauggagacccugaacaugugcaugccgcucagcugcacgaagaacuccagccaccacuacauccgggucggcaacgagaccggccuggagcugacccucaccaacacguccaucaucaaccacaaguucugcaaccugagcgacgcccacaagcgcaaccuguacgaccacgcccucauguccauccugagcaccuuccaccuguccauccccaacuucaaccaguacgaggccaugagcugcgacuucaacgggggcaagaucuccgugcaguacaaccucagccacgccuacgcgguggacgccgccgagcacugcgggaccgucgccaacggcgugcugcagaccuucaugcggauggcguggggcggguccuacaucgcccuggacagcggccgcgggaacugggacugcaucaugacguccuaccaguaccucaucauccagaacaccaccugggaggaccacugccaguucagccggcccucccccaucggcuaccuggggcugcucagccagcgcacccgggacaucuacaucagccgccggcugcugggcacguucaccuggacccucuccgacagcgagggcaacgagacccccgggggcuacugccugacgcgcuggaugcugaucgaggccgagcucaagugcuucgggaacaccgccguggccaagugcaacgagaagcacgacgaggaguucugcgacaugcugcggcuguucgacuucugcaagcaggcgauccagcgccucaagucccccgcccagaugagcauccagcugaucaacaaggccgucaacgcccugaucaacgaccagcucaucaugaagaaccaccuccgggacaugaugggcauccccuacugcaacuacuccaaguacugcuaccugaaccacaccagcuccgggcgcaccagccugcccaagugcugccugguguccaacggcagcuaccugaacgagacgcacuucuccgacgacaucgagcagcaggccgacaacaugaucaccgagaugcuccagaaggaguacaucgaccggcagggcaagaccccgcuggggcugguggaccucuucgucuucagcaccuccuucuaccugaucagcaucuuccugcaccugaucaagaucccgacgcaccgccacaucgugggcaagcccugccccaagccccaccggcucaaccacauggggaucugcuccugcggccuguacaagcagccgggggugcccacccgcuggaagcggugaggacuagucccuguucccagagcccacuuuuuuuucuuuuuuugaaauaaaauagccugucuuucagaucuaaaaaaaaaaaaaaaaaaaaaaaaaaaaaaaaaaaaaaaaaaaaaaaaaaaaaaaaaaaaaaaaaaaaaaaaaaaaaaaaaaaaaaaaaaaaaaaaaaaa

SEQ ID NO: 33931 - RNA, 1740 nt, Artificial Sequence
  mRNA product Design a-2 (A100) comprising derived and/or modified sequence from LASV(KAK-428;Clade n.d. (VII))__ANH09740__GPCmut8 (opt1)
aggagaguccgcucagccagguugcagaagcggcuuagcguguguccuaaucuucucucugcguguagguaggccugugccgcaaacaagcuuaccaugggccagaucgugaccuucuuccaggaggucccccacgugaucgaggaggugaugaacaucguccugaucgcccucagccugcuggccauccucaaggggcuguacaacuucgcgaccugcggcgugaucgggcugaucacguuccuccugcugugcggccgcuccugcagcgccaccuacaaggggcaguacgagcuccagacccuggagcugaacauggagucccucaacaugugcaugccgcugagcugcacgaagaacaacucccaccacuacauccgggccggcaacaacaccggccuggagcucacccugaccaacacgagcaucaucucccacaaguucugcaaccugagcgacgcccacaagaagaaccucuacgaccacacccugauguccaucaucaccaccuuccaccugagcauccccaacuucaaccaguacgaggccauguccugcgacuucaacgggggcaagaucagcauccaguacaaccucucccacagcuacgcgggggacgccgcccagcacugcggcacgguggccaacgggguccugcagaccuucaugcgcauggcguggggcggcuccuaccuggcccucgacagcgggcggcgcggcugggacugcaucaucuccagcuaccaguaccugaucauccagaacaccaccugggacgaccacugccaguucucccggcccagccccaucggguaccugggcuucgugagccagaagacgcgcgacaucuacaucucccggcgccuccugggcaccuucaccuggacccugagcgacuccgaggggcacgacaugccgggcggguacugccucacgcgguggaugcugaucgaggccgaccugaagugcuucggcaacaccgccguggccaagugcaacgagaagcacgacgaggaguucugcgacauguggcgccucuucgacuucugcaagcaggcgauccagcggcugaaggcccccgcccagaugaacauccagcugaucaacaaggccgucaacgcccucaucaacgaccagcugaugaugaagaaccaccuccgcgacaucauggggauccccuacugcaacuacagcaaguucugcuaccugaacaacaccaccacgggccggaccucccugccccgcugcugccugaucagcaacggcuccuaccucaacgagacccacuucagcgacgacaucgagcagcaggcggacaacaugaucaccgagaugcugcagaaggaguacauggaccggcaggggaagacgccccugggccucguggaccuguucguguucuccaccagcuucuaccugaucaccaucuuccuccaccuggucaagaucccgacccaccgccacaucguggggaagcccugccccaagccccaccggcugaaccacaugggcaucugcuccugcgggcuguacaagcagccgggcgugcccguccgcuggaagcggugaggacuagucccuguucccagagcccacuuuuuuuucuuuuuuugaaauaaaauagccugucuuucagaucuaaaaaaaaaaaaaaaaaaaaaaaaaaaaaaaaaaaaaaaaaaaaaaaaaaaaaaaaaaaaaaaaaaaaaaaaaaaaaaaaaaaaaaaaaaaaaaaaaaaa

SEQ ID NO: 33932 - RNA, 1740 nt, Artificial Sequence; identical to SEQ ID NO: 33926
  mRNA product Design a-2 (A100) comprising derived and/or modified sequence from LASV(Pinneo-NIG-1969;Clade I)__AIT17836__GPCmut8 (opt1)

SEQ ID NO: 33933 - RNA, 1740 nt, Artificial Sequence
  mRNA product Design a-2 (A100) comprising derived and/or modified sequence from LASV(ISTH0009-NIG-2011;Clade II)__AIT17404__GPCmut8 (opt1)
aggagaguccgcucagccagguugcagaagcggcuuagcguguguccuaaucuucucucugcguguagguaggccugugccgcaaacaagcuuaccaugggccagaucaucaccuucuuccaggaggugccccacgucaucgaggaggugaugaacaucgugcugaucgcccucagccugcuggccauccucaaggggaucuacaacgucgcgaccugcggccuguucgggcugguguccuuccuccugcugugcggccgcagcugcuccacgaccuacaaggggguguacgagcuccagacccuggagcuggacauggccagccucaacaugugcaugccgcuguccugcacgaagaacaacagccaccacuacaucauggucggcaacgagaccggccuggagcucacccugaccaacacguccaucaucaaccacaaguucugcaaccugagcgacgcccacaagaagaaccucuacgaccacgcccugauguccaucaucagcaccuuccaccuguccauccccaacuucaaccaguacgaggccaugagcugcgacuucaacgggggcaagaucuccgugcaguacaaccucagccacgcguacgccguggacgccgccaaccacugcgggaccaucgcgaacggcguccugcagaccuucaugcggauggccuggggcggguccuacaucgcccuggacagcggcaagggguccugggacugcaucaugacgagcuaccaguaccucaucauccagaacaccaccugggaggaccacugccaguucucccgccccagccccaucggcuaccuggggcugcucagccagcggacccgcgacaucuacaucucccggcgccugcugggcacguucaccuggacccucagcgacuccgagggcaacgagacccccgggggcuacugccugacgcgguggaugcugaucgaggccgagcucaagugcuucgggaacaccgccguggcgaagugcaacgagaagcacgacgaggaguucugcgacaugcugcgccuguucgacuucugcaagcaggccauccggcgccucaagacccccgcccagaugagcauccagcugaucaacaaggccgugaacgcccugaucaacgaccagcucaucaugaagaaccaccuccgggacaucaugggcaucccguacugcaacuacuccaaguacugcuaccugaaccacaccgucacggggaagaccagccugccccgcugcugccugguguccaacggcagcuaccugaacgagacccacuucuccgacgacaucgagcagcaggcggacaacaugaucaccgagcuccugcagaaggaguacauggaccggcagggcaagacgccccuggggcucguggaccuguucgucuucagcaccuccuucuaccugaucagcaucuuccugcaccucaucaagaucccgacccaccgccacaucaccggcaagcccugccccaagccccaccggcugaaccacauggggaucugcuccugcggccuguacaagcacccgggggugcccgugaaguggaagcgcugaggacuagucccuguucccagagcccacuuuuuuuucuuuuuuugaaauaaaauagccugucuuucagaucuaaaaaaaaaaaaaaaaaaaaaaaaaaaaaaaaaaaaaaaaaaaaaaaaaaaaaaaaaaaaaaaaaaaaaaaaaaaaaaaaaaaaaaaaaaaaaaaaaaaa

SEQ ID NO: 33934 - RNA, 1740 nt, Artificial Sequence
  mRNA product Design a-2 (A100) comprising derived and/or modified sequence from LASV(ISTH2010-NIG-2012;Clade II)__AIT17482__GPCmut8 (opt1)
aggagaguccgcucagccagguugcagaagcggcuuagcguguguccuaaucuucucucugcguguagguaggccugugccgcaaacaagcuuaccaugggccagaucaucaccuucuuccaggaggugccccacgucaucgaggaggugaugaacaucgugcugaucgcccucagccugcuggccauccucaaggggaucuacaacgucgcgaccugcggccuguucgggcugguguccuuccuccugcugugcggccgcagcugcuccacgaccuacaaggggguguacgagcuccagacccuggagcuggacauggccagccucaacaugugcaugccgcuguccugcacgaagaacaacagccaccacuacaucauggucggcaacgagaccggccuggagcucacccugaccaacacguccaucaucaaccacaaguucugcaaccugagcgacgcccacaagaagaaccucuacgaccacgcccugauguccaucaucagcaccuuccaccuguccauccccaacuucaaccaguacgaggccaugagcugcgacuucaacgggggcaagaucuccgugcaguacaaccucagccacgcguacgccguggacgccgccaaccacugcgggaccaucgcgaacggcguccugcagaccuucaugcggauggccuggggcggguccuacaucgcccuggacagcggcaagggguccugggacugcaucaugacgagcuaccaguaccucaucauccagaacaucaccugggaggaccacugccaguucucccgccccagccccaucggcuaccuggggcugcucagccagcggacccgcgacaucuacaucucccggcgccugcugggcaccuucacguggacccucagcgacuccgagggcaacgagacccccgggggcuacugccugacccgguggaugcugaucgaggccgagcucaagugcuucgggaacacggccguggcgaagugcaacgagaagcacgacgaggaguucugcgacaugcugcgccuguucgacuucugcaagcaggccauccggcgccucaagacccccgcccagaugagcauccagcugaucaacaaggccgugaacgcccugaucaacgaccagcucaucaugaagaaccaccuccgggacaucaugggcauccccuacugcaacuacuccaaguacugcuaccugaaccacaccgucaccgggaagacgagccugccccgcugcugccugguguccaacggcagcuaccugaacgagacccacuucuccgacgacaucgagcagcaggcggacaacaugaucaccgagcuccugcagaaggaguacaucgaccggcagggcaagaccccgcuggggcucguggaccuguucgucuucagcacguccuucuaccugaucagcaucuuccugcaccucgugaagaucccgacccaccgccacguggucggcaagcccugccccaagccccaccggcugaaccacauggggaucugcuccugcggccuguacaagcacccgggggugcccgugaaguggaagcgcugaggacuagucccuguucccagagcccacuuuuuuuucuuuuuuugaaauaaaauagccugucuuucagaucuaaaaaaaaaaaaaaaaaaaaaaaaaaaaaaaaaaaaaaaaaaaaaaaaaaaaaaaaaaaaaaaaaaaaaaaaaaaaaaaaaaaaaaaaaaaaaaaaaaaa

SEQ ID NO: 33935 - RNA, 1740 nt, Artificial Sequence
  mRNA product Design a-2 (A100) comprising derived and/or modified sequence from LASV(Lassa virus/H.sapiens-wt/NGA/2015/ISTH_0543;Clade II)__AVO03639__GPCmut8 (opt1)
aggagaguccgcucagccagguugcagaagcggcuuagcguguguccuaaucuucucucugcguguagguaggccugugccgcaaacaagcuuaccaugggccagaucaucaccuucuuccaggaggugccccacgucaucgaggaggugaugaacaucgugcugaucgcccucagccugcuggccauccucaaggggaucuacaacgucgcgaccugcggccuguucgggcugguguccuuccuccugcugugcggccgcagcugcuccacgaccuacaaggggguguacgagcuccagacccuggagcuggacauggccaaccucaacaugugcaugccgcugagcugcacgaagaacaacucccaccacuacaucauggucggcaacgagaccggccuggagcucacccugaccaacacgagcaucaucaaccacaaguucugcaaccuguccgacgcccacaagaagaaccucuacgaccacgcccugaugagcaucaucuccaccuuccaccugagcauccccaacuucaaccaguacgaggccauguccugcgacuucaacgggggcaagaucagcgugcaguacaaccucucccacaccuacgcgguggacgccgccaaccacugcgggaccaucgccaacggcguccugcagacguucaugcggauggcguggggcgggagcuacaucgcccuggacuccggcaaggggagcugggacugcaucaugaccuccuaccaguaccucgugauccagaacaccaccugggaggaccacugccaguucagccgccccucccccaucggcuaccuggggcugcucagccagcggacgcgcgacaucuacaucagccggcgccugcugggcaccuucaccuggacccucuccgacagcgagggcaacgagacgcccgggggcuacugccugacccgguggaugcugaucgaggccgagcucaagugcuucgggaacaccgccguggccaagugcaacgagaagcacgacgaggaguucugcgacaugcugcgccuguucgacuucugcaagcaggcgauccggcgccucaagacccccgcccagauguccauccagcugaucaacaaggccgucaacgcccugaucaacgaccagcucaucaugaagaaccaccuccgggacaucaugggcauccccuacugcaacuacagcaaguacugcuaccugaaccacacggugaccgggaagaccucccugccccgcugcugccuggugagcaacggcuccuaccugaacgagacccacuucagcgacgacaucgagcagcaggccgacaacaugaucacggagcuccugcagaaggaguacaucgaccggcagggcaagaccccgcuggggcucgucgaccuguucguguucuccaccagcuucuaccugaucuccaucuuccugcaccucgugaagaucccgacccaccgccacaucacgggcaagcccugccccaagccccaccggcugaaccacauggggaucugcagcugcggccuguacaagcacccggggguccccgugaaguggaagcgcugaggacuagucccuguucccagagcccacuuuuuuuucuuuuuuugaaauaaaauagccugucuuucagaucuaaaaaaaaaaaaaaaaaaaaaaaaaaaaaaaaaaaaaaaaaaaaaaaaaaaaaaaaaaaaaaaaaaaaaaaaaaaaaaaaaaaaaaaaaaaaaaaaaaaa

SEQ ID NO: 33936 - RNA, 1740 nt, Artificial Sequence
  mRNA product Design a-2 (A100) comprising derived and/or modified sequence from LASV(Lassa virus/H.sapiens-wt/NGA/2016/ISTH_0009;Clade II)__AVO03571__GPCmut8 (opt1)
aggagaguccgcucagccagguugcagaagcggcuuagcguguguccuaaucuucucucugcguguagguaggccugugccgcaaacaagcuuaccaugggccagaucaucaccuucuuccaggaggugccccacgucaucgaggaggugaugaacaucgugcugaucgcccucagccugcuggccauccucaaggggaucuacaacgucgcgaccugcggccugcuggggcucguguccuuccugcugcucugcggccgcagcugcuccacgaccuacaaggggguguacgagcugcagacccuggagcucgacauggccagccugaacaugugcaugccgcuguccugcacgaagaacaacagccaccacuacaucauggucggcaacgagaccggccucgagcugacccugaccaacacguccaucaucaaccacaaguucugcaaccucagcgacgcccacaagaagaaccuguacgaccacgcccugauguccaucaucagcaccuuccaccucuccauccccaacuucaaccaguacgaggccaugagcugcgacuucaacgggggccggaucuccgugcaguacaaccugagccacuccuacgcgguggacgccgccaaccacugcgggaccaucgccaacggcguccugcagaccuucaugcgcauggcguggggcgggagcuacaucgcccucgacuccggcaaggggagcugggacugcaucaugacguccuaccaguaccugaucauccagaacaccaccugggaggaccacugccaguucagccggcccagccccaucggcuaccuggggcuccugucccagcgcacccgggacaucuacaucagccgccggcugcucggcacguucaccuggacccuguccgacagcgagggcaacgagacccccgggggcuacugccugacgcgcuggaugcucaucgaggccgagcugaagugcuucgggaacaccgccguggccaagugcaacgagaagcacgacgaggaguucugcgacaugcugcggcuguucgacuucugcaagcaggcgauccgccggcugaagacccccgcccagauguccauccagcugaucaacaaggccgugaacgcccucaucaacgaccagcugaucaugaagaaccaccuccgcgacaucaugggcaucccguacugcaacuacagcaaguacugcuaccucaaccacaccgucacggggaagaccucccugccccggugcugccuggugagcaacggcuccuaccucaacgagacccacuucagcgacgacaucgagcagcaggccgacaacaugaucaccgagcugcugcagaaggaguacaucgaccgccagggcaagacgccccucgggcugguggaccuguucgucuucuccaccagcuucuaccugaucuccaucuuccuccaccuggugaagaucccgacccaccggcacaucaccggcaagcccugccccaagccccaccgccugaaccacauggggaucugcagcugcggccucuacaaccacccgggggugcccgucaaguggaagcggugaggacuagucccuguucccagagcccacuuuuuuuucuuuuuuugaaauaaaauagccugucuuucagaucuaaaaaaaaaaaaaaaaaaaaaaaaaaaaaaaaaaaaaaaaaaaaaaaaaaaaaaaaaaaaaaaaaaaaaaaaaaaaaaaaaaaaaaaaaaaaaaaaaaaa

SEQ ID NO: 33937 - RNA, 1740 nt, Artificial Sequence
  mRNA product Design a-2 (A100) comprising derived and/or modified sequence from LASV(Lassa virus/H.sapiens-wt/NGA/2016/ISTH_0017;Clade II)__AVO03567__GPCmut8 (opt1)
aggagaguccgcucagccagguugcagaagcggcuuagcguguguccuaaucuucucucugcguguagguaggccugugccgcaaacaagcuuaccaugggccagaucaucaccuucuuccaggaggugccccacgucaucgaggaggugaugaacaucgugcugaucgcccucagccugcuggccauccucaaggggaucuacaacgucgcgaccugcggccuguucgggcugguguccuuccuccugcugugcggccgcagcugcuccacgaccuacaaggggguguacgagcuccagacccuggagcuggacauggccagccucaacaugugcaugccgcuguccugcacgaagaacaacagccaccacuacaucauggucggcaacgagaccggccuggagcucacccugaccaacacguccaucaucaaccacaaguucugcaaccugagcgacgcccacaagaagaaccucuacgaccacgcccugauguccaucaucagcaccuuccaccuguccauccccaacuucaaccaguacgaggccaugagcugcgacuucaacgggggcaagaucuccgugcaguacaaccucagccacaccuacgcgaucgacgccgccaaccacugcgggaccaucgccaacggcgugcugcagacguucaugcggauggcguggggcggguccuacaucgcccuggacagcggcaagggguccugggacugcaucaugaccagcuaccaguaccucaucauccagaacaccaccugggaggaccacugccaguucucccgccccagccccaucggcuaccuggggcugcucagccagcggacgcgcgacaucuacaucucccggcgccugcugggcaccuucaccuggacccucagcgacuccgagggcaacgagacgcccgggggcuacugccugacccgguggaugcugaucgaggccgagcucaagugcuucgggaacaccgccgucgccaagugcaacgagaagcacgacgaggaguucugcgacaugcugcgccuguucgacuucugcaagcaggcgauccggcgccucaagacccccgcccagaugagcauccagcugaucaacaaggccgugaacgcccugaucaacgaccagcucaucaugaagaaccaccuccgggacaucaugggcauccccuacugcaacuacuccaaguacugcuaccugaaccacacggugaccgggaagaccagccugccccgcugcugccuggucuccaacggcagcuaccugaacgagacccacuucuccgacgacaucgagcagcaggccgacaacaugaucacggagcuccugcagaaggaguacauggaccggcagggcaagaccccgcuggggcucguggaccuguucguguucagcaccuccuucuaccugaucagcaucuuccugcaccucguccgcaucccgacccaccggcacgugaucggcaagcccugccccaagccccaccgccugaaccacauggggaucugcuccugcggccuguacaagcacccgggggugcccgucaaguggaagcggugaggacuagucccuguucccagagcccacuuuuuuuucuuuuuuugaaauaaaauagccugucuuucagaucuaaaaaaaaaaaaaaaaaaaaaaaaaaaaaaaaaaaaaaaaaaaaaaaaaaaaaaaaaaaaaaaaaaaaaaaaaaaaaaaaaaaaaaaaaaaaaaaaaaaa

SEQ ID NO: 33938 - RNA, 1740 nt, Artificial Sequence
  mRNA product Design a-2 (A100) comprising derived and/or modified sequence from LASV(Lassa virus/H.sapiens-wt/NGA/2018/ISTH_0959;Clade II)__AVV65099__GPCmut8 (opt1)
aggagaguccgcucagccagguugcagaagcggcuuagcguguguccuaaucuucucucugcguguagguaggccugugccgcaaacaagcuuaccaugggccagaucaucaccuucuuccaggaggugccccacgucaucgaggaggugaugaacaucgugcugaucgcccucagccugcuggccauccucaaggggaucuacaacgucgugaccugcggccuguucgggcugguguccuuccuccugcugugcggccgcagcugcuccacgaccuacaagggggucuacgagcuccagacccuggagcuggacauggcgagccucaacaugugcaugccgcuguccugcacgaagaacaacagccaccacuacaucauggugggcaacgagaccggccuggagcucacccugaccaacacguccaucaucaaccacaaguucugcaaccugagcgacgcccacaagaagaaccucuacgaccacgcccugauguccaucaucagcaccuuccaccuguccauccccaacuucaaccaguacgaggccaugagcugcgacuucaacgggggcaagaucuccgugcaguacaaccucagccacgccuacgcgaucgacgccgccaaccacugcgggaccaucgccaacggcguccugcagaccuucaugcggauggcguggggcggguccuacaucgcccuggacagcggcaagggguccugggacugcaucaugacgagcuaccaguaccucaucauccagaacaccaccugggaggaccacugccaguucucccgccccagccccaucggcuaccuggggcugcucagccagcggacccgcgacaucuacaucucccggcgccugcugggcacguucaccuggacccucagcgacuccgagggcaacgagacccccgggggcuacugccugacgcgguggaugcugaucgaggccgagcucaagugcuucgggaacaccgccguggccaagugcaacgagaagcacgacgaggaguucugcgacaugcugcgccuguucgacuucugcaagcaggcgauccggcgccucaagacccccgcccagaugagcauccagcugaucaacaaggccgugaacgcccugaucaacgaccagcucaucaugaagaaccaccuccgggacaucaugggcaucccguacugcaacuacuccaaguacugcuaccugaaccacaccgucacggggaagaccagccugccccgcugcugccugguguccaacggcagcuaccugaacgagacccacuucuccgacgacaucgagcagcaggccgacaacaugaucaccgagcuccugcagaaggaguacaucgaccggcagggcaagacgccccuggggcucguggaccuguucgucuucagcaccuccuucuaccugaucagcaucuuccugcaccucgugaagaucccgacccaccgccacgugaucggcaagcccugccccaagccccaccggcugaaccacauggggaucugcuccugcggccuguacaagcacccggggguccccgugaaguggaagcgcugaggacuagucccuguucccagagcccacuuuuuuuucuuuuuuugaaauaaaauagccugucuuucagaucuaaaaaaaaaaaaaaaaaaaaaaaaaaaaaaaaaaaaaaaaaaaaaaaaaaaaaaaaaaaaaaaaaaaaaaaaaaaaaaaaaaaaaaaaaaaaaaaaaaaa

SEQ ID NO: 33939 - RNA, 1740 nt, Artificial Sequence
  mRNA product Design a-2 (A100) comprising derived and/or modified sequence from LASV(LASV003-NIG-2008;Clade II)__AIT17580__GPCmut8 (opt1)
aggagaguccgcucagccagguugcagaagcggcuuagcguguguccuaaucuucucucugcguguagguaggccugugccgcaaacaagcuuaccaugggccagaucaucaccuucuuccaggaggugccccacgucaucgaggaggugaugaacaucgugcugaucgcccucagccugcuggccauccucaaggggaucuacaacgucgcgaccugcggccuguucgggcugguguccuuccuccugcugugcggccgcagcugcuccacgaccuacaaggggguguacgagcuccagacccuggagcuggacauggccagccucaacaugugcaugccgcuguccugcacgaagaacaacagccaccacuacaucauggucggcaacgagaccggccuggagcucacccugaccaacacguccaucaucaaccacaaguucugcaaccugagcgacgcccacaagaagaaccucuacgaccacgcccugauguccaucaucagcaccuuccaccuguccauccccaacuucaaccaguacgaggccaugagcugcgacuucaacgggggcaagaucuccgugcaguacaaccucagccacaccuacgcgguggacgccgccaaccacugcgggaccaucgccaacggcguccugcagacguucaugcggauggcguggggcggguccuacaucgcccuggacagcggcaagggguccugggacugcaucaugaccagcuaccaguaccucaucauccagaacaccaccugggaggaccacugccaguucucccgccccagccccaucggcuaccuggggcugcucagccagcggacgcgcgacaucuacaucucccggcgccugcugggcaccuucaccuggacccucagcgacuccgagagcaacgagacgccgggcggguacugccugacccgguggaugcugaucgaggccgagcucaagugcuucggcaacaccgccguggccaagugcaacgagaagcacgacgaggaguucugcgacaugcugcgccuguucgacuucugcaagcaggcgauccggcgccucaaggcccccgcccagauguccauccagcugaucaacaaggccgugaacgcccugaucaacgaccagcucaucaugaagaaccaccuccgggacaucauggggauccccuacugcaacuacagcaaguacugcuaccugaaccacaccgucacgggccgcaccucccugccccggugcugccuggugagcaacggguccuaccugaacgagacccacuucagcgacgacaucgagcagcaggcggacaacaugaucaccgagcuccugcagaaggaguacauggaccgccagggcaagacgccccugggccucguggaccuguucgucuucuccaccagcuucuaccugaucuccaucuuccugcaccucgugaagaucccgacccaccggcacgugaucgggaagcccugccccaagccccaccgccugaaccacaugggcaucugcagcugcgggcuguacaagcacccgggcguccccgugaaguggaagcggugaggacuagucccuguucccagagcccacuuuuuuuucuuuuuuugaaauaaaauagccugucuuucagaucuaaaaaaaaaaaaaaaaaaaaaaaaaaaaaaaaaaaaaaaaaaaaaaaaaaaaaaaaaaaaaaaaaaaaaaaaaaaaaaaaaaaaaaaaaaaaaaaaaaaa

SEQ ID NO: 33940 - RNA, 1740 nt, Artificial Sequence
  mRNA product Design a-2 (A100) comprising derived and/or modified sequence from LASV(LASV035-NIG-2009;Clade II)__AIT17588__GPCmut8 (opt1)
aggagaguccgcucagccagguugcagaagcggcuuagcguguguccuaaucuucucucugcguguagguaggccugugccgcaaacaagcuuaccaugggccagaucaucaccuucuuccaggaggugccccacgucaucgaggaggugaugaacaucgugcugaucgcccucagccugcuggccauccucaaggggaucuacaacgucgcgaccugcggccuguucgggcugguguccuuccuccugcugugcggccgcagcugcuccacgaccuacaaggggguguacgagcuccagacccuggagcuggacauggccagccucaacaugugcaugccgcuguccugcacgaagaacaacagccaccacuacaucauggucggcaacgagaccggccuggagcucacccugaccaacacguccaucaucaaccacaaguucugcaaccugagcgacgcccacaagaagaaccucuacgaccacgcccugauguccaucaucagcaccuuccaccuguccauccccaacuucaaccaguacgaggccaugagcugcgacuucaacgggggcaagaucuccgugcaguacaaccucagccacgcguacgccguggacgccgccaaccacugcgggaccaucgcgaacggcguccugcagaccuucaugcggauggccuggggcggguccuacaucgcccuggacagcggcaagggguccugggacugcaucaugacgagcuaccaguaccucaucauccagaacaccaccugggaggaccacugccaguucucccgccccagccccaucggcuaccuggggcugcucagccagcggacccgcgacaucuacaucucccggcgccugcugggcacguucaccuggacccucagcgacuccgagggcaacgagacccccgggggcuacugccugacgcgguggaugcugaucgaggccgagcucaagugcuucgggaacaccgccguggcgaagugcaacgagaagcacgacgaggaguucugcgacaugcugcgccuguucgacuucugcaagcaggccauccggcgccucaaggcccccgcccagaugagcauccagcugaucaacaaggccgugaacgcgcugaucaacgaccagcucaucaugaagaaccaccuccgggacaucaugggcauccccuacugcaacuacuccaaguacugcuaccugaaccacaccgucaccgggaagacgagccugccccgcugcugccugguguccaacggcagcuaccugaacgagacccacuucuccgacgacaucgagcagcaggccgacaacaugaucaccgagcuccugcagaaggaguacaucgaccggcagggcaagaccccgcuggggcucguggaccuguucgucuucagcacguccuucuaccugaucagcaucuuccugcaccucgugaagaucccgacccaccgccacgugaucggcaagcccugccccaagccccaccggcugaaccacauggggaucugcuccugcggccuguacaagcacccggggguccccgugaaguggaagcgcugaggacuagucccuguucccagagcccacuuuuuuuucuuuuuuugaaauaaaauagccugucuuucagaucuaaaaaaaaaaaaaaaaaaaaaaaaaaaaaaaaaaaaaaaaaaaaaaaaaaaaaaaaaaaaaaaaaaaaaaaaaaaaaaaaaaaaaaaaaaaaaaaaaaaa

SEQ ID NO: 33941 - RNA, 1740 nt, Artificial Sequence
  mRNA product Design a-2 (A100) comprising derived and/or modified sequence from LASV(LASV1000-NIG-2009;Clade II)__AIT17782__GPCmut8 (opt1)
aggagaguccgcucagccagguugcagaagcggcuuagcguguguccuaaucuucucucugcguguagguaggccugugccgcaaacaagcuuaccaugggccagaucaucaccuucuuccaggaggugccccacgucaucgaggaggugaugaacaucgugcugaucgcccucagccugcuggccauccucaaggggaucuacaacgucgcgaccugcggccuguucgggcugguguccuuccuccugcugugcggccgcagcugcuccacgaccuacaaggggguguacgagcuccagacccuggagcuggacauggccagccucaacaugugcaugccgcuguccugcacgaagaacaacagccaccacuacaucauggucggcaacgagaccggccuggagcucacccugaccaacacguccaucaucaaccacaaguucugcaaccugagcgacgcccacaagaagaaccucuacgaccacgcccugauguccaucaucagcaccuuccaccuguccauccccaacuucaaccaguacgaggccaugagcugcgacuucaacgggggcaagaucuccgugcaguacaaccucagccacaccuacgcgguggacgccgccaaccacugcgggaccaucgccaacggcguccugcagacguucaugcggauggcguggggcggguccuacaucgcccuggacagcggcaagggguccugggacugcaucaugaccagcuaccaguaccucaucauccagaacaccaccugggaggaccacugccaguucucccgccccagccccaucggcuaccuggggcugcucagccagcggacgcgcgacaucuacaucucccggcgccugcugggcaccuucaccuggacccucagcgacuccgagggcaacgagacgcccgggggcuacugccugacccgguggaugcugaucgaggccgagcucaagugcuucgggaacaccgccguggccaagugcaacgagaagcacgacgaggaguucugcgacaugcugcgccuguucgacuucugcaagcaggcgaucaagcggcucaagacccccgcccagaugagcauccagcugaucaacaaggccgugaacgcccugaucaacgaccagcucaucaugaagaaccaccuccgcgacaucaugggcauccccuacugcaacuacuccaaguacugcuaccugaaccacacggucaccgggaagaccagccugccccggugcugccugguguccaacggcagcuaccugaacgagacccacuucuccgacgacaucgagcagcaggccgacaacaugaucacggagcuccugcagaaggaguacaucgaccgccagggcaagaccccgcuggggcucguggaccuguucgucuucagcaccuccuucuaccugaucagcaucuuccugcaccucgugaagaucccgacccaccggcacguggucggcaagcccugccccaagccccaccgccugaaccacauggggaucugcuccugcggccuguacaagcacccgggggugcccgugaaguggaagcggugaggacuagucccuguucccagagcccacuuuuuuuucuuuuuuugaaauaaaauagccugucuuucagaucuaaaaaaaaaaaaaaaaaaaaaaaaaaaaaaaaaaaaaaaaaaaaaaaaaaaaaaaaaaaaaaaaaaaaaaaaaaaaaaaaaaaaaaaaaaaaaaaaaaaa

SEQ ID NO: 33942 - RNA, 1740 nt, Artificial Sequence
  mRNA product Design a-2 (A100) comprising derived and/or modified sequence from LASV(LASV221-NIG-2010;Clade II)__AIT17624__GPCmut8 (opt1)
aggagaguccgcucagccagguugcagaagcggcuuagcguguguccuaaucuucucucugcguguagguaggccugugccgcaaacaagcuuaccaugggccagaucaucaccuucuuccaggaggugccccacgucaucgaggaggugaugaacaucgugcugaucgcccucagccugcuggccauccucaaggggaucuacaacgucgcgaccugcggccuguucgggcugguguccuuccuccugcugugcggccgcagcugcuccacgaccuacaaggggguguacgagcuccagacccuggagcuggacauggccagccucaacaugugcaugccgcuguccugcacgaagaacaacagccaccacuacaucauggucggcaacgagaccggccuggagcucacccugaccaacacguccaucaucaaccacaaguucugcaaccugagcgacgcccacaagaagaaccucuacgaccacgcccugauguccaucaucagcaccuuccaccuguccauccccaacuucaaccaguacgaggccaugagcugcgacuucaacgggggcaagaucuccgugcaguacaaccucagccacaccuacgcgaucgacgccgccaaccacugcgggaccaucgccaacggcgugcugcagacguucaugcggauggcguggggcggguccuacaucgcccuggacagcggcaagggguccugggacugcaucaugaccagcuaccaguaccucaucauccagaacaccaccugggaggaccacugccaguucucccgccccagccccaucggcuaccuggggcugcucagccagcggacgcgcgacaucuacaucucccggcgccugcugggcaccuucaccuggacccucagcgacuccgagggcaacgagacgcccgggggcuacugccugacccgguggaugcugaucgaggccgagcucaagugcuucgggaacaccgccgucgccaagugcaacgagaagcacgacgaggaguucugcgacaugcugcgccuguucgacuucugcaagcaggcgauccggcgccucaagacccccgcccagaugagcauccagcugaucaacaaggccgugaacgcccugaucaacgaccagcucaucaugaagaaccaccuccgggacaucaugggcauccccuacugcaacuacuccaaguacugcuaccugaaccacacggugaccgggaagaccagccugccccgcugcugccuggucuccaacggcagcuaccugaacgagacccacuucuccgacgacaucgagcagcaggccgacaacaugaucacggagaugcuccagaaggaguacauggaccggcagggcaagaccccgcuggggcugguggaccucuucguguucagcaccuccuucuaccugaucagcaucuuccugcaccuggucaagaucccgacccaccgccacgugaucggcaagcccugccccaagccccaccggcucaaccacauggggaucugcuccugcggccuguacaagcacccgggggugcccgucaaguggaagcgcugaggacuagucccuguucccagagcccacuuuuuuuucuuuuuuugaaauaaaauagccugucuuucagaucuaaaaaaaaaaaaaaaaaaaaaaaaaaaaaaaaaaaaaaaaaaaaaaaaaaaaaaaaaaaaaaaaaaaaaaaaaaaaaaaaaaaaaaaaaaaaaaaaaaaa

SEQ ID NO: 33943 - RNA, 1740 nt, Artificial Sequence
  mRNA product Design a-2 (A100) comprising derived and/or modified sequence from LASV(LASV237-NIG-2010;Clade II)__AIT17638__GPCmut8 (opt1)
aggagaguccgcucagccagguugcagaagcggcuuagcguguguccuaaucuucucucugcguguagguaggccugugccgcaaacaagcuuaccaugggccagaucaucaccuucuuccaggaggugccccacgucaucgaggaggugaugaacaucgugcugaucgcccucagccugcuggccauccucaaggggaucuacaacgucgcgaccugcggccuguucgggcugguguccuuccuccugcugugcggccgcagcugcuccacgaccuacaaggggguguacgagcuccagacccuggagcuggacauggccagccucaacaugugcaugccgcuguccugcacgaagaacaacagccaccacuacaucauggucggcaacgagaccggccuggagcucacccugaccaacacguccaucaucaaccacaaguucugcaaccugagcgacgcccacaagaaggaccucuacgaccacgcccugauguccaucaucagcaccuuccaccuguccauccccaacuucaaccaguacgaggccaugagcugcgacuucaacgggggcaagaucuccgugcaguacaaccucagccacaccuacgcgguggacgccgccaaccacugcgggaccaucgccaacggcguccugcagacguucaugcggauggcguggggcggguccuacaucgcccuggacagcggcaagggguccugggacugcaucaugaccagcuaccaguaccucaucauccagaacaccaccugggaggaccacugccaguucucccgccccagccccaucggcuaccuggggcugcucagccagcggacgcgcgacaucuacaucucccggcgccugcugggcaccuucaccuggacccucagcgacuccgagggcaacgagacgcccgggggcuacugccugacccgguggaugcugaucgaggccgagcucaagugcuucgggaacaccgccguggccaagugcaacgagaagcacgacgaggaguucugcgacaugcugcgccuguucgacuucugcaagcaggcgauccggcgccucaagacccccgcccagaugagcauccagcugaucaacaaggccgugaacgcccugaucaacgaccagcucaucaugaagaaccaccuccgggacaucaugggcauccccuacugcaacuacuccaaguacugcuaccugaaccacacggucaccgggaagaccagccugccccgcugcugccugguguccaacggcagcuaccugaacgagacccacuucuccgacgacaucgagcagcaggccgacaacaugaucacggagcuccugcagaaggaguacauggaccggcagggcaagaccccgcuggggcucguggaccuguucgucuucagcaccuccuucuaccugaucagcaucuuccugcaccucaucaagaucccgacccaccgccacaucacgggcaagcccugccccaagccccaccggcugaaccacauggggaucugcuccugcggccuguacaagcacccgggggugcccgugaaguggaagcgcugaggacuagucccuguucccagagcccacuuuuuuuucuuuuuuugaaauaaaauagccugucuuucagaucuaaaaaaaaaaaaaaaaaaaaaaaaaaaaaaaaaaaaaaaaaaaaaaaaaaaaaaaaaaaaaaaaaaaaaaaaaaaaaaaaaaaaaaaaaaaaaaaaaaaa

SEQ ID NO: 33944 - RNA, 1740 nt, Artificial Sequence
  mRNA product Design a-2 (A100) comprising derived and/or modified sequence from LASV(LASV253-NIG-2011;Clade II)__AIT17670__GPCmut8 (opt1)
aggagaguccgcucagccagguugcagaagcggcuuagcguguguccuaaucuucucucugcguguagguaggccugugccgcaaacaagcuuaccaugggccagaucaucaccuucuuccaggaggugccccacgucaucgaggaggugaugaacaucgugcugaucgcccucagccugcuggccauccucaaggggaucuacaacgucgcgaccugcggccuguucgggcugguguccuuccuccugcugugcggccgcagcugcuccacgaccuacaaggggguguacgagcuccagacccuggagcuggacauggccagccucaacaugugcaugccgcuguccugcacgaagaacaacagccaccacuacaucauggucggcaacgagaccggccuggagcucacccugaccaacacguccaucaucaaccacaaguucugcaaccugagcgacgcccacaagaagaaccucuacgaccacgcccugauguccaucaucagcaccuuccaccuguccauccccaacuucaaccaguacgaggccaugagcugcgacuucaacgggggcaagaucuccgugcaguacaaccucagccacaccuacgcgguggacgccgccaaccacugcgggaccaucgccaacggcguccugcagacguucaugcggauggcguggggcggguccuacaucgcccuggacagcggcaagggguccugggacugcaucaugaccagcuaccaguaccucaucauccagaacaccaccugggaggaccacugccaguucucccgccccagccccaucggcuaccuggggcugcucagccagcggacgcgcgacaucuacaucucccggcgccugcugggcaccuucaccuggacccucagcgacuccgagggcaacgagacgcccgggggcuacugccugacccgguggaugcugaucgaggccgagcucaagugcuucgggaacaccgccguggccaagugcaacgagaagcacgacgaggaguucugcgacaugcugcgccuguucgacuucugcaagcaggcgauccggcgccucaaggcccccgcccagaugagcauccagcugaucaacaaggccgugaacgcccugaucaacgaccagcucaucaugaagaaccaccuccgggacaucaugggcaucccguacugcaacuacuccaaguacugcuaccugaaccacaccgucacggggcgcaccagccugccccggugcugccugguguccaacggcagcuaccugaacgagacccacuucuccgacgacaucgagcagcaggcggacaacaugaucaccgagcuccugcagaaggaguacaucgaccgccagggcaagacgccccuggggcucguggaccuguucgucuucagcaccuccuucuaccugaucagcaucuuccugcaccucgugaagaucccgacccaccggcacaucaucggcaagcccugccccaagccccaccgccugaaccacauggggaucugcuccugcggccuguacaagcacccgggggugcccgucaaguggaagcggugaggacuagucccuguucccagagcccacuuuuuuuucuuuuuuugaaauaaaauagccugucuuucagaucuaaaaaaaaaaaaaaaaaaaaaaaaaaaaaaaaaaaaaaaaaaaaaaaaaaaaaaaaaaaaaaaaaaaaaaaaaaaaaaaaaaaaaaaaaaaaaaaaaaaa

SEQ ID NO: 33945 - RNA, 1740 nt, Artificial Sequence
  mRNA product Design a-2 (A100) comprising derived and/or modified sequence from LASV(LASV254-NIG-2011;Clade II)__AIT17674__GPCmut8 (opt1)
aggagaguccgcucagccagguugcagaagcggcuuagcguguguccuaaucuucucucugcguguagguaggccugugccgcaaacaagcuuaccaugggccagaucaucaccuucuuccaggaggugccccacgucaucgaggaggugaugaacaucgugcugaucgcccucagccugcuggccauccucaaggggaucuacaacgucgcgaccugcggccuguucgggcugguguccuuccuccugcugugcggccgcagcugcuccacgaccuacaaggggguguacgagcuccagacccuggagcuggacaugaccaaccucaacaugugcaugccgcugagcugcaccaagaacaacucccaccacuacaucauggucggcaacgagaccggccuggagcucacccugacgaacaccagcaucaucaaccacaaguucugcaaccuguccgacgcccacaagaagaaccucuacaaccacgcccugaugagcaucaucuccaccuuccaccugagcauccccaacuucaaccaguacgaggccauguccugcgacuucaacgggggcaagaucagcgugcaguacaaccucucccacagcuacgccguggacgcggccaaccacugcgggaccaucgccaacggcguccugcagacguucaugcggauggccuggggcggguccuacaucgcgcuggacagcggcaaggggaacugggacugcaucaugaccuccuaccaguaccucaucauccagaacaccaccugggaggaccacugccaguucagccgccccucccccaucggcuaccuggggcugcucagccagcggacgcgcgacaucuacaucagccggcgccugcugggcaccuucaccuggacccucuccgacagcgagggcaacgagacgcccgggggcuacugccugacccgguggaugcugaucgaggccgagcucaagugcuucgggaacaccgccguggccaagugcaacgagaagcacgacgaggaguucugcgacaugcugcgccuguucgacuucugcaagcaggccauccggcgccucaagacccccgcgcaggccaacauccagcugaucaacaaggccgugaacgcccugaucaacgaccagcucaucaugaagaaccaccuccgggacaucaugggcauccccuacugcaacuacuccaaguacugcuaccugaaccacacggucaccgggaagaccagccugccccgcugcugccugguguccaacggcagcuaccugaacgagacccacuucuccgacgacaucgagcagcaggccgacaacaugaucacggagcuccugcagaaggaguacauggaccggcagggcaagaccccgcuggggcucguggaccuguucgucuucagcaccuccuucuaccugaucagcaucuuccugcaccucgugaagaucccgacccaccgccacgugaucggcaagcccugccccaagccccaccggcugaaccacauggggaucugcuccugcggccuguacaagcacccggggguccccgugaaguggaagcgcugaggacuagucccuguucccagagcccacuuuuuuuucuuuuuuugaaauaaaauagccugucuuucagaucuaaaaaaaaaaaaaaaaaaaaaaaaaaaaaaaaaaaaaaaaaaaaaaaaaaaaaaaaaaaaaaaaaaaaaaaaaaaaaaaaaaaaaaaaaaaaaaaaaaaa

SEQ ID NO: 33946 - RNA, 1740 nt, Artificial Sequence
  mRNA product Design a-2 (A100) comprising derived and/or modified sequence from LASV(Nig08-A19;Clade III)__ADU56618__GPCmut8 (opt1)
aggagaguccgcucagccagguugcagaagcggcuuagcguguguccuaaucuucucucugcguguagguaggccugugccgcaaacaagcuuaccaugggccagaucgugaccuucuuccaggaggucccccacgugaucgaggaggugaugaacaucguccugaucgcccucagcauccuggccauccugaaggggcucuacaacaucgcgaccugcggccugaucgggcuggugacguuccuccugcuguccggccgcagcugcuccaugaccuacaaggggguguacgagcuccagacccuggagcugaacaugaacacccucaacaugugcaugccgcugagcugcaccaagaacaacucccaccacuacaucauggucggcaacgagaccggccuggagcucacccugacgaacaccagccugcuccaccacaaguucugcaaccuguccgacgcccacaagaagaaccuguacgaccacacccucaugagcaucaucuccaccuuccaccugagcauccccaacuucaaccaguacgaggccauguccugcgacuucaacgggggcaagaucacggugcaguacaaccugagccacuccuacgccaucgacgccgcgaaccacugcgggaccguggccaacggcguccuccagaccuucaugcggauggccuggggcgggagcuacaucgcccuggacuccggccgcgggaagugggacugcaucaugaccagcuaccaguaccugaucauccagaacacgaccugggaggaccacugccaguucucccggcccagccccaucggcuaccucgggcugcugucccagcgcacccgggacaucuacaucagccgccggcuccugggcaccuucacguggacccugagcgacuccgagggcaacgagacccccgggggcuacugccucacccgcuggaugcugaucgaggcggagcugaagugcuucgggaacacggccguggccaagugcaacgagaagcacgacgaggaguucugcgacaugcuccggcuguucgacuucugcaagcaggccauccgccggcugaaggcccccgcgcagaugagcauccagcucaucaacaaggccgugaacgcccugaucaacgaccagcugaucaugaagaaccaccuccgcgacaucaugggcauccccuacugcaacuacuccaaguacugcuaccugaaccacaccagcaccgggcggaccucccugccccgcugcugccucgucagcaacggcuccuaccugaacgagacgcacuucagcgacgacaucgagcagcaggccgacaacaugaucaccgagaugcugcagaaggaguaccucgaccggcagggcaagaccccgcuggggcugguggaccuguucguguucuccaccagcuucuaccucaucuccaucuuccugcaccuggucaagaucccgacgcaccgccacaucgugggcaagcccugccccaagccccaccggcucaaccacauggggaucugcagcugcggccuguacaagcagccgggggugcccguccgcuggaagcggugaggacuagucccuguucccagagcccacuuuuuuuucuuuuuuugaaauaaaauagccugucuuucagaucuaaaaaaaaaaaaaaaaaaaaaaaaaaaaaaaaaaaaaaaaaaaaaaaaaaaaaaaaaaaaaaaaaaaaaaaaaaaaaaaaaaaaaaaaaaaaaaaaaaaa

SEQ ID NO: 33947 - RNA, 1743 nt, Artificial Sequence
  mRNA product Design a-2 (A100) comprising derived and/or modified sequence from LASV(G1180-SLE-2010;Clade IV)__AIT17168__GPCmut8 (opt1)
aggagaguccgcucagccagguugcagaagcggcuuagcguguguccuaaucuucucucugcguguagguaggccugugccgcaaacaagcuuaccaugggccagaucgugaccuucuuccaggaggucccccacgugaucgaggaggugaugaacaucguccugaucgcccucagcauccuggccgugcugaaggggcucuacaacuucgcgaccugcggccugguggggcugcucaccuuccugcugcucugcggccgcuccugcaccgccagccgguacaagggggucuacgagcugcagacccuggagcucaacauggagacccugaacaugugcaugccgcuguccugcaccaagaacaacagccaccacuacaucauggugggcaacgagaccggccucgagcugacccugacgaacaccuccaucaucaaccacaaguucugcaaccucagcgacgcccacaagaagaaccuguacgaccacgcccugauguccaucaucagcaccuuccaccucuccauccccaacuucaaccaguacgaggccaugagcugcgacuucaacgggggcaagaucuccgugcaguacaaccugagccacuccuacgcgggggacgccgccaaccacugcggcaccgucgccaacggggugcugcagacguucaugcgcauggcguggggcggcagcuacaucgcccucgacuccgggcacggcagcugggacugcaucaugaccuccuaccaguaccugaucauccagaacaccaccugggaggaccacugccaguucagccggcccucccccaucggguaccugggccuccugagccagcgcacgcgggacaucuacaucagccgccggcugcucggcaccuucaccuggacccuguccgacagcgaggggaaggacacgccgggcggguacugccugacccgcuggaugcucaucgaggccgagcugaagugcuucggcaacaccgccguggccaagugcaacgagaagcacgacgaggaguucugcgacaugcugcggcuguucgacuucugcaagcaggcgauccagcgccugaaggcccccgcccagauguccauccagcugaucaacaaggccgucaacgcccucaucaacgaccagcugaucaugaagaaccaccuccgggacaucauggggauccccuacugcaacuacagcaaguacugcuaccucaaccacaccacgaccggcaagaccucccugcccaagugcugccuggugagcaacggcuccuaccucaacgagacccacuucagcgacgacaucgagcagcaggcggacaacaugaucacggagaugcugcagaaggaguacauggagcgccaggggaagacgccccugggccucguggaccuguucgucuucuccaccagcuucuaccugaucuccaucuuccugcaccucgugaagaucccgacccaccggcacaucgugggcaagagcugccccaagccccaccgccugaaccacauggggaucugcuccugcgggcuguacaagcagcccggcgucccggugaaguggaagcggugaggacuagucccuguucccagagcccacuuuuuuuucuuuuuuugaaauaaaauagccugucuuucagaucuaaaaaaaaaaaaaaaaaaaaaaaaaaaaaaaaaaaaaaaaaaaaaaaaaaaaaaaaaaaaaaaaaaaaaaaaaaaaaaaaaaaaaaaaaaaaaaaaaaaa

SEQ ID NO: 33948 - RNA, 1743 nt, Artificial Sequence
  mRNA product Design a-2 (A100) comprising derived and/or modified sequence from LASV(G1442-SLE-2011;Clade IV)__AIT17180__GPCmut8 (opt1)
aggagaguccgcucagccagguugcagaagcggcuuagcguguguccuaaucuucucucugcguguagguaggccugugccgcaaacaagcuuaccaugggccagaucgugaccuucuuccaggaggucccccacgugaucgaggaggugaugaacaucguccugaucgcccucagcauccuggccgugcugaaggggcucuacaacguggcgaccugcggccugaucgggcuggucacguuccuccugcugugcggccgcuccugcaccaccacccucuacaaggggguguacgagcugcagacgcuggagcucaacauggagacccugaacaugugcaugccgcugagcugcaccaagaacaacucccaccacuacauccgggugggcaacgagacgggccucgagcugacccugaccaacaccagcaucaucaaccacaaguucugcaaccucuccgacgcccacaagaagaaccuguacgaccacgcccugaugagcaucaucuccacguuccaccucagcauccccaacuucaaccaguacgaggccauguccugcgacuucaacgggggcaagaucagcguccaguacaaccugucccacagcuacgccggggacgcggccaaccacugcggcaccguggccaacggggugcugcagaccuucaugcgcauggccuggggcggcuccuacaucgcgcucgacagcgggcggggcaacugggacugcaucaugaccuccuaccaguaccugaucauccagaacacgaccugggacgaccacugccaguucagccgccccucccccaucggguaccugggccuccugagccagcggacccgcgacgucuacaucucccggcgccugcucggcaccuucacguggacccugagcgacagcgaggggaaggacaccccgggcggguacugccugacccgguggaugcucaucgaggccgagcugaagugcuucggcaacacggccguggccaagugcaacgagaagcacgacgaggaguucugcgacaugcugcgccucuucgacuucugcaagcaggccauccagcggcugaaggcgcccgcccagauguccauccagcugaucaacaaggccgugaacgcccucaucaacgaccagcugaucaugaagaaccaccuccgcgacaucauggggauccccuacugcaacuacagcaaguacugcuaccugaacaacaccgccaccggcaagaccucccugcccaagugcugccugaucagcaacggcuccuaccucaacgagacgcacuucagcgacgacaucgagcaggaggcggacaacaugaucaccgagaugcugcagaaggaguacauggagcggcaggggaagacgccccugggccucgucgaccuguucguguucuccaccagcuucuaccugaucuccaucuuccugcaccucgugaagaucccgacccaccgccacaucgucggcaagagcugccccaagccccaccggcugaaccacauggggaucugcuccugcgggcuguacaagcagcccggcgugccggugcgcuggaagcggugaggacuagucccuguucccagagcccacuuuuuuuucuuuuuuugaaauaaaauagccugucuuucagaucuaaaaaaaaaaaaaaaaaaaaaaaaaaaaaaaaaaaaaaaaaaaaaaaaaaaaaaaaaaaaaaaaaaaaaaaaaaaaaaaaaaaaaaaaaaaaaaaaaaaa

SEQ ID NO: 33949 - RNA, 1743 nt, Artificial Sequence
  mRNA product Design a-2 (A100) comprising derived and/or modified sequence from LASV(G3010-SLE-2013;Clade IV)__AIT17344__GPCmut8 (opt1)
aggagaguccgcucagccagguugcagaagcggcuuagcguguguccuaaucuucucucugcguguagguaggccugugccgcaaacaagcuuaccaugggccagaucgugaccuucuuccaggaggucccccacgugaucgaggaggugaugaacaucguccugaucgcccucagcauccuggccgugcugaaggggcucuacaacuucgcgaccugcggccugguggggcuggucacguuccuccugcugugcggccgcuccugcaccaccagccucuacaaggggguguacgagcugcagacccuggagcucaacauggagacgcugaacaugugcaugccgcuguccugcaccaagaacaacagccaccacuacaucauggugggcaacgagaccggccucgagcugacgcugaccaacaccuccaucaucaaccacaaguucugcaaccucagcgacgcccacaagaagaaccuguacaaccacgcccugauguccaucaucagcaccuuccaccucuccauccccaacuucaaccaguacgaggccaugagcugcgacuucaacgggggcaagaucuccguccaguacaaccugagccacuccuacgccggggacgcggccagccacugcggcacgguggccaacggggugcugcagaccuucaugcggauggccuggggcggcuccuacaucgcgcucgacagcggguacggcaagugggacugcaucaugaccuccuaccaguaccugaucauccagaacaccacgugggaggaccacugccaguucagccgccccucccccaucggguaccugggccuccugagccagcggacccgcgacaucuacaucagccggcgccugcucggcaccuucaccuggacgcuguccgacagcgaggggaaggacaccccgggcggguacugccugacccgguggaugcucaucgaggccgagcugaagugcuucggcaacaccgccgucgccaagugcaacgagaagcacgacgaggaguucugcgacaugcugcgccucuucgacuucugcaagcaggccauccagcggcugaagacgcccgcgcagauguccauccagcugaucaacaaggccgugaacgcccucaucaacgaccagcugaucaugaagaaccaccuccgcgacaucauggggauccccuacugcaacuacagcaaguacugcuaccugaaccacaccaccaccggcaagacgucccugcccaagugcugccuggugagcaacggcuccuaccucaacgagacccacuucagcgacgacaucgagcagcaggccgacaacaugaucaccgagaugcugcagaaggaguacauggagcggcaggggaagacgccccugggccucgucgaccuguucguguucuccaccagcuucuaccugaucuccaucuuccugcaccucgugaagaucccgacccaccgccacaucgucggcaagagcugccccaagccccaccggcugaaccacauggggaucugcuccugcgggcuguacaagcagcccggcgugccggugcgcuggaagcggugaggacuagucccuguucccagagcccacuuuuuuuucuuuuuuugaaauaaaauagccugucuuucagaucuaaaaaaaaaaaaaaaaaaaaaaaaaaaaaaaaaaaaaaaaaaaaaaaaaaaaaaaaaaaaaaaaaaaaaaaaaaaaaaaaaaaaaaaaaaaaaaaaaaaa

SEQ ID NO: 33950 - RNA, 1743 nt, Artificial Sequence
  mRNA product Design a-2 (A100) comprising derived and/or modified sequence from LASV(G502-SLE-2009;Clade IV)__AIT17126__GPCmut8 (opt1)
aggagaguccgcucagccagguugcagaagcggcuuagcguguguccuaaucuucucucugcguguagguaggccugugccgcaaacaagcuuaccaugggccagaucgugaccuucuuccaggaggucccccacgugaucgaggaggugaugaacaucguccugaucgcccucagcauccuggccgugcugaaggggcucuacaacuucgcgaccugcggccugguggggcugcucacguuccugcugcucugcggccgcuccugcaccaccgggcuguacaagggcgucuacgagcugcagacccucgagcugaacauggagacgcugaacaugugcaugccgcucagcugcaccaagaacaacucccaccacuacaucauggugggcaacgagaccgggcuggagcugacgcucaccaacaccagcaucaucaaccacaaguucugcaaccuguccgacgcccacaagaagaaccuguacgaccacgcccucaugagcaucaucuccaccuuccaccugagcauccccaacuucaaccaguacgaggccauguccugcgacuucaacggcgggaagaucagcgugcaguacaaccugucccacagcuacgccggcgacgcggccgaccacugcgggacggucgccaacggcgugcuccagaccuucaugcggauggccuggggcggguccuacaucgcgcuggacagcggccgcgggcggugggacugcaucaugaccuccuaccaguaccugaucauccagaacaccacgugggaggaccacugccaguucagccgccccucccccaucggcuaccucggccugcugagccagcggacccgcgacaucuacaucucccggcgccuccuggggaccuucaccuggacgcugagcgacagcgagggcaaggacacccccgggggcuacugccucacccgguggaugcugaucgaggccgagcugaagugcuucgggaacaccgccguggccaagugcaacgagaagcacgacgaggaguucugcgacaugcuccgccuguucgacuucugcaagcaggccauccagcggcugaaggcgcccgcccagauguccauccagcucaucaacaaggccgucaacgcccugaucaacgaccagcuggugaugaagaaccaccuccgcgacaucaugggcauccccuacugcaacuacagccgguacugcuaccugaaccacacgaccaccggccgcaccucccugcccaagugcugccucgugagcaacggguccuaccugaacgagacgcacuucagcgacgacaucgagcagcaggccgacaacaugaucaccgagaugcugcagaaggaguacauggagcggcagggcaagaccccgcucgggcuggucgaccuguucguguucuccaccagcuucuaccugaucuccaucuuccuccaccuggugaagaucccgacgcaccgccacaucgucggcaagagcugccccaagccccaccggcugaaccacauggggaucugcuccugcggccucuacaagcagcccggcgugccggugaaguggaagcgcugaggacuagucccuguucccagagcccacuuuuuuuucuuuuuuugaaauaaaauagccugucuuucagaucuaaaaaaaaaaaaaaaaaaaaaaaaaaaaaaaaaaaaaaaaaaaaaaaaaaaaaaaaaaaaaaaaaaaaaaaaaaaaaaaaaaaaaaaaaaaaaaaaaaaa

SEQ ID NO: 33951 - RNA, 1743 nt, Artificial Sequence
  mRNA product Design a-2 (A100) comprising derived and/or modified sequence from LASV(G733-SLE-2010;Clade IV)__AIT17154__GPCmut8 (opt1)
aggagaguccgcucagccagguugcagaagcggcuuagcguguguccuaaucuucucucugcguguagguaggccugugccgcaaacaagcuuaccaugggccagaucgugaccuucuuccaggaggucccccacgugaucgaggaggugaugaacaucguccugaucgcccucagcauccuggccgugcugaaggggcucuacaacuucgcgaccugcggcaucguggggcuggucuccuuccugcuccugugcggccgcagcugcacgaccucccuguacaaggggguguacgagcuccagacccuggagcugaacauggagacccucaacaugugcaugccgcugagcugcaccaagaacaacucccaccacuacaucauggugggcaacgagaccggccuggagcucacccugacgaacaccagcaucaucaaccacaaguucugcaaccuguccgacgcccacaagaagaaccucuacgaccacgcccugaugagcaucaucuccaccuuccaccugagcauccccaacuucaaccaguacgaggccauguccugcgacuucaacgggggcaagaucagcguccaguacaaccucucccacagcuacgccggggacgcggccaaccacugcggcaccaucgccaacggggugcugcagacguucaugcggauggccuggggcggcuccuacaucgcgcuggacagcgggcgcgaccggugggacugcaucaugaccuccuaccaguaccucaucauccagaacaccaccugggaggaccacugccaguucagccgccccucccccaucggcuaccuggggcugcucagccagcggacgcgcgacaucuacaucagccggcgccugcugggcaccuucaccuggacccucuccgacagcgagggcaaggacacgcccgggggcuacugccugacccgguggaugcugaucgaggccgagcucaagugcuucgggaacaccgccguggccaagugcaacgagaagcacgacgaggaguucugcgacaugcugcgccuguucgacuucugcaagcaggccauccagcggcucaaggcgcccgcccagauguccauccagcugaucaacaaggccgucaacgcccugaucaacgaccagcucaucaugaagaaccaccuccgcgacaucaugggcauccccuacugcaacuacagcaaguacugcuaccugaaccacaccacgaccgggaagaccucccugcccaagugcugccuggugagcaacggcuccuaccugaacgagacccacuucagcgacgacaucgagcagcaggccgacaacaugaucacggagaugcuccagaaggaguacauggagcggcagggcaagaccccgcuggggcugguggaccucuucgucuucuccaccagcuucuaccugaucuccaucuuccugcaccuggugaagaucccgacccaccgccacguggucggcaagagcugccccaagccccaccggcucaaccacauggggaucugcuccugcggccuguacgggcagcccggcgugccggugaaguggaagcgcugaggacuagucccuguucccagagcccacuuuuuuuucuuuuuuugaaauaaaauagccugucuuucagaucuaaaaaaaaaaaaaaaaaaaaaaaaaaaaaaaaaaaaaaaaaaaaaaaaaaaaaaaaaaaaaaaaaaaaaaaaaaaaaaaaaaaaaaaaaaaaaaaaaaaa

SEQ ID NO: 33952 - RNA, 1743 nt, Artificial Sequence
  mRNA product Design a-2 (A100) comprising derived and/or modified sequence from MOPV/LASV reassortant(IGS-1;Clade IV)__AFY05576__GPCmut8 (opt1)
aggagaguccgcucagccagguugcagaagcggcuuagcguguguccuaaucuucucucugcguguagguaggccugugccgcaaacaagcuuaccaugggccagaucgugaccuucuuccaggaggucccccacgugaucgaggaggugaugaacaucguccugaucgcccucagcgugcuggccgugcugaaggggcucuacaacuucgcgaccugcggccuggucgggcuggugacguuccuccugcugugcggccgcuccugcaccaccagccucuacaaggggguguacgagcugcagacccuggagcucaacauggagacgcugaacaugugcaugccgcuguccugcaccaagaacaacagccaccacuacaucauggucggcaacgagaccggccucgagcugacgcugaccaacaccuccaucaucaaccacaaguucugcaaccucagcgacgcccacaagaagaaccuguacgaccacgcccugauguccaucaucagcaccuuccaccucuccauccccaacuucaaccaguacgaggccaugagcugcgacuucaacgggggcaagaucuccgugcaguacaaccugagccacuccuacgccggggacgcggccaaccacugcggcacgguggccaacgggguccugcagaccuucaugcggauggccuggggcggcagcuacaucgcgcucgacuccgggcgcggcaacugggacugcaucaugaccagcuaccaguaccugaucauccagaacaccacgugggaggaccacugccaguucucccggcccagccccaucggguaccugggccuccugucccagcgcacccgggacaucuacaucagccgccggcugcucggcaccuucaccuggacgcugagcgacuccgagggggaggacaccccgggcggguacugccugacccgcuggaugcucaucgaggccgagcugaagugcuucggcaacaccgccguggccaagugcaacgagaagcacgacgaggaguucugcgacaugcugcggcuguucgacuucugcaagcaggccauccagcgccugaaggcgcccgcccagaugagcauccagcugaucaacaaggccgugaacgcccucaucaacgaccagcugaucaugaagaaccaccuccgggacaucauggggauccccuacugcaacuacuccaaguacugcuaccucaaccacacgaccaccggccgcaccagccugcccaagugcugccuggucuccaacggcagcuaccucaacgagacgcacuucuccgacgacaucgagcagcaggccgacaacaugaucaccgagaugcugcagaaggaguacauggagcggcaggggaagacgccccugggccucguggaccuguucguguucagcaccuccuucuaccugaucagcaucuuccugcaccucgucaagaucccgacccaccgccacaucguggggaaguccugccccaagccccaccggcugaaccacaugggcaucugcagcugcgggcuguacaagcagcccggcgugccggucaaguggaagcgcugaggacuagucccuguucccagagcccacuuuuuuuucuuuuuuugaaauaaaauagccugucuuucagaucuaaaaaaaaaaaaaaaaaaaaaaaaaaaaaaaaaaaaaaaaaaaaaaaaaaaaaaaaaaaaaaaaaaaaaaaaaaaaaaaaaaaaaaaaaaaaaaaaaaaa

SEQ ID NO: 33953 - RNA, 1743 nt, Artificial Sequence
  mRNA product Design a-2 (A100) comprising derived and/or modified sequence from LASV(LM765-SLE-2012;Clade IV)__AIT17814__GPCmut8 (opt1)
aggagaguccgcucagccagguugcagaagcggcuuagcguguguccuaaucuucucucugcguguagguaggccugugccgcaaacaagcuuaccaugggccagaucgugaccuucuuccaggaggucccccacgugaucgaggaggugaugaacaucguccugaucgcccucagcauccuggccgugcugaaggggcucuacaacuucgcgaccugcggccugguggggcuggucacguuccuccugcugugcggccgcuccugcaccaccagccucuacaaggggguguacgagcugcagacccuggagcucaacauggagacgcugaacaugugcaugccgcuguccugcaccaagaacaacagccaccacuacaucauggugggcaacgagaccggccucgagcugacgcugaccaacaccuccaucaucgaccacaaguucugcaaccucagcgacgcccaccggaagaaccuguacgaccacgcccugauguccaucaucagcaccuuccaccucuccauccccaacuucaaccaguacgaggccaugagcugcgacuucaacgggggcaagaucuccguccaguacaaccugagccacuccuacgccaaggacgcggccgaccacugcgggacgguggccaacggcgugcugcagaccuucaugcgcauggccuggggcgggagcuacaucgcgcucgacuccggccgggggcgcugggacugcaucaugaccagcuaccaguaccugaucauccagaacaccacgugggaggaccacugccaguucucccggcccagccccaucggcuaccuggggcuccugucccagcgcacccgggacaucuacaucagccgccggcugcucggcaccuucaccuggacgcugagcgacuccgagggcaaggacacccccgggggcuacugccugacccgcuggaugcucaucgaggccgagcugaagugcuucgggaacaccgccgucgccaagugcaacgagaagcacgacgaggaguucugcgacaugcugcggcuguucgacuucugcaagcaggccauccagcgccugaaggcgcccgcccagaugagcauccagcugaucaacaaggccgugaacgcccucaucaacgaccagcugaucaugaagaaccaccuccgggacaucaugggcauccccuacugcaacuacuccaaguacugcuaccucaaccacacgaccaccgggaagaccagccugcccaagugcugccugguguccaacggcagcuaccucaacgagacgcacuucuccgacgacaucgagcagcaggccgacaacaugaucaccgagaugcugcagaaggaguacauggagcgccagggcaagaccccgcuggggcucgucgaccuguucguguucagcaccuccuucuaccugaucagcaucuuccugcaccucgugaagaucccgacgcaccggcacaucgucggcaagcccugccccaagccccaccgccugaaccacauggggaucugcuccugcggccuguacaagcagccgggggugcccgugaaguggaagcggugaggacuagucccuguucccagagcccacuuuuuuuucuuuuuuugaaauaaaauagccugucuuucagaucuaaaaaaaaaaaaaaaaaaaaaaaaaaaaaaaaaaaaaaaaaaaaaaaaaaaaaaaaaaaaaaaaaaaaaaaaaaaaaaaaaaaaaaaaaaaaaaaaaaaa

SEQ ID NO: 33954 - RNA, 1743 nt, Artificial Sequence
  mRNA product Design a-2 (A100) comprising derived and/or modified sequence from LASV(LM776-SLE-2012;Clade IV)__AIT17824__GPCmut8 (opt1)
aggagaguccgcucagccagguugcagaagcggcuuagcguguguccuaaucuucucucugcguguagguaggccugugccgcaaacaagcuuaccaugggccagaucgugaccuucuuccaggaggucccccacgugaucgaggaggugaugaacaucguccugaucgcccucagcauccuggccgugcugaaggggcucuacaacuucgcgaccugcggccugguggggcuggucacguuccuccugcugugcggccgcuccugcaccaccagcguguacaaggggguguacgagcuccagacccuggagcugaacauggagacgcucaacaugugcaugccgcuguccugcaccaagaacaacagccaccacuacaucauggucggcaacgagaccggccuggagcucacgcugaccaacaccuccaucaucaaccacaaguucugcaaccugagcgacgcccacaagaagaaccucuacgaccacgcccugauguccaucaucagcaccuuccaccuguccauccccaacuucaaccaguacgaggccaugagcugcgacuucaacgggggcaagaucuccgugcaguacaaccucagccacuccuacgccggggacgcggccaaccacugcggcacgguggccaacgggguccugcagaccuucaugcggauggccuggggcggcagcuacaucgcgcuggacuccgggcacggcaagugggacugcaucaugaccagcuaccaguaccucaucauccagaacaccacgugggaggaccacugccaguucucccgccccagccccaucggguaccugggccugcucucccagcggacccgcgacaucuacaucagccggcgccugcugggcaccuucaccuggacgcucagcgacuccgaggggaaggacaccccgggcggguacugccugacccgguggaugcugaucgaggccgagcucaagugcuucggcaacaccgccguggccaagugcaacgagaagcacgacgaggaguucugcgacaugcugcgccuguucgacuucugcaagcaggccauccagcggcucaaggcgcccgcccagaugagcauccagcugaucaacaaggccgugaacgcccugaucaacgaccagcucaucaugaagaaccaccuccgcgacaucauggggauccccuacugcaacuacuccaaguacugcuaccugaaccacacgaccaccggcaagaccagccugcccaagugcugccuggucuccaacggcagcuaccugaacgagacgcacuucuccgacgacaucgagcagcaggccgacaacaugaucaccgagaugcuccagaaggaguacauggagcggcaggggaagacgccccugggccugguggaccucuucguguucagcaccuccuucuaccugaucagcaucuuccugcaccuggucaagaucccgacccaccgccacaucguggggaaguccugccccaagccccaccggcucaaccacaugggcaucugcagcugcgggcuguacaagcagcccggcgugccgguccgcuggaagcggugaggacuagucccuguucccagagcccacuuuuuuuucuuuuuuugaaauaaaauagccugucuuucagaucuaaaaaaaaaaaaaaaaaaaaaaaaaaaaaaaaaaaaaaaaaaaaaaaaaaaaaaaaaaaaaaaaaaaaaaaaaaaaaaaaaaaaaaaaaaaaaaaaaaaa

SEQ ID NO: 33955 - RNA, 1743 nt, Artificial Sequence
  mRNA product Design a-2 (A100) comprising derived and/or modified sequence from LASV(Mad39;Clade IV)__ANH09722__GPCmut8 (opt1)
aggagaguccgcucagccagguugcagaagcggcuuagcguguguccuaaucuucucucugcguguagguaggccugugccgcaaacaagcuuaccaugggccagaucgugaccuucuuccaggaggucccccacgugaucgaggaggugaugaacaucguccugaucgcccucagcauccuggccgugcugaaggggcucuacaacguggcgaccugcggccugaucgggcuggucacguuccuccugcugugcggccgcuccugcaccaccacccucuacaaggggguguacgagcugcaggcccuggagcucaacauggagacgcugaacaugugcaugccgcugagcugcaccaagaacaacucccaccacuacauccgggugggcaacgagaccggccucgagcugacgcugaccaacaccagccucaucaaccacaaguucugcaaccuguccgacgcccacaagaagaaccuguacgaccacgcccucaugagcaucaucuccaccuuccaccugagcauccccaacuucaaccaguacgaggccauguccugcgacuucaacgacgggaagaucagcguccaguacaaccugucccacacguacgcgggcgacaccgccaaccacugcgggaccguggccaacggcgugcuccagaccuucaugcgcauggccuggggcgggagcuacaucgcgcuggacuccggccgcgggggcugggacugcaucaugacgagcuaccaguaccugaucauccagaacaccaccugggaggaccacugccaguucucccggcccagccccaucggguaccucggccugcugucccagcggacccgcgacaucuacaucagccggcgccuccugggcacguucaccuggacccuguccgacagcgaggggaaggacaccccgggcggguacugccucacgcgguggaugcugaucgaggccgagcugaagugcuucggcaacaccgccgucgccaagugcaacgagaagcacgacgaggaguucugcgacaugcuccgccuguucgacuucugcaagcaggccauccagcggcugaaggcgcccgcccagaugagcauccagcucaucaacaaggccgugaacgcccugaucaacgaccagcugaucaugaagaaccaccuccgcgacaucauggggauccccuacugcaacuacuccaaguacugcuaccugaaccacaccgugaccggcaagacgagccugcccaagugcugccucgucuccaacggcagcuaccugaacgagacccacuucuccgacgacaucgagcagcaggccgacaacaugaucaccgagaugcugcagaaggaguacauggagcggcaggggaagacgccccucggccugguggaccuguucguguucagcaccuccuucuaccugaucagcaucuuccuccaccuggucaagaucccgacccaccgccacgugguggggaagcccugccccaagccccaccggcugaaccacaugggcaucugcuccugcggguucuacaagcagccgggcguccccgugcgcuggaagcggugaggacuagucccuguucccagagcccacuuuuuuuucuuuuuuugaaauaaaauagccugucuuucagaucuaaaaaaaaaaaaaaaaaaaaaaaaaaaaaaaaaaaaaaaaaaaaaaaaaaaaaaaaaaaaaaaaaaaaaaaaaaaaaaaaaaaaaaaaaaaaaaaaaaaa

SEQ ID NO: 33956 - RNA, 1743 nt, Artificial Sequence
  mRNA product Design a-2 (A100) comprising derived and/or modified sequence from LASV(Z0947-SLE-2011;Clade IV)__AIT17840__GPCmut8 (opt1)
aggagaguccgcucagccagguugcagaagcggcuuagcguguguccuaaucuucucucugcguguagguaggccugugccgcaaacaagcuuaccaugggccagaucgugaccuucuuccaggaggucccccacgugaucgaggaggugaugaacaucguccugaucgcccucagcauccuggccgugcugaaggggcucuacaacuucgcgaccugcggccugguggggcuggucacguuccuccugcugugcggccgcuccugcaccaucagccucuacaaggggguguacgagcugcagacccuggagcucaacauggagacccugaacaugugcaugccgcuguccugcaccaagaacaacagccaccacuacaucauggugggcaacgagaccggccucgagcugacccugacgaacaccuccaucaucaaccacaaguucugcaaccucagcgacgcccacaagaagaaccuguacgaccacgcccugauguccaucaucagcaccuuccaccucuccauccccaacuucaaccaguacgaggccaugagcugcgacuucaacgggggcaagaucuccguccaguacaaccugagccacuccuacgccggggacgcggccaaccacugcggcaccguggccaacggggugcugcagacguucaugcggauggccuggggcggcagcuacaucgcgcucgacuccgggcgcgaccggugggacugcaucaugaccagcuaccaguaccugaucauccagaacaccaccugggaggaccacugccaguucucccgccccagccccaucggcuaccuggggcuccugucccagcggacgcgcgacaucuacaucagccggcgccugcucggcaccuucaccuggacccugagcgacuccgagggcaaggacacgcccgggggcuacugccugacccgguggaugcucaucgaggccgagcugaagugcuucgggaacaccgccgucgccaagugcaacgagaagcacgacgaggaguucugcgacaugcugcgccucuucgacuucugcaagcaggccauccagcggcugaaggcgcccgcccagaugagcauccagcugaucaacaaggccgugaacgcccucaucaacgaccagcugaucaugaagaaccaccuccgcgacaucaugggcauccccuacugcaacuacuccaaguacugcuaccugaaccacaccacgaccgggaagaccagccugcccaagugcugccugguguccaacggcagcuaccucaacgagacccacuucuccgacgacaucgagcagcaggccgacaacaugaucacggagaugcugcagaaggaguacauggagcggcagggcaagaccccgcuggggcucgucgaccuguucguguucagcaccuccuucuaccugaucagcaucuuccugcaccucgugaagaucccgacccaccgccacaucgucggcaagcccugccccaagccccaccggcugaaccacauggggaucugcuccugcggccuguacaagcagccgggggugcccgugaaguggaagcgcugaggacuagucccuguucccagagcccacuuuuuuuucuuuuuuugaaauaaaauagccugucuuucagaucuaaaaaaaaaaaaaaaaaaaaaaaaaaaaaaaaaaaaaaaaaaaaaaaaaaaaaaaaaaaaaaaaaaaaaaaaaaaaaaaaaaaaaaaaaaaaaaaaaaaa

SEQ ID NO: 33957 - RNA, 1743 nt, Artificial Sequence
  mRNA product Design a-2 (A100) comprising derived and/or modified sequence from LASV(Josiah;Clade IV)__NP_694870__GPCmut8 (opt1)
aggagaguccgcucagccagguugcagaagcggcuuagcguguguccuaaucuucucucugcguguagguaggccugugccgcaaacaagcuuaccaugggccagaucgugaccuucuuccaggaggucccccacgugaucgaggaggugaugaacaucguccugaucgcccucagcgugcuggccgugcugaaggggcucuacaacuucgcgaccugcggccuggucgggcuggugacguuccuccugcugugcggccgcuccugcaccaccagccucuacaaggggguguacgagcugcagacccuggagcucaacauggagacgcugaacaugugcaugccgcuguccugcaccaagaacaacagccaccacuacaucauggucggcaacgagaccggccucgagcugacccugacgaacaccuccaucaucaaccacaaguucugcaaccucagcgacgcccacaagaagaaccuguacgaccacgcccugauguccaucaucagcaccuuccaccucuccauccccaacuucaaccaguacgaggccaugagcugcgacuucaacgggggcaagaucuccgugcaguacaaccugagccacuccuacgccggggacgcggccaaccacugcggcaccguggccaacgggguccugcagacguucaugcggauggccuggggcggcagcuacaucgcgcucgacuccgggcgcggcaacugggacugcaucaugaccagcuaccaguaccugaucauccagaacaccaccugggaggaccacugccaguucucccggcccagccccaucggguaccugggccuccugucccagcgcacgcgggacaucuacaucagccgccggcugcucggcaccuucaccuggacccugagcgacuccgaggggaaggacacgccgggcggguacugccugacccgcuggaugcucaucgaggccgagcugaagugcuucggcaacaccgccguggccaagugcaacgagaagcacgacgaggaguucugcgacaugcugcggcuguucgacuucugcaagcaggccauccagcgccugaaggcgcccgcccagaugagcauccagcugaucaacaaggccgugaacgcccucaucaacgaccagcugaucaugaagaaccaccuccgggacaucauggggauccccuacugcaacuacuccaaguacugcuaccucaaccacaccacgaccggccgcaccagccugcccaagugcugccuggucuccaacggcagcuaccucaacgagacccacuucuccgacgacaucgagcagcaggccgacaacaugaucacggagaugcugcagaaggaguacauggagcggcaggggaagaccccgcugggccugguggaccucuucguguucagcaccuccuucuaccugaucagcaucuuccugcaccucgucaagauccccacccaccgccacaucguggggaaguccugccccaagccccaccggcugaaccacaugggcaucugcagcugcgggcuguacaagcagccgggcgugcccgucaaguggaagcgcugaggacuagucccuguucccagagcccacuuuuuuuucuuuuuuugaaauaaaauagccugucuuucagaucuaaaaaaaaaaaaaaaaaaaaaaaaaaaaaaaaaaaaaaaaaaaaaaaaaaaaaaaaaaaaaaaaaaaaaaaaaaaaaaaaaaaaaaaaaaaaaaaaaaaa

SEQ ID NO: 33958 - RNA, 1740 nt, Artificial Sequence
  mRNA product Design a-2 (A100) comprising derived and/or modified sequence from LASV(LP;Clade I)__AAF86701__GPCmut8 (opt1)
aggagaguccgcucagccagguugcagaagcggcuuagcguguguccuaaucuucucucugcguguagguaggccugugccgcaaacaagcuuaccaugggccagaucaucaccuucuuccaggaggugccccacgucaucgaggaggugaugaacaucgugcugaucgcccucagccugcuggccauccucaaggggcuguacaacaucgcgaccugcggcaucaucgggcuggucgccuuccucuuccugugcggcaaguccugcagccugacgcucaagggcggguacgagcugcagacccuggagcucaacauggagacccugaacaugugcaugccgcuguccugcaccaagaacagcucccaccacuacauccgcgugggcaacgagacggggcucgagcugacccugaccaacaccagcaucaucaaccacaaguucugcaaccucuccgacgcccacaagaagaaccuguacgaccacgcccugaugagcaucaucuccacguuccaccucagcauccccaacuucaaccaguacgaggccauguccugcgacuucaacggcgggaagaucagcgugcaguacaaccugucccacagcuacgcgggcgacgccgccgagcacugcgggaccgucgccaacggcgugcugcagaccuucaugcggauggcguggggcgggcgcuacaucgcccucgacuccggcaaggggaacugggacugcaucaugaccagcuaccaguaccugaucauccagaacacgaccugggaggaccacugccaguucucccggcccagccccaucggcuaccugggccuccugucccagcgcacccgggacaucuacaucagccgccggcugcucgggaccuucacguggacccugagcgacuccgagggcaacgagacccccgggggcuacugccugacccgcuggaugcucaucgaggccgagcugaagugcuucgggaacacggccguggccaagugcaacgagaagcacgacgaggaguucugcgacaugcugcggcuguucgacuucugcaagcaggcgauccgccggcugaaggccccggcccagaugagcauccagcugaucaacaaggccgucaacgcccucaucaacgaccagcugaucaugaagaaccaccuccgcgacaucaugggcauccccuacugcaacuacuccaaguacugcuaccucaaccacaccagcuccggccggaccagccugcccaagugcugccugaucuccaacgggagcuaccucaacgagacccaguucuccgacgacaucgagcagcaggcggacaacaugaucacggagaugcugcagaaggaguacaucgagcgccagggcaagaccccgcuggggcugguggacaucuucaucuucagcaccuccuucuaccucaucagcaucuuccugcaccugaucaagauccccacccaccggcacaucgugggcaagcccugccccaagccgcaccgccucaaccacaugggggucugcuccugcggccuguacaagcaccccggcgugcccacgaaguggaagcggugaggacuagucccuguucccagagcccacuuuuuuuucuuuuuuugaaauaaaauagccugucuuucagaucuaaaaaaaaaaaaaaaaaaaaaaaaaaaaaaaaaaaaaaaaaaaaaaaaaaaaaaaaaaaaaaaaaaaaaaaaaaaaaaaaaaaaaaaaaaaaaaaaaaaa

SEQ ID NO: 33959 - RNA, 1740 nt, Artificial Sequence
  mRNA product Design a-2 (A100) comprising derived and/or modified sequence from LASV(803213;Clade II)__AAF86703__GPCmut8 (opt1)
aggagaguccgcucagccagguugcagaagcggcuuagcguguguccuaaucuucucucugcguguagguaggccugugccgcaaacaagcuuaccaugggccagaucaucaccuucuuccaggaggugccccacgucaucgaggaggugaugaacaucgugcugaucgcccucagccugcuggccauccucaaggggaucuacaacgucgcgaccugcggccuguucgggcugaucuccuuccuccugcugugcggccgcagcugcuccgugacguacaaggggguguacgagcuccagacccuggagcugaacauggccaaccucaacaugugcaugccgcugagcugcaccaagaacaacucccaccacuacaucauggucggcaacgagaccggccuggagcucacgcugaccaacaccagcaucaucaaccacaaguucugcaaccuguccgacgcccacaagaagaaccucuacgaccacgcccugaugagcaucaucuccaccuuccaccugagcauccccaacuucaaccaguacgaggccauguccugcgacuucaacgggggcaagaucagcgugcaguacaaccucucccacagcuucgcgguggacgccgccaaccacugcgggacgaucgccaacggcguccugcagaccuucaugcggauggcguggggcggguccuacaucgcccuggacagcggcaaggggaacugggacugcaucaugaccuccuaccaguaccucaucauccagaacaccacgugggaggaccacugccaguucagccgccccucccccaucggcuaccuggggcugcucagccagcggacccgcgacaucuacaucagccggcgccugcugggcaccuucaccuggacgcucuccgacagcgagggcaacgaggcccccgggggcuacugccugacccgguggaugcugaucgaggccgagcucaagugcuucgggaacaccgccguggcgaagugcaacgagaagcacgacgaggaguucugcgacaugcugcgccuguucgacuucugcaagcaggccaucaagcggcucaagaccccggcccagauguccauccagcugaucaacaaggccgugaacgcccugaucaacgaccagcucaucaugaagaaccaccuccgcgacaucaugggcauccccuacugcaacuacagccgguacugcuaccugaaccacacggucaccgggaagaccucccugccccgcugcugccuggugagcaacggcuccuaccugaacgagacccacuucagcgacgacaucgagcagcaggcggacaacaugaucacggagaugcuccagaaggaguacauggaccggcagggcaagaccccgcuggggcugguggaccuguucgucuucuccaccagcuucuaccucaucuccaucuuccugcaccuggugaagauccccacccaccgccacaucgugggcaagcccugccccaagccgcaccggcucaaccacauggggaucugcagcugcggccuguacaagcaccccgggguccccgugaaguggaagcgcugaggacuagucccuguucccagagcccacuuuuuuuucuuuuuuugaaauaaaauagccugucuuucagaucuaaaaaaaaaaaaaaaaaaaaaaaaaaaaaaaaaaaaaaaaaaaaaaaaaaaaaaaaaaaaaaaaaaaaaaaaaaaaaaaaaaaaaaaaaaaaaaaaaaaa

SEQ ID NO: 33960 - RNA, 1740 nt, Artificial Sequence
  mRNA product Design a-2 (A100) comprising derived and/or modified sequence from LASV(GA391;Clade III)__CAA36645__GPCmut8 (opt1)
aggagaguccgcucagccagguugcagaagcggcuuagcguguguccuaaucuucucucugcguguagguaggccugugccgcaaacaagcuuaccaugggccagaucgugaccuucuuccaggaggucccccacgugaucgaggaggugaugaacaucguccugaucgcccucagcauccuggccauccugaaggggcucuacaacguggcgaccugcggccugaucgggcuggugacguuccuccugcuguccggccgcagcugcucccucaucuacaaggggaccuacgagcugcagacccuggagcucaacauggagacccugaacaugugcaugccgcugagcugcacgaagaacaacucccaccacuacauccgggucggcaacgagaccggccucgagcugacccugaccaacacgagcauccucaaccacaaguucugcaaccuguccgacgcccacaagcgcaaccuguacgaccacagccucauguccaucaucagcaccuuccaccuguccauccccaacuucaaccaguacgaggccaugagcugcgacuucaacgggggcaagaucaccgugcaguacaaccugucccacagcuucgccguggacgccgcggggcacugcggcacccucgccaacgggguccugcagacguucaugcggauggccuggggcggcuccuacaucgcccuggacagcgggcgcggcaacugggacugcaucaugaccuccuaccaguaccucaucauccagaacaccaccugggacgaccacugccaguucagccggcccucccccaucggguaccugggccugcucagccagcgcacgcgggacaucuacaucagccgccggcugcugggcaccuucaccuggacccucuccgacagcgaggggaacgagacgccgggcggguacugccugacccgcuggaugcugaucgaggcggagcucaagugcuucggcaacaccgccguggccaagugcaacgagaagcacgacgaggaguucugcgacaugcugcggcuguucgacuucugcaagcaggccauccgccggcucaagacccccgcccagauguccauccagcugaucaacaaggcggugaacgcccugaucaacgaccagcucaucaugaagaaccaccuccgcgacaucauggggauccccuacugcaacuacagccgguacugcuaccugaaccacacguccaccggcaagaccagccugccccgcugcugccugaucuccaacggcagcuaccugaacgagaccaaguucuccgacgacaucgagcagcaggccgacaacaugaucacggagaugcugcagaaggaguacaucgaccggcaggggaagaccccgcucggccuggucgaccuguucguguucagcaccuccuucuaccucaucagcaucuuccugcaccuggugaagauccccacccaccgccacaucgucgggaagcccugccccaagccgcaccggcucaaccacaugggcaucugcuccugcgggcuguacaagcagcccggcgugcccgugcgcuggaagcggugaggacuagucccuguucccagagcccacuuuuuuuucuuuuuuugaaauaaaauagccugucuuucagaucuaaaaaaaaaaaaaaaaaaaaaaaaaaaaaaaaaaaaaaaaaaaaaaaaaaaaaaaaaaaaaaaaaaaaaaaaaaaaaaaaaaaaaaaaaaaaaaaaaaaa

SEQ ID NO: 33961 - RNA, 1743 nt, Artificial Sequence
  mRNA product Design a-2 (A100) comprising derived and/or modified sequence from LASV(AV;Clade V)__CCA30314__GPCmut8 (opt1)
aggagaguccgcucagccagguugcagaagcggcuuagcguguguccuaaucuucucucugcguguagguaggccugugccgcaaacaagcuuaccaugggccagaucgugaccuucuuccaggaggucccccacgugaucgaggaggugaugaacaucguccugaucgcccucagcauccuggccgugcugaaggggcucuacaacaucgcgaccugcggccugaucgggcugaucacguuccuccugcugugcggccgcuccugcagcuccaaccucuacaaggggguguacgagcugcagagccuggaccucaacauggagacccugaacaugugcaugccgcuguccugcaccaagaacaacagccaccacuacauccgggucggcaacgacaccggccucgagcugacgcugaccaacaccuccauccucaaccacaaguucugcaaccugagcgacgcccacaagaaggaccuguacgaccacgcccucauguccaucaucagcaccuuccaccuguccauccccaacuucaaccaguacgaggccaugagcugcgacuucaacgggggcaagaucuccgugcaguacaaccugagccacuccuacgccaucgacgcggccaaccacugcgggacgguggccaacggcauccuccagaccuucaugcgcauggccuggggcgggagcuacaucgcgcuggacuccggccgggggaacugggacugcaucaugaccagcuaccaguaccugaucauccagaacaccacgugggagaaccacugccaguucucccgccccagccccaucggcuaccucgggcugcugagccagcggacccgcgacaucuacaucucccggcgccuccugggcaccuucaccuggacgcugagcgacuccgagggcaacgccacccccgggggcuacugccucacccgguggaugcugaucgaggccgagcugaagugcuucgggaacaccgccgucgccaagugcaacgagaagcacgacgaggaguucugcgacaugcuccgccuguucgacuucugcaagcaggcgaucagccggcugaaguccccggcccagaugagcauccagcucaucaacaaggccgugaacgcccugaucaacgaccagcugaucaugaagaaccaccuccgcgacaucaugggcauccccuacugcaacuacuccaaguacugcuaccugaaccacacgaucaccgggaagaccagccugcccaagugcugccucguguccaacggcagcuaccugaacgagacccacuucuccgacgacaucgagcagcaggccgacaacaugaucacggagaugcugcagaaggaguacauggagcggcagggcaagaccccgcuggggcucgucgaccuguucguguucagcaccuccuucuaccugaucagcaucuuccuccgccuggugaagauccccacccaccggcacaucgucggcaagcccugccccaagccgcaccgccugaaccacauggggaucugcuccugcggccucuacaagcagcccggggugcccgugcgguggaagcgcugaggacuagucccuguucccagagcccacuuuuuuuucuuuuuuugaaauaaaauagccugucuuucagaucuaaaaaaaaaaaaaaaaaaaaaaaaaaaaaaaaaaaaaaaaaaaaaaaaaaaaaaaaaaaaaaaaaaaaaaaaaaaaaaaaaaaaaaaaaaaaaaaaaaaa

SEQ ID NO: 33962 - RNA, 1740 nt, Artificial Sequence
  mRNA product Design a-2 (A100) comprising derived and/or modified sequence from LASV(Togo/2016/7082;Clade VI)__AMR44577__GPCmut8 (opt1)
aggagaguccgcucagccagguugcagaagcggcuuagcguguguccuaaucuucucucugcguguagguaggccugugccgcaaacaagcuuaccaugggccagaucaucaccuucuuccaggaggugccccacgucaucgaggaggugaugaacaucgugcugaucgcccucagccugcuggccauccucaagggggucuacaacguggcgaccugcggcaucaucgggcuggugacguuccuguuccucugcggccgcuccugcagccugaucuacaagggguccuacgagcugcagacccucgagcugaacauggagacccugaacaugugcaugccgcucagcugcaccaagaacuccagccaccacuacauccgggucggcaacgagacgggccuggagcugacccucaccaacaccuccaucaucaaccacaaguucugcaaccugagcgacgcccacaagcgcaaccuguacgaccacgcccucauguccauccugagcacguuccaccuguccauccccaacuucaaccaguacgaggccaugagcugcgacuucaacgggggcaagaucuccgugcaguacaaccucagccacgccuacgcgguggacgccgccgagcacugcgggaccgucgccaacggcgugcugcagaccuucaugcggauggcguggggcggguccuacaucgcccuggacagcggccgcgggaacugggacugcaucaugaccuccuaccaguaccucaucauccagaacacgaccugggaggaccacugccaguucagccggcccucccccaucggcuaccuggggcugcucagccagcgcacccgggacaucuacaucagccgccggcugcugggcaccuucacguggacccucuccgacagcgagggcaacgagacccccgggggcuacugccugacccgcuggaugcugaucgaggccgagcucaagugcuucgggaacacggccguggccaagugcaacgagaagcacgacgaggaguucugcgacaugcugcggcuguucgacuucugcaagcaggcgauccagcgccucaaguccccggcccagaugagcauccagcugaucaacaaggccgucaacgcccugaucaacgaccagcucaucaugaagaaccaccuccgggacaugaugggcauccccuacugcaacuacuccaaguacugcuaccugaaccacaccagcuccgggcgcaccagccugcccaagugcugccugguguccaacggcagcuaccugaacgagacccacuucuccgacgacaucgagcagcaggccgacaacaugaucacggagaugcuccagaaggaguacaucgaccggcagggcaagaccccgcuggggcugguggaccuguucgucuucagcaccuccuucuaccucaucagcaucuuccugcaccugaucaagauccccacccaccgccacaucgugggcaagcccugccccaagccgcaccggcucaaccacauggggaucugcuccugcggccuguacaagcagcccggggugcccacgcgcuggaagcggugaggacuagucccuguucccagagcccacuuuuuuuucuuuuuuugaaauaaaauagccugucuuucagaucuaaaaaaaaaaaaaaaaaaaaaaaaaaaaaaaaaaaaaaaaaaaaaaaaaaaaaaaaaaaaaaaaaaaaaaaaaaaaaaaaaaaaaaaaaaaaaaaaaaaa

SEQ ID NO: 33963 - RNA, 1740 nt, Artificial Sequence
  mRNA product Design a-2 (A100) comprising derived and/or modified sequence from LASV(KAK-428;Clade n.d. (VII))__ANH09740__GPCmut8 (opt1)
aggagaguccgcucagccagguugcagaagcggcuuagcguguguccuaaucuucucucugcguguagguaggccugugccgcaaacaagcuuaccaugggccagaucgugaccuucuuccaggaggucccccacgugaucgaggaggugaugaacaucguccugaucgcccucagccugcuggccauccucaaggggcuguacaacuucgcgaccugcggcgugaucgggcugaucacguuccuccugcugugcggccgcuccugcagcgccaccuacaaggggcaguacgagcuccagacccuggagcugaacauggagucccucaacaugugcaugccgcugagcugcaccaagaacaacucccaccacuacauccgggccggcaacaacacgggccuggagcucacccugaccaacaccagcaucaucucccacaaguucugcaaccugagcgacgcccacaagaagaaccucuacgaccacacgcugauguccaucaucaccaccuuccaccugagcauccccaacuucaaccaguacgaggccauguccugcgacuucaacgggggcaagaucagcauccaguacaaccucucccacagcuacgcgggggacgccgcccagcacugcggcaccguggccaacgggguccugcagacguucaugcgcauggcguggggcggcuccuaccuggcccucgacagcgggcggcgcggcugggacugcaucaucuccagcuaccaguaccugaucauccagaacaccaccugggacgaccacugccaguucucccggcccagccccaucggguaccugggcuucgugagccagaagacccgcgacaucuacaucucccggcgccuccugggcacguucaccuggacccugagcgacuccgaggggcacgacaugccgggcggguacugccucacccgguggaugcugaucgaggccgaccugaagugcuucggcaacacggccguggccaagugcaacgagaagcacgacgaggaguucugcgacauguggcgccucuucgacuucugcaagcaggcgauccagcggcugaaggcccccgcccagaugaacauccagcugaucaacaaggccgucaacgcccucaucaacgaccagcugaugaugaagaaccaccuccgcgacaucauggggauccccuacugcaacuacagcaaguucugcuaccugaacaacaccaccaccggccggacgucccugccccgcugcugccugaucagcaacggcuccuaccucaacgagacccacuucagcgacgacaucgagcagcaggcggacaacaugaucaccgagaugcugcagaaggaguacauggaccggcaggggaagaccccgcugggccucguggaccuguucguguucuccacgagcuucuaccugaucaccaucuuccugcaccucgucaagauccccacccaccgccacaucguggggaagcccugccccaagccgcaccggcugaaccacaugggcaucugcuccugcgggcuguacaagcagcccggcgugcccguccgcuggaagcggugaggacuagucccuguucccagagcccacuuuuuuuucuuuuuuugaaauaaaauagccugucuuucagaucuaaaaaaaaaaaaaaaaaaaaaaaaaaaaaaaaaaaaaaaaaaaaaaaaaaaaaaaaaaaaaaaaaaaaaaaaaaaaaaaaaaaaaaaaaaaaaaaaaaaa

SEQ ID NO: 33964 - RNA, 1740 nt, Artificial Sequence; identical to SEQ ID NO: 33958
  mRNA product Design a-2 (A100) comprising derived and/or modified sequence from LASV(Pinneo-NIG-1969;Clade I)__AIT17836__GPCmut8 (opt1)

SEQ ID NO: 33965 - RNA, 1740 nt, Artificial Sequence
  mRNA product Design a-2 (A100) comprising derived and/or modified sequence from LASV(ISTH0009-NIG-2011;Clade II)__AIT17404__GPCmut8 (opt1)
aggagaguccgcucagccagguugcagaagcggcuuagcguguguccuaaucuucucucugcguguagguaggccugugccgcaaacaagcuuaccaugggccagaucaucaccuucuuccaggaggugccccacgucaucgaggaggugaugaacaucgugcugaucgcccucagccugcuggccauccucaaggggaucuacaacgucgcgaccugcggccuguucgggcugguguccuuccuccugcugugcggccgcagcugcuccacgaccuacaaggggguguacgagcuccagacccuggagcuggacauggccagccucaacaugugcaugccgcuguccugcaccaagaacaacagccaccacuacaucauggucggcaacgagacgggccuggagcucacccugaccaacaccuccaucaucaaccacaaguucugcaaccugagcgacgcccacaagaagaaccucuacgaccacgcccugauguccaucaucagcacguuccaccuguccauccccaacuucaaccaguacgaggccaugagcugcgacuucaacgggggcaagaucuccgugcaguacaaccucagccacgcguacgccguggacgccgccaaccacugcgggaccaucgcgaacggcguccugcagaccuucaugcggauggccuggggcggguccuacaucgcccuggacagcggcaagggguccugggacugcaucaugaccagcuaccaguaccucaucauccagaacacgaccugggaggaccacugccaguucucccgccccagccccaucggcuaccuggggcugcucagccagcggacccgcgacaucuacaucucccggcgccugcugggcaccuucacguggacccucagcgacuccgagggcaacgagacccccgggggcuacugccugacccgguggaugcugaucgaggccgagcucaagugcuucgggaacacggccguggcgaagugcaacgagaagcacgacgaggaguucugcgacaugcugcgccuguucgacuucugcaagcaggccauccggcgccucaagaccccggcccagaugagcauccagcugaucaacaaggccgugaacgcccugaucaacgaccagcucaucaugaagaaccaccuccgggacaucaugggcauccccuacugcaacuacuccaaguacugcuaccugaaccacaccgucaccgggaagacgagccugccccgcugcugccugguguccaacggcagcuaccugaacgagacccacuucuccgacgacaucgagcagcaggcggacaacaugaucaccgagcuccugcagaaggaguacauggaccggcagggcaagaccccgcuggggcugguggaccucuucgucuucagcacguccuucuaccugaucagcaucuuccugcaccucaucaagauccccacccaccgccacaucaccggcaagcccugccccaagccgcaccggcugaaccacauggggaucugcuccugcggccuguacaagcaccccggggugcccgugaaguggaagcgcugaggacuagucccuguucccagagcccacuuuuuuuucuuuuuuugaaauaaaauagccugucuuucagaucuaaaaaaaaaaaaaaaaaaaaaaaaaaaaaaaaaaaaaaaaaaaaaaaaaaaaaaaaaaaaaaaaaaaaaaaaaaaaaaaaaaaaaaaaaaaaaaaaaaaa

SEQ ID NO: 33966 - RNA, 1740 nt, Artificial Sequence
  mRNA product Design a-2 (A100) comprising derived and/or modified sequence from LASV(ISTH2010-NIG-2012;Clade II)__AIT17482__GPCmut8 (opt1)
aggagaguccgcucagccagguugcagaagcggcuuagcguguguccuaaucuucucucugcguguagguaggccugugccgcaaacaagcuuaccaugggccagaucaucaccuucuuccaggaggugccccacgucaucgaggaggugaugaacaucgugcugaucgcccucagccugcuggccauccucaaggggaucuacaacgucgcgaccugcggccuguucgggcugguguccuuccuccugcugugcggccgcagcugcuccacgaccuacaaggggguguacgagcuccagacccuggagcuggacauggccagccucaacaugugcaugccgcuguccugcaccaagaacaacagccaccacuacaucauggucggcaacgagacgggccuggagcucacccugaccaacaccuccaucaucaaccacaaguucugcaaccugagcgacgcccacaagaagaaccucuacgaccacgcccugauguccaucaucagcacguuccaccuguccauccccaacuucaaccaguacgaggccaugagcugcgacuucaacgggggcaagaucuccgugcaguacaaccucagccacgcguacgccguggacgccgccaaccacugcgggaccaucgcgaacggcguccugcagaccuucaugcggauggccuggggcggguccuacaucgcccuggacagcggcaagggguccugggacugcaucaugaccagcuaccaguaccucaucauccagaacaucacgugggaggaccacugccaguucucccgccccagccccaucggcuaccuggggcugcucagccagcggacccgcgacaucuacaucucccggcgccugcugggcaccuucaccuggacgcucagcgacuccgagggcaacgagacccccgggggcuacugccugacccgguggaugcugaucgaggccgagcucaagugcuucgggaacaccgccguggcgaagugcaacgagaagcacgacgaggaguucugcgacaugcugcgccuguucgacuucugcaagcaggccauccggcgccucaagacgccggcccagaugagcauccagcugaucaacaaggccgugaacgcccugaucaacgaccagcucaucaugaagaaccaccuccgggacaucaugggcauccccuacugcaacuacuccaaguacugcuaccugaaccacaccgucaccgggaagaccagccugccccgcugcugccugguguccaacggcagcuaccugaacgagacgcacuucuccgacgacaucgagcagcaggcggacaacaugaucaccgagcuccugcagaaggaguacaucgaccggcagggcaagaccccgcuggggcugguggaccucuucgucuucagcaccuccuucuaccugaucagcaucuuccugcaccucgugaagauccccacgcaccgccacguggucggcaagcccugccccaagccgcaccggcugaaccacauggggaucugcuccugcggccuguacaagcaccccggggugcccgugaaguggaagcgcugaggacuagucccuguucccagagcccacuuuuuuuucuuuuuuugaaauaaaauagccugucuuucagaucuaaaaaaaaaaaaaaaaaaaaaaaaaaaaaaaaaaaaaaaaaaaaaaaaaaaaaaaaaaaaaaaaaaaaaaaaaaaaaaaaaaaaaaaaaaaaaaaaaaaa

SEQ ID NO: 33967 - RNA, 1740 nt, Artificial Sequence
  mRNA product Design a-2 (A100) comprising derived and/or modified sequence from LASV(Lassa virus/H.sapiens-wt/NGA/2015/ISTH_0543;Clade II)__AVO03639__GPCmut8 (opt1)
aggagaguccgcucagccagguugcagaagcggcuuagcguguguccuaaucuucucucugcguguagguaggccugugccgcaaacaagcuuaccaugggccagaucaucaccuucuuccaggaggugccccacgucaucgaggaggugaugaacaucgugcugaucgcccucagccugcuggccauccucaaggggaucuacaacgucgcgaccugcggccuguucgggcugguguccuuccuccugcugugcggccgcagcugcuccacgaccuacaaggggguguacgagcuccagacccuggagcuggacauggccaaccucaacaugugcaugccgcugagcugcaccaagaacaacucccaccacuacaucauggucggcaacgagacgggccuggagcucacccugaccaacaccagcaucaucaaccacaaguucugcaaccuguccgacgcccacaagaagaaccucuacgaccacgcccugaugagcaucaucuccacguuccaccugagcauccccaacuucaaccaguacgaggccauguccugcgacuucaacgggggcaagaucagcgugcaguacaaccucucccacaccuacgcgguggacgccgccaaccacugcgggaccaucgccaacggcguccugcagaccuucaugcggauggcguggggcgggagcuacaucgcccuggacuccggcaaggggagcugggacugcaucaugacguccuaccaguaccucgugauccagaacaccaccugggaggaccacugccaguucagccgccccucccccaucggcuaccuggggcugcucagccagcggacccgcgacaucuacaucagccggcgccugcugggcacguucaccuggacccucuccgacagcgagggcaacgagacccccgggggcuacugccugacgcgguggaugcugaucgaggccgagcucaagugcuucgggaacaccgccguggccaagugcaacgagaagcacgacgaggaguucugcgacaugcugcgccuguucgacuucugcaagcaggcgauccggcgccucaagaccccggcccagauguccauccagcugaucaacaaggccgucaacgcccugaucaacgaccagcucaucaugaagaaccaccuccgggacaucaugggcauccccuacugcaacuacagcaaguacugcuaccugaaccacaccgugacggggaagaccucccugccccgcugcugccuggugagcaacggcuccuaccugaacgagacccacuucagcgacgacaucgagcagcaggccgacaacaugaucaccgagcuccugcagaaggaguacaucgaccggcagggcaagacgccgcuggggcuggucgaccucuucguguucuccaccagcuucuaccugaucuccaucuuccugcaccucgugaagauccccacccaccgccacaucaccggcaagcccugccccaagccgcaccggcugaaccacauggggaucugcagcugcggccuguacaagcaccccgggguccccgugaaguggaagcgcugaggacuagucccuguucccagagcccacuuuuuuuucuuuuuuugaaauaaaauagccugucuuucagaucuaaaaaaaaaaaaaaaaaaaaaaaaaaaaaaaaaaaaaaaaaaaaaaaaaaaaaaaaaaaaaaaaaaaaaaaaaaaaaaaaaaaaaaaaaaaaaaaaaaaa

SEQ ID NO: 33968 - RNA, 1740 nt, Artificial Sequence
  mRNA product Design a-2 (A100) comprising derived and/or modified sequence from LASV(Lassa virus/H.sapiens-wt/NGA/2016/ISTH_0009;Clade II)__AVO03571__GPCmut8 (opt1)
aggagaguccgcucagccagguugcagaagcggcuuagcguguguccuaaucuucucucugcguguagguaggccugugccgcaaacaagcuuaccaugggccagaucaucaccuucuuccaggaggugccccacgucaucgaggaggugaugaacaucgugcugaucgcccucagccugcuggccauccucaaggggaucuacaacgucgcgaccugcggccugcuggggcucguguccuuccugcugcucugcggccgcagcugcuccacgaccuacaaggggguguacgagcugcagacccuggagcucgacauggccagccugaacaugugcaugccgcuguccugcaccaagaacaacagccaccacuacaucauggucggcaacgagacgggccucgagcugacccugaccaacaccuccaucaucaaccacaaguucugcaaccucagcgacgcccacaagaagaaccuguacgaccacgcccugauguccaucaucagcacguuccaccucuccauccccaacuucaaccaguacgaggccaugagcugcgacuucaacgggggccggaucuccgugcaguacaaccugagccacuccuacgcgguggacgccgccaaccacugcgggaccaucgccaacggcguccugcagaccuucaugcgcauggcguggggcgggagcuacaucgcccucgacuccggcaaggggagcugggacugcaucaugaccuccuaccaguaccugaucauccagaacacgaccugggaggaccacugccaguucagccggcccagccccaucggcuaccuggggcuccugucccagcgcacccgggacaucuacaucagccgccggcugcucggcaccuucacguggacccuguccgacagcgagggcaacgagacccccgggggcuacugccugacccgcuggaugcucaucgaggccgagcugaagugcuucgggaacacggccguggccaagugcaacgagaagcacgacgaggaguucugcgacaugcugcggcuguucgacuucugcaagcaggcgauccgccggcugaagaccccggcccagauguccauccagcugaucaacaaggccgugaacgcccucaucaacgaccagcugaucaugaagaaccaccuccgcgacaucaugggcauccccuacugcaacuacagcaaguacugcuaccucaaccacaccgucaccgggaagacgucccugccccggugcugccuggugagcaacggcuccuaccucaacgagacccacuucagcgacgacaucgagcagcaggccgacaacaugaucaccgagcugcugcagaaggaguacaucgaccgccagggcaagaccccgcuggggcucguggaccuguucgucuucuccacgagcuucuaccugaucuccaucuuccuccaccuggugaagauccccacccaccggcacaucaccggcaagcccugccccaagccgcaccgccugaaccacauggggaucugcagcugcggccucuacaaccaccccggggugcccgucaaguggaagcggugaggacuagucccuguucccagagcccacuuuuuuuucuuuuuuugaaauaaaauagccugucuuucagaucuaaaaaaaaaaaaaaaaaaaaaaaaaaaaaaaaaaaaaaaaaaaaaaaaaaaaaaaaaaaaaaaaaaaaaaaaaaaaaaaaaaaaaaaaaaaaaaaaaaaa

SEQ ID NO: 33969 - RNA, 1740 nt, Artificial Sequence
  mRNA product Design a-2 (A100) comprising derived and/or modified sequence from LASV(Lassa virus/H.sapiens-wt/NGA/2016/ISTH_0017;Clade II)__AVO03567__GPCmut8 (opt1)
aggagaguccgcucagccagguugcagaagcggcuuagcguguguccuaaucuucucucugcguguagguaggccugugccgcaaacaagcuuaccaugggccagaucaucaccuucuuccaggaggugccccacgucaucgaggaggugaugaacaucgugcugaucgcccucagccugcuggccauccucaaggggaucuacaacgucgcgaccugcggccuguucgggcugguguccuuccuccugcugugcggccgcagcugcuccacgaccuacaaggggguguacgagcuccagacccuggagcuggacauggccagccucaacaugugcaugccgcuguccugcaccaagaacaacagccaccacuacaucauggucggcaacgagacgggccuggagcucacccugaccaacaccuccaucaucaaccacaaguucugcaaccugagcgacgcccacaagaagaaccucuacgaccacgcccugauguccaucaucagcacguuccaccuguccauccccaacuucaaccaguacgaggccaugagcugcgacuucaacgggggcaagaucuccgugcaguacaaccucagccacaccuacgcgaucgacgccgccaaccacugcgggaccaucgccaacggcgugcugcagaccuucaugcggauggcguggggcggguccuacaucgcccuggacagcggcaagggguccugggacugcaucaugacgagcuaccaguaccucaucauccagaacaccaccugggaggaccacugccaguucucccgccccagccccaucggcuaccuggggcugcucagccagcggacccgcgacaucuacaucucccggcgccugcugggcacguucaccuggacccucagcgacuccgagggcaacgagacccccgggggcuacugccugacgcgguggaugcugaucgaggccgagcucaagugcuucgggaacaccgccgucgccaagugcaacgagaagcacgacgaggaguucugcgacaugcugcgccuguucgacuucugcaagcaggcgauccggcgccucaagaccccggcccagaugagcauccagcugaucaacaaggccgugaacgcccugaucaacgaccagcucaucaugaagaaccaccuccgggacaucaugggcauccccuacugcaacuacuccaaguacugcuaccugaaccacaccgugacggggaagaccagccugccccgcugcugccuggucuccaacggcagcuaccugaacgagacccacuucuccgacgacaucgagcagcaggccgacaacaugaucaccgagcuccugcagaaggaguacauggaccggcagggcaagacgccgcuggggcugguggaccucuucguguucagcaccuccuucuaccugaucagcaucuuccugcaccucguccgcauccccacccaccggcacgugaucggcaagcccugccccaagccgcaccgccugaaccacauggggaucugcuccugcggccuguacaagcaccccggggugcccgucaaguggaagcggugaggacuagucccuguucccagagcccacuuuuuuuucuuuuuuugaaauaaaauagccugucuuucagaucuaaaaaaaaaaaaaaaaaaaaaaaaaaaaaaaaaaaaaaaaaaaaaaaaaaaaaaaaaaaaaaaaaaaaaaaaaaaaaaaaaaaaaaaaaaaaaaaaaaaa

SEQ ID NO: 33970 - RNA, 1740 nt, Artificial Sequence
  mRNA product Design a-2 (A100) comprising derived and/or modified sequence from LASV(Lassa virus/H.sapiens-wt/NGA/2018/ISTH_0959;Clade II)__AVV65099__GPCmut8 (opt1)
aggagaguccgcucagccagguugcagaagcggcuuagcguguguccuaaucuucucucugcguguagguaggccugugccgcaaacaagcuuaccaugggccagaucaucaccuucuuccaggaggugccccacgucaucgaggaggugaugaacaucgugcugaucgcccucagccugcuggccauccucaaggggaucuacaacgucgugaccugcggccuguucgggcugguguccuuccuccugcugugcggccgcagcugcuccacgaccuacaagggggucuacgagcuccagacccuggagcuggacauggcgagccucaacaugugcaugccgcuguccugcaccaagaacaacagccaccacuacaucauggugggcaacgagacgggccuggagcucacccugaccaacaccuccaucaucaaccacaaguucugcaaccugagcgacgcccacaagaagaaccucuacgaccacgcccugauguccaucaucagcacguuccaccuguccauccccaacuucaaccaguacgaggccaugagcugcgacuucaacgggggcaagaucuccgugcaguacaaccucagccacgccuacgcgaucgacgccgccaaccacugcgggaccaucgccaacggcguccugcagaccuucaugcggauggcguggggcggguccuacaucgcccuggacagcggcaagggguccugggacugcaucaugaccagcuaccaguaccucaucauccagaacacgaccugggaggaccacugccaguucucccgccccagccccaucggcuaccuggggcugcucagccagcggacccgcgacaucuacaucucccggcgccugcugggcaccuucacguggacccucagcgacuccgagggcaacgagacccccgggggcuacugccugacccgguggaugcugaucgaggccgagcucaagugcuucgggaacacggccguggccaagugcaacgagaagcacgacgaggaguucugcgacaugcugcgccuguucgacuucugcaagcaggcgauccggcgccucaagaccccggcccagaugagcauccagcugaucaacaaggccgugaacgcccugaucaacgaccagcucaucaugaagaaccaccuccgggacaucaugggcauccccuacugcaacuacuccaaguacugcuaccugaaccacaccgucaccgggaagacgagccugccccgcugcugccugguguccaacggcagcuaccugaacgagacccacuucuccgacgacaucgagcagcaggccgacaacaugaucaccgagcuccugcagaaggaguacaucgaccggcagggcaagaccccgcuggggcugguggaccucuucgucuucagcacguccuucuaccugaucagcaucuuccugcaccucgugaagauccccacccaccgccacgugaucggcaagcccugccccaagccgcaccggcugaaccacauggggaucugcuccugcggccuguacaagcaccccgggguccccgugaaguggaagcgcugaggacuagucccuguucccagagcccacuuuuuuuucuuuuuuugaaauaaaauagccugucuuucagaucuaaaaaaaaaaaaaaaaaaaaaaaaaaaaaaaaaaaaaaaaaaaaaaaaaaaaaaaaaaaaaaaaaaaaaaaaaaaaaaaaaaaaaaaaaaaaaaaaaaaa

SEQ ID NO: 33971 - RNA, 1740 nt, Artificial Sequence
  mRNA product Design a-2 (A100) comprising derived and/or modified sequence from LASV(LASV003-NIG-2008;Clade II)__AIT17580__GPCmut8 (opt1)
aggagaguccgcucagccagguugcagaagcggcuuagcguguguccuaaucuucucucugcguguagguaggccugugccgcaaacaagcuuaccaugggccagaucaucaccuucuuccaggaggugccccacgucaucgaggaggugaugaacaucgugcugaucgcccucagccugcuggccauccucaaggggaucuacaacgucgcgaccugcggccuguucgggcugguguccuuccuccugcugugcggccgcagcugcuccacgaccuacaaggggguguacgagcuccagacccuggagcuggacauggccagccucaacaugugcaugccgcuguccugcaccaagaacaacagccaccacuacaucauggucggcaacgagacgggccuggagcucacccugaccaacaccuccaucaucaaccacaaguucugcaaccugagcgacgcccacaagaagaaccucuacgaccacgcccugauguccaucaucagcacguuccaccuguccauccccaacuucaaccaguacgaggccaugagcugcgacuucaacgggggcaagaucuccgugcaguacaaccucagccacaccuacgcgguggacgccgccaaccacugcgggaccaucgccaacggcguccugcagaccuucaugcggauggcguggggcggguccuacaucgcccuggacagcggcaagggguccugggacugcaucaugacgagcuaccaguaccucaucauccagaacaccaccugggaggaccacugccaguucucccgccccagccccaucggcuaccuggggcugcucagccagcggacccgcgacaucuacaucucccggcgccugcugggcacguucaccuggacccucagcgacuccgagagcaacgagaccccgggcggguacugccugacgcgguggaugcugaucgaggccgagcucaagugcuucggcaacaccgccguggccaagugcaacgagaagcacgacgaggaguucugcgacaugcugcgccuguucgacuucugcaagcaggcgauccggcgccucaaggcccccgcccagauguccauccagcugaucaacaaggccgugaacgcccugaucaacgaccagcucaucaugaagaaccaccuccgggacaucauggggauccccuacugcaacuacagcaaguacugcuaccugaaccacaccgucaccggccgcacgucccugccccggugcugccuggugagcaacggguccuaccugaacgagacccacuucagcgacgacaucgagcagcaggcggacaacaugaucaccgagcuccugcagaaggaguacauggaccgccagggcaagaccccgcugggccugguggaccucuucgucuucuccacgagcuucuaccugaucuccaucuuccugcaccucgugaagauccccacccaccggcacgugaucgggaagcccugccccaagccgcaccgccugaaccacaugggcaucugcagcugcgggcuguacaagcaccccggcguccccgugaaguggaagcggugaggacuagucccuguucccagagcccacuuuuuuuucuuuuuuugaaauaaaauagccugucuuucagaucuaaaaaaaaaaaaaaaaaaaaaaaaaaaaaaaaaaaaaaaaaaaaaaaaaaaaaaaaaaaaaaaaaaaaaaaaaaaaaaaaaaaaaaaaaaaaaaaaaaaa

SEQ ID NO: 33972 - RNA, 1740 nt, Artificial Sequence
  mRNA product Design a-2 (A100) comprising derived and/or modified sequence from LASV(LASV035-NIG-2009;Clade II)__AIT17588__GPCmut8 (opt1)
aggagaguccgcucagccagguugcagaagcggcuuagcguguguccuaaucuucucucugcguguagguaggccugugccgcaaacaagcuuaccaugggccagaucaucaccuucuuccaggaggugccccacgucaucgaggaggugaugaacaucgugcugaucgcccucagccugcuggccauccucaaggggaucuacaacgucgcgaccugcggccuguucgggcugguguccuuccuccugcugugcggccgcagcugcuccacgaccuacaaggggguguacgagcuccagacccuggagcuggacauggccagccucaacaugugcaugccgcuguccugcaccaagaacaacagccaccacuacaucauggucggcaacgagacgggccuggagcucacccugaccaacaccuccaucaucaaccacaaguucugcaaccugagcgacgcccacaagaagaaccucuacgaccacgcccugauguccaucaucagcacguuccaccuguccauccccaacuucaaccaguacgaggccaugagcugcgacuucaacgggggcaagaucuccgugcaguacaaccucagccacgcguacgccguggacgccgccaaccacugcgggaccaucgcgaacggcguccugcagaccuucaugcggauggccuggggcggguccuacaucgcccuggacagcggcaagggguccugggacugcaucaugaccagcuaccaguaccucaucauccagaacacgaccugggaggaccacugccaguucucccgccccagccccaucggcuaccuggggcugcucagccagcggacccgcgacaucuacaucucccggcgccugcugggcaccuucacguggacccucagcgacuccgagggcaacgagacccccgggggcuacugccugacccgguggaugcugaucgaggccgagcucaagugcuucgggaacacggccguggcgaagugcaacgagaagcacgacgaggaguucugcgacaugcugcgccuguucgacuucugcaagcaggccauccggcgccucaaggccccggcccagaugagcauccagcugaucaacaaggccgugaacgcgcugaucaacgaccagcucaucaugaagaaccaccuccgggacaucaugggcauccccuacugcaacuacuccaaguacugcuaccugaaccacaccgucaccgggaagaccagccugccccgcugcugccugguguccaacggcagcuaccugaacgagacgcacuucuccgacgacaucgagcagcaggccgacaacaugaucaccgagcuccugcagaaggaguacaucgaccggcagggcaagaccccgcuggggcugguggaccucuucgucuucagcaccuccuucuaccugaucagcaucuuccugcaccucgugaagauccccacgcaccgccacgugaucggcaagcccugccccaagccgcaccggcugaaccacauggggaucugcuccugcggccuguacaagcaccccgggguccccgugaaguggaagcgcugaggacuagucccuguucccagagcccacuuuuuuuucuuuuuuugaaauaaaauagccugucuuucagaucuaaaaaaaaaaaaaaaaaaaaaaaaaaaaaaaaaaaaaaaaaaaaaaaaaaaaaaaaaaaaaaaaaaaaaaaaaaaaaaaaaaaaaaaaaaaaaaaaaaaa

SEQ ID NO: 33973 - RNA, 1740 nt, Artificial Sequence
  mRNA product Design a-2 (A100) comprising derived and/or modified sequence from LASV(LASV1000-NIG-2009;Clade II)__AIT17782__GPCmut8 (opt1)
aggagaguccgcucagccagguugcagaagcggcuuagcguguguccuaaucuucucucugcguguagguaggccugugccgcaaacaagcuuaccaugggccagaucaucaccuucuuccaggaggugccccacgucaucgaggaggugaugaacaucgugcugaucgcccucagccugcuggccauccucaaggggaucuacaacgucgcgaccugcggccuguucgggcugguguccuuccuccugcugugcggccgcagcugcuccacgaccuacaaggggguguacgagcuccagacccuggagcuggacauggccagccucaacaugugcaugccgcuguccugcaccaagaacaacagccaccacuacaucauggucggcaacgagacgggccuggagcucacccugaccaacaccuccaucaucaaccacaaguucugcaaccugagcgacgcccacaagaagaaccucuacgaccacgcccugauguccaucaucagcacguuccaccuguccauccccaacuucaaccaguacgaggccaugagcugcgacuucaacgggggcaagaucuccgugcaguacaaccucagccacaccuacgcgguggacgccgccaaccacugcgggaccaucgccaacggcguccugcagaccuucaugcggauggcguggggcggguccuacaucgcccuggacagcggcaagggguccugggacugcaucaugacgagcuaccaguaccucaucauccagaacaccaccugggaggaccacugccaguucucccgccccagccccaucggcuaccuggggcugcucagccagcggacccgcgacaucuacaucucccggcgccugcugggcacguucaccuggacccucagcgacuccgagggcaacgagacccccgggggcuacugccugacgcgguggaugcugaucgaggccgagcucaagugcuucgggaacaccgccguggccaagugcaacgagaagcacgacgaggaguucugcgacaugcugcgccuguucgacuucugcaagcaggcgaucaagcggcucaagaccccggcccagaugagcauccagcugaucaacaaggccgugaacgcccugaucaacgaccagcucaucaugaagaaccaccuccgcgacaucaugggcauccccuacugcaacuacuccaaguacugcuaccugaaccacaccgucacggggaagaccagccugccccggugcugccugguguccaacggcagcuaccugaacgagacccacuucuccgacgacaucgagcagcaggccgacaacaugaucaccgagcuccugcagaaggaguacaucgaccgccagggcaagacgccgcuggggcugguggaccucuucgucuucagcaccuccuucuaccugaucagcaucuuccugcaccucgugaagauccccacccaccggcacguggucggcaagcccugccccaagccgcaccgccugaaccacauggggaucugcuccugcggccuguacaagcaccccggggugcccgugaaguggaagcggugaggacuagucccuguucccagagcccacuuuuuuuucuuuuuuugaaauaaaauagccugucuuucagaucuaaaaaaaaaaaaaaaaaaaaaaaaaaaaaaaaaaaaaaaaaaaaaaaaaaaaaaaaaaaaaaaaaaaaaaaaaaaaaaaaaaaaaaaaaaaaaaaaaaaa

SEQ ID NO: 33974 - RNA, 1740 nt, Artificial Sequence
  mRNA product Design a-2 (A100) comprising derived and/or modified sequence from LASV(LASV221-NIG-2010;Clade II)__AIT17624__GPCmut8 (opt1)
aggagaguccgcucagccagguugcagaagcggcuuagcguguguccuaaucuucucucugcguguagguaggccugugccgcaaacaagcuuaccaugggccagaucaucaccuucuuccaggaggugccccacgucaucgaggaggugaugaacaucgugcugaucgcccucagccugcuggccauccucaaggggaucuacaacgucgcgaccugcggccuguucgggcugguguccuuccuccugcugugcggccgcagcugcuccacgaccuacaaggggguguacgagcuccagacccuggagcuggacauggccagccucaacaugugcaugccgcuguccugcaccaagaacaacagccaccacuacaucauggucggcaacgagacgggccuggagcucacccugaccaacaccuccaucaucaaccacaaguucugcaaccugagcgacgcccacaagaagaaccucuacgaccacgcccugauguccaucaucagcacguuccaccuguccauccccaacuucaaccaguacgaggccaugagcugcgacuucaacgggggcaagaucuccgugcaguacaaccucagccacaccuacgcgaucgacgccgccaaccacugcgggaccaucgccaacggcgugcugcagaccuucaugcggauggcguggggcggguccuacaucgcccuggacagcggcaagggguccugggacugcaucaugacgagcuaccaguaccucaucauccagaacaccaccugggaggaccacugccaguucucccgccccagccccaucggcuaccuggggcugcucagccagcggacccgcgacaucuacaucucccggcgccugcugggcacguucaccuggacccucagcgacuccgagggcaacgagacccccgggggcuacugccugacgcgguggaugcugaucgaggccgagcucaagugcuucgggaacaccgccgucgccaagugcaacgagaagcacgacgaggaguucugcgacaugcugcgccuguucgacuucugcaagcaggcgauccggcgccucaagaccccggcccagaugagcauccagcugaucaacaaggccgugaacgcccugaucaacgaccagcucaucaugaagaaccaccuccgggacaucaugggcauccccuacugcaacuacuccaaguacugcuaccugaaccacaccgugacggggaagaccagccugccccgcugcugccuggucuccaacggcagcuaccugaacgagacccacuucuccgacgacaucgagcagcaggccgacaacaugaucaccgagaugcuccagaaggaguacauggaccggcagggcaagacgccgcuggggcugguggaccuguucguguucagcaccuccuucuaccucaucagcaucuuccugcaccuggucaagauccccacccaccgccacgugaucggcaagcccugccccaagccgcaccggcucaaccacauggggaucugcuccugcggccuguacaagcaccccggggugcccgucaaguggaagcgcugaggacuagucccuguucccagagcccacuuuuuuuucuuuuuuugaaauaaaauagccugucuuucagaucuaaaaaaaaaaaaaaaaaaaaaaaaaaaaaaaaaaaaaaaaaaaaaaaaaaaaaaaaaaaaaaaaaaaaaaaaaaaaaaaaaaaaaaaaaaaaaaaaaaaa

SEQ ID NO: 33975 - RNA, 1740 nt, Artificial Sequence
  mRNA product Design a-2 (A100) comprising derived and/or modified sequence from LASV(LASV237-NIG-2010;Clade II)__AIT17638__GPCmut8 (opt1)
aggagaguccgcucagccagguugcagaagcggcuuagcguguguccuaaucuucucucugcguguagguaggccugugccgcaaacaagcuuaccaugggccagaucaucaccuucuuccaggaggugccccacgucaucgaggaggugaugaacaucgugcugaucgcccucagccugcuggccauccucaaggggaucuacaacgucgcgaccugcggccuguucgggcugguguccuuccuccugcugugcggccgcagcugcuccacgaccuacaaggggguguacgagcuccagacccuggagcuggacauggccagccucaacaugugcaugccgcuguccugcaccaagaacaacagccaccacuacaucauggucggcaacgagacgggccuggagcucacccugaccaacaccuccaucaucaaccacaaguucugcaaccugagcgacgcccacaagaaggaccucuacgaccacgcccugauguccaucaucagcacguuccaccuguccauccccaacuucaaccaguacgaggccaugagcugcgacuucaacgggggcaagaucuccgugcaguacaaccucagccacaccuacgcgguggacgccgccaaccacugcgggaccaucgccaacggcguccugcagaccuucaugcggauggcguggggcggguccuacaucgcccuggacagcggcaagggguccugggacugcaucaugacgagcuaccaguaccucaucauccagaacaccaccugggaggaccacugccaguucucccgccccagccccaucggcuaccuggggcugcucagccagcggacccgcgacaucuacaucucccggcgccugcugggcacguucaccuggacccucagcgacuccgagggcaacgagacccccgggggcuacugccugacgcgguggaugcugaucgaggccgagcucaagugcuucgggaacaccgccguggccaagugcaacgagaagcacgacgaggaguucugcgacaugcugcgccuguucgacuucugcaagcaggcgauccggcgccucaagaccccggcccagaugagcauccagcugaucaacaaggccgugaacgcccugaucaacgaccagcucaucaugaagaaccaccuccgggacaucaugggcauccccuacugcaacuacuccaaguacugcuaccugaaccacaccgucacggggaagaccagccugccccgcugcugccugguguccaacggcagcuaccugaacgagacccacuucuccgacgacaucgagcagcaggccgacaacaugaucaccgagcuccugcagaaggaguacauggaccggcagggcaagacgccgcuggggcugguggaccucuucgucuucagcaccuccuucuaccugaucagcaucuuccugcaccucaucaagauccccacccaccgccacaucaccggcaagcccugccccaagccgcaccggcugaaccacauggggaucugcuccugcggccuguacaagcaccccggggugcccgugaaguggaagcgcugaggacuagucccuguucccagagcccacuuuuuuuucuuuuuuugaaauaaaauagccugucuuucagaucuaaaaaaaaaaaaaaaaaaaaaaaaaaaaaaaaaaaaaaaaaaaaaaaaaaaaaaaaaaaaaaaaaaaaaaaaaaaaaaaaaaaaaaaaaaaaaaaaaaaa

SEQ ID NO: 33976 - RNA, 1740 nt, Artificial Sequence
  mRNA product Design a-2 (A100) comprising derived and/or modified sequence from LASV(LASV253-NIG-2011;Clade II)__AIT17670__GPCmut8 (opt1)
aggagaguccgcucagccagguugcagaagcggcuuagcguguguccuaaucuucucucugcguguagguaggccugugccgcaaacaagcuuaccaugggccagaucaucaccuucuuccaggaggugccccacgucaucgaggaggugaugaacaucgugcugaucgcccucagccugcuggccauccucaaggggaucuacaacgucgcgaccugcggccuguucgggcugguguccuuccuccugcugugcggccgcagcugcuccacgaccuacaaggggguguacgagcuccagacccuggagcuggacauggccagccucaacaugugcaugccgcuguccugcaccaagaacaacagccaccacuacaucauggucggcaacgagacgggccuggagcucacccugaccaacaccuccaucaucaaccacaaguucugcaaccugagcgacgcccacaagaagaaccucuacgaccacgcccugauguccaucaucagcacguuccaccuguccauccccaacuucaaccaguacgaggccaugagcugcgacuucaacgggggcaagaucuccgugcaguacaaccucagccacaccuacgcgguggacgccgccaaccacugcgggaccaucgccaacggcguccugcagaccuucaugcggauggcguggggcggguccuacaucgcccuggacagcggcaagggguccugggacugcaucaugacgagcuaccaguaccucaucauccagaacaccaccugggaggaccacugccaguucucccgccccagccccaucggcuaccuggggcugcucagccagcggacccgcgacaucuacaucucccggcgccugcugggcacguucaccuggacccucagcgacuccgagggcaacgagacccccgggggcuacugccugacgcgguggaugcugaucgaggccgagcucaagugcuucgggaacaccgccguggccaagugcaacgagaagcacgacgaggaguucugcgacaugcugcgccuguucgacuucugcaagcaggcgauccggcgccucaaggccccggcccagaugagcauccagcugaucaacaaggccgugaacgcccugaucaacgaccagcucaucaugaagaaccaccuccgggacaucaugggcauccccuacugcaacuacuccaaguacugcuaccugaaccacaccgucaccgggcgcacgagccugccccggugcugccugguguccaacggcagcuaccugaacgagacccacuucuccgacgacaucgagcagcaggcggacaacaugaucaccgagcuccugcagaaggaguacaucgaccgccagggcaagaccccgcuggggcugguggaccucuucgucuucagcacguccuucuaccugaucagcaucuuccugcaccucgugaagauccccacccaccggcacaucaucggcaagcccugccccaagccgcaccgccugaaccacauggggaucugcuccugcggccuguacaagcaccccggggugcccgucaaguggaagcggugaggacuagucccuguucccagagcccacuuuuuuuucuuuuuuugaaauaaaauagccugucuuucagaucuaaaaaaaaaaaaaaaaaaaaaaaaaaaaaaaaaaaaaaaaaaaaaaaaaaaaaaaaaaaaaaaaaaaaaaaaaaaaaaaaaaaaaaaaaaaaaaaaaaaa

SEQ ID NO: 33977 - RNA, 1740 nt, Artificial Sequence
  mRNA product Design a-2 (A100) comprising derived and/or modified sequence from LASV(LASV254-NIG-2011;Clade II)__AIT17674__GPCmut8 (opt1)
aggagaguccgcucagccagguugcagaagcggcuuagcguguguccuaaucuucucucugcguguagguaggccugugccgcaaacaagcuuaccaugggccagaucaucaccuucuuccaggaggugccccacgucaucgaggaggugaugaacaucgugcugaucgcccucagccugcuggccauccucaaggggaucuacaacgucgcgaccugcggccuguucgggcugguguccuuccuccugcugugcggccgcagcugcuccacgaccuacaaggggguguacgagcuccagacccuggagcuggacaugaccaaccucaacaugugcaugccgcugagcugcacgaagaacaacucccaccacuacaucauggucggcaacgagaccggccuggagcucacccugaccaacacgagcaucaucaaccacaaguucugcaaccuguccgacgcccacaagaagaaccucuacaaccacgcccugaugagcaucaucuccaccuuccaccugagcauccccaacuucaaccaguacgaggccauguccugcgacuucaacgggggcaagaucagcgugcaguacaaccucucccacagcuacgccguggacgcggccaaccacugcgggaccaucgccaacggcguccugcagaccuucaugcggauggccuggggcggguccuacaucgcgcuggacagcggcaaggggaacugggacugcaucaugacguccuaccaguaccucaucauccagaacaccaccugggaggaccacugccaguucagccgccccucccccaucggcuaccuggggcugcucagccagcggacccgcgacaucuacaucagccggcgccugcugggcacguucaccuggacccucuccgacagcgagggcaacgagacccccgggggcuacugccugacgcgguggaugcugaucgaggccgagcucaagugcuucgggaacaccgccguggccaagugcaacgagaagcacgacgaggaguucugcgacaugcugcgccuguucgacuucugcaagcaggccauccggcgccucaagaccccggcgcaggccaacauccagcugaucaacaaggccgugaacgcccugaucaacgaccagcucaucaugaagaaccaccuccgggacaucaugggcauccccuacugcaacuacuccaaguacugcuaccugaaccacaccgucacggggaagaccagccugccccgcugcugccugguguccaacggcagcuaccugaacgagacccacuucuccgacgacaucgagcagcaggccgacaacaugaucaccgagcuccugcagaaggaguacauggaccggcagggcaagacgccgcuggggcugguggaccucuucgucuucagcaccuccuucuaccugaucagcaucuuccugcaccucgugaagauccccacccaccgccacgugaucggcaagcccugccccaagccgcaccggcugaaccacauggggaucugcuccugcggccuguacaagcaccccgggguccccgugaaguggaagcgcugaggacuagucccuguucccagagcccacuuuuuuuucuuuuuuugaaauaaaauagccugucuuucagaucuaaaaaaaaaaaaaaaaaaaaaaaaaaaaaaaaaaaaaaaaaaaaaaaaaaaaaaaaaaaaaaaaaaaaaaaaaaaaaaaaaaaaaaaaaaaaaaaaaaaa

SEQ ID NO: 33978 - RNA, 1740 nt, Artificial Sequence
  mRNA product Design a-2 (A100) comprising derived and/or modified sequence from LASV(Nig08-A19;Clade III)__ADU56618__GPCmut8 (opt1)
aggagaguccgcucagccagguugcagaagcggcuuagcguguguccuaaucuucucucugcguguagguaggccugugccgcaaacaagcuuaccaugggccagaucgugaccuucuuccaggaggucccccacgugaucgaggaggugaugaacaucguccugaucgcccucagcauccuggccauccugaaggggcucuacaacaucgcgaccugcggccugaucgggcuggugacguuccuccugcuguccggccgcagcugcuccaugaccuacaaggggguguacgagcuccagacccuggagcugaacaugaacacccucaacaugugcaugccgcugagcugcacgaagaacaacucccaccacuacaucauggucggcaacgagaccggccuggagcucacccugaccaacacgagccugcuccaccacaaguucugcaaccuguccgacgcccacaagaagaaccuguacgaccacacccucaugagcaucaucuccaccuuccaccugagcauccccaacuucaaccaguacgaggccauguccugcgacuucaacgggggcaagaucaccgugcaguacaaccugagccacuccuacgccaucgacgccgcgaaccacugcgggacgguggccaacggcguccuccagaccuucaugcggauggccuggggcgggagcuacaucgcccuggacuccggccgcgggaagugggacugcaucaugaccagcuaccaguaccugaucauccagaacaccacgugggaggaccacugccaguucucccggcccagccccaucggcuaccucgggcugcugucccagcgcacccgggacaucuacaucagccgccggcuccugggcaccuucaccuggacgcugagcgacuccgagggcaacgagacccccgggggcuacugccucacccgcuggaugcugaucgaggcggagcugaagugcuucgggaacaccgccguggccaagugcaacgagaagcacgacgaggaguucugcgacaugcuccggcuguucgacuucugcaagcaggccauccgccggcugaaggccccggcgcagaugagcauccagcucaucaacaaggccgugaacgcccugaucaacgaccagcugaucaugaagaaccaccuccgcgacaucaugggcauccccuacugcaacuacuccaaguacugcuaccugaaccacacgagcaccgggcggaccucccugccccgcugcugccucgucagcaacggcuccuaccugaacgagacccacuucagcgacgacaucgagcagcaggccgacaacaugaucacggagaugcugcagaaggaguaccuggaccggcagggcaagaccccgcucgggcugguggaccuguucguguucuccaccagcuucuaccucaucuccaucuuccugcaccuggucaagauccccacccaccgccacaucgugggcaagcccugccccaagccgcaccggcucaaccacauggggaucugcagcugcggccuguacaagcagcccggggugcccguccgcuggaagcggugaggacuagucccuguucccagagcccacuuuuuuuucuuuuuuugaaauaaaauagccugucuuucagaucuaaaaaaaaaaaaaaaaaaaaaaaaaaaaaaaaaaaaaaaaaaaaaaaaaaaaaaaaaaaaaaaaaaaaaaaaaaaaaaaaaaaaaaaaaaaaaaaaaaaa

SEQ ID NO: 33979 - RNA, 1743 nt, Artificial Sequence
  mRNA product Design a-2 (A100) comprising derived and/or modified sequence from LASV(G1180-SLE-2010;Clade IV)__AIT17168__GPCmut8 (opt1)
aggagaguccgcucagccagguugcagaagcggcuuagcguguguccuaaucuucucucugcguguagguaggccugugccgcaaacaagcuuaccaugggccagaucgugaccuucuuccaggaggucccccacgugaucgaggaggugaugaacaucguccugaucgcccucagcauccuggccgugcugaaggggcucuacaacuucgcgaccugcggccugguggggcugcucacguuccugcugcucugcggccgcuccugcaccgccagccgguacaagggggucuacgagcugcagacccuggagcucaacauggagacccugaacaugugcaugccgcuguccugcacgaagaacaacagccaccacuacaucauggugggcaacgagaccggccucgagcugacccugaccaacacguccaucaucaaccacaaguucugcaaccucagcgacgcccacaagaagaaccuguacgaccacgcccugauguccaucaucagcaccuuccaccucuccauccccaacuucaaccaguacgaggccaugagcugcgacuucaacgggggcaagaucuccgugcaguacaaccugagccacuccuacgcgggggacgccgccaaccacugcggcaccgucgccaacggggugcugcagaccuucaugcgcauggcguggggcggcagcuacaucgcccucgacuccgggcacggcagcugggacugcaucaugacguccuaccaguaccugaucauccagaacaccaccugggaggaccacugccaguucagccggcccucccccaucggguaccugggccuccugagccagcgcacccgggacaucuacaucagccgccggcugcucggcacguucaccuggacccuguccgacagcgaggggaaggacaccccgggcggguacugccugacgcgcuggaugcucaucgaggccgagcugaagugcuucggcaacaccgccguggccaagugcaacgagaagcacgacgaggaguucugcgacaugcugcggcuguucgacuucugcaagcaggcgauccagcgccugaaggcccccgcccagauguccauccagcugaucaacaaggccgucaacgcccucaucaacgaccagcugaucaugaagaaccaccuccgggacaucauggggauccccuacugcaacuacagcaaguacugcuaccucaaccacaccaccacgggcaagaccucccugcccaagugcugccuggugagcaacggcuccuaccucaacgagacccacuucagcgacgacaucgagcagcaggcggacaacaugaucaccgagaugcugcagaaggaguacauggagcgccaggggaagacgccgcugggccugguggaccucuucgucuucuccaccagcuucuaccugaucuccaucuuccugcaccucgugaagauccccacccaccggcacaucgugggcaagagcugccccaagccccaccgccugaaccacauggggaucugcuccugcgggcuguacaagcagccgggcguccccgugaaguggaagcggugaggacuagucccuguucccagagcccacuuuuuuuucuuuuuuugaaauaaaauagccugucuuucagaucuaaaaaaaaaaaaaaaaaaaaaaaaaaaaaaaaaaaaaaaaaaaaaaaaaaaaaaaaaaaaaaaaaaaaaaaaaaaaaaaaaaaaaaaaaaaaaaaaaaaa

SEQ ID NO: 33980 - RNA, 1743 nt, Artificial Sequence
  mRNA product Design a-2 (A100) comprising derived and/or modified sequence from LASV(G1442-SLE-2011;Clade IV)__AIT17180__GPCmut8 (opt1)
aggagaguccgcucagccagguugcagaagcggcuuagcguguguccuaaucuucucucugcguguagguaggccugugccgcaaacaagcuuaccaugggccagaucgugaccuucuuccaggaggucccccacgugaucgaggaggugaugaacaucguccugaucgcccucagcauccuggccgugcugaaggggcucuacaacguggcgaccugcggccugaucgggcuggucacguuccuccugcugugcggccgcuccugcaccaccacccucuacaaggggguguacgagcugcagacgcuggagcucaacauggagacccugaacaugugcaugccgcugagcugcaccaagaacaacucccaccacuacauccgggugggcaacgagaccggccucgagcugacgcugaccaacaccagcaucaucaaccacaaguucugcaaccucuccgacgcccacaagaagaaccuguacgaccacgcccugaugagcaucaucuccaccuuccaccucagcauccccaacuucaaccaguacgaggccauguccugcgacuucaacgggggcaagaucagcguccaguacaaccugucccacagcuacgccggggacgcggccaaccacugcggcacgguggccaacggggugcugcagaccuucaugcgcauggccuggggcggcuccuacaucgcgcucgacagcgggcggggcaacugggacugcaucaugaccuccuaccaguaccugaucauccagaacaccacgugggacgaccacugccaguucagccgccccucccccaucggguaccugggccuccugagccagcggacccgcgacgucuacaucucccggcgccugcucggcaccuucaccuggacgcugagcgacagcgaggggaaggacaccccgggcggguacugccugacccgguggaugcucaucgaggccgagcugaagugcuucggcaacaccgccguggccaagugcaacgagaagcacgacgaggaguucugcgacaugcugcgccucuucgacuucugcaagcaggccauccagcggcugaaggcgcccgcccagauguccauccagcugaucaacaaggccgugaacgcccucaucaacgaccagcugaucaugaagaaccaccuccgcgacaucauggggauccccuacugcaacuacagcaaguacugcuaccugaacaacacggccaccggcaagaccucccugcccaagugcugccugaucagcaacggcuccuaccucaacgagacccacuucagcgacgacaucgagcaggaggcggacaacaugaucacggagaugcugcagaaggaguacauggagcggcaggggaagaccccgcugggccuggucgaccucuucguguucuccaccagcuucuaccugaucuccaucuuccugcaccucgugaagauccccacccaccgccacaucgucggcaagagcugccccaagccccaccggcugaaccacauggggaucugcuccugcgggcuguacaagcagccgggcgugcccgugcgcuggaagcggugaggacuagucccuguucccagagcccacuuuuuuuucuuuuuuugaaauaaaauagccugucuuucagaucuaaaaaaaaaaaaaaaaaaaaaaaaaaaaaaaaaaaaaaaaaaaaaaaaaaaaaaaaaaaaaaaaaaaaaaaaaaaaaaaaaaaaaaaaaaaaaaaaaaaa

SEQ ID NO: 33981 - RNA, 1743 nt, Artificial Sequence
  mRNA product Design a-2 (A100) comprising derived and/or modified sequence from LASV(G3010-SLE-2013;Clade IV)__AIT17344__GPCmut8 (opt1)
aggagaguccgcucagccagguugcagaagcggcuuagcguguguccuaaucuucucucugcguguagguaggccugugccgcaaacaagcuuaccaugggccagaucgugaccuucuuccaggaggucccccacgugaucgaggaggugaugaacaucguccugaucgcccucagcauccuggccgugcugaaggggcucuacaacuucgcgaccugcggccugguggggcuggucacguuccuccugcugugcggccgcuccugcaccaccagccucuacaaggggguguacgagcugcagacccuggagcucaacauggagacgcugaacaugugcaugccgcuguccugcaccaagaacaacagccaccacuacaucauggugggcaacgagaccggccucgagcugacccugacgaacaccuccaucaucaaccacaaguucugcaaccucagcgacgcccacaagaagaaccuguacaaccacgcccugauguccaucaucagcaccuuccaccucuccauccccaacuucaaccaguacgaggccaugagcugcgacuucaacgggggcaagaucuccguccaguacaaccugagccacuccuacgccggggacgcggccagccacugcggcaccguggccaacggggugcugcagacguucaugcggauggccuggggcggcuccuacaucgcgcucgacagcggguacggcaagugggacugcaucaugaccuccuaccaguaccugaucauccagaacaccaccugggaggaccacugccaguucagccgccccucccccaucggguaccugggccuccugagccagcggacgcgcgacaucuacaucagccggcgccugcucggcaccuucaccuggacccuguccgacagcgaggggaaggacacgccgggcggguacugccugacccgguggaugcucaucgaggccgagcugaagugcuucggcaacaccgccgucgccaagugcaacgagaagcacgacgaggaguucugcgacaugcugcgccucuucgacuucugcaagcaggccauccagcggcugaagacccccgcgcagauguccauccagcugaucaacaaggccgugaacgcccucaucaacgaccagcugaucaugaagaaccaccuccgcgacaucauggggauccccuacugcaacuacagcaaguacugcuaccugaaccacacgaccaccggcaagaccucccugcccaagugcugccuggugagcaacggcuccuaccucaacgagacgcacuucagcgacgacaucgagcagcaggccgacaacaugaucaccgagaugcugcagaaggaguacauggagcggcaggggaagaccccgcugggccuggucgaccucuucguguucuccaccagcuucuaccugaucuccaucuuccugcaccucgugaagauccccacgcaccgccacaucgucggcaagagcugccccaagccccaccggcugaaccacauggggaucugcuccugcgggcuguacaagcagccgggcgugcccgugcgcuggaagcggugaggacuagucccuguucccagagcccacuuuuuuuucuuuuuuugaaauaaaauagccugucuuucagaucuaaaaaaaaaaaaaaaaaaaaaaaaaaaaaaaaaaaaaaaaaaaaaaaaaaaaaaaaaaaaaaaaaaaaaaaaaaaaaaaaaaaaaaaaaaaaaaaaaaaa

SEQ ID NO: 33982 - RNA, 1743 nt, Artificial Sequence
  mRNA product Design a-2 (A100) comprising derived and/or modified sequence from LASV(G502-SLE-2009;Clade IV)__AIT17126__GPCmut8 (opt1)
aggagaguccgcucagccagguugcagaagcggcuuagcguguguccuaaucuucucucugcguguagguaggccugugccgcaaacaagcuuaccaugggccagaucgugaccuucuuccaggaggucccccacgugaucgaggaggugaugaacaucguccugaucgcccucagcauccuggccgugcugaaggggcucuacaacuucgcgaccugcggccugguggggcugcucacguuccugcugcucugcggccgcuccugcaccaccgggcuguacaagggcgucuacgagcugcagacccucgagcugaacauggagacgcugaacaugugcaugccgcucagcugcaccaagaacaacucccaccacuacaucauggugggcaacgagaccgggcuggagcugacccucacgaacaccagcaucaucaaccacaaguucugcaaccuguccgacgcccacaagaagaaccuguacgaccacgcccucaugagcaucaucuccaccuuccaccugagcauccccaacuucaaccaguacgaggccauguccugcgacuucaacggcgggaagaucagcgugcaguacaaccugucccacagcuacgccggcgacgcggccgaccacugcgggaccgucgccaacggcgugcuccagacguucaugcggauggccuggggcggguccuacaucgcgcuggacagcggccgcgggcggugggacugcaucaugaccuccuaccaguaccugaucauccagaacaccaccugggaggaccacugccaguucagccgccccucccccaucggcuaccucggccugcugagccagcggacgcgcgacaucuacaucucccggcgccuccuggggaccuucaccuggacccugagcgacagcgagggcaaggacacgcccgggggcuacugccucacccgguggaugcugaucgaggccgagcugaagugcuucgggaacaccgccguggccaagugcaacgagaagcacgacgaggaguucugcgacaugcuccgccuguucgacuucugcaagcaggccauccagcggcugaaggcgccggcccagauguccauccagcucaucaacaaggccgucaacgcccugaucaacgaccagcuggugaugaagaaccaccuccgcgacaucaugggcauccccuacugcaacuacagccgguacugcuaccugaaccacaccacgaccggccgcaccucccugcccaagugcugccucgugagcaacggguccuaccugaacgagacccacuucagcgacgacaucgagcagcaggccgacaacaugaucacggagaugcugcagaaggaguacauggagcggcagggcaagaccccgcuggggcucgucgaccuguucguguucuccaccagcuucuaccugaucuccaucuuccuccaccuggugaagauccccacccaccgccacaucgucggcaagagcugccccaagccccaccggcugaaccacauggggaucugcuccugcggccucuacaagcagccgggcgugcccgugaaguggaagcgcugaggacuagucccuguucccagagcccacuuuuuuuucuuuuuuugaaauaaaauagccugucuuucagaucuaaaaaaaaaaaaaaaaaaaaaaaaaaaaaaaaaaaaaaaaaaaaaaaaaaaaaaaaaaaaaaaaaaaaaaaaaaaaaaaaaaaaaaaaaaaaaaaaaaaa

SEQ ID NO: 33983 - RNA, 1743 nt, Artificial Sequence
  mRNA product Design a-2 (A100) comprising derived and/or modified sequence from LASV(G733-SLE-2010;Clade IV)__AIT17154__GPCmut8 (opt1)
aggagaguccgcucagccagguugcagaagcggcuuagcguguguccuaaucuucucucugcguguagguaggccugugccgcaaacaagcuuaccaugggccagaucgugaccuucuuccaggaggucccccacgugaucgaggaggugaugaacaucguccugaucgcccucagcauccuggccgugcugaaggggcucuacaacuucgcgaccugcggcaucguggggcuggucuccuuccugcuccugugcggccgcagcugcacgaccucccuguacaaggggguguacgagcuccagacccuggagcugaacauggagacccucaacaugugcaugccgcugagcugcacgaagaacaacucccaccacuacaucauggugggcaacgagaccggccuggagcucacccugaccaacacgagcaucaucaaccacaaguucugcaaccuguccgacgcccacaagaagaaccucuacgaccacgcccugaugagcaucaucuccaccuuccaccugagcauccccaacuucaaccaguacgaggccauguccugcgacuucaacgggggcaagaucagcguccaguacaaccucucccacagcuacgccggggacgcggccaaccacugcggcaccaucgccaacggggugcugcagaccuucaugcggauggccuggggcggcuccuacaucgcgcuggacagcgggcgcgaccggugggacugcaucaugacguccuaccaguaccucaucauccagaacaccaccugggaggaccacugccaguucagccgccccucccccaucggcuaccuggggcugcucagccagcggacccgcgacaucuacaucagccggcgccugcugggcacguucaccuggacccucuccgacagcgagggcaaggacacccccgggggcuacugccugacgcgguggaugcugaucgaggccgagcucaagugcuucgggaacaccgccguggccaagugcaacgagaagcacgacgaggaguucugcgacaugcugcgccuguucgacuucugcaagcaggccauccagcggcucaaggcgccggcccagauguccauccagcugaucaacaaggccgucaacgcccugaucaacgaccagcucaucaugaagaaccaccuccgcgacaucaugggcauccccuacugcaacuacagcaaguacugcuaccugaaccacaccaccacggggaagaccucccugcccaagugcugccuggugagcaacggcuccuaccugaacgagacccacuucagcgacgacaucgagcagcaggccgacaacaugaucaccgagaugcuccagaaggaguacauggagcggcagggcaagacgccgcuggggcugguggaccuguucgucuucuccaccagcuucuaccucaucuccaucuuccugcaccuggugaagauccccacccaccgccacguggucggcaagagcugccccaagccccaccggcucaaccacauggggaucugcuccugcggccuguacgggcagccgggcgugcccgugaaguggaagcgcugaggacuagucccuguucccagagcccacuuuuuuuucuuuuuuugaaauaaaauagccugucuuucagaucuaaaaaaaaaaaaaaaaaaaaaaaaaaaaaaaaaaaaaaaaaaaaaaaaaaaaaaaaaaaaaaaaaaaaaaaaaaaaaaaaaaaaaaaaaaaaaaaaaaaa

SEQ ID NO: 33984 - RNA, 1743 nt, Artificial Sequence
  mRNA product Design a-2 (A100) comprising derived and/or modified sequence from MOPV/LASV reassortant(IGS-1;Clade IV)__AFY05576__GPCmut8 (opt1)
aggagaguccgcucagccagguugcagaagcggcuuagcguguguccuaaucuucucucugcguguagguaggccugugccgcaaacaagcuuaccaugggccagaucgugaccuucuuccaggaggucccccacgugaucgaggaggugaugaacaucguccugaucgcccucagcgugcuggccgugcugaaggggcucuacaacuucgcgaccugcggccuggucgggcuggugacguuccuccugcugugcggccgcuccugcaccaccagccucuacaaggggguguacgagcugcagacccuggagcucaacauggagacgcugaacaugugcaugccgcuguccugcaccaagaacaacagccaccacuacaucauggucggcaacgagaccggccucgagcugacccugacgaacaccuccaucaucaaccacaaguucugcaaccucagcgacgcccacaagaagaaccuguacgaccacgcccugauguccaucaucagcaccuuccaccucuccauccccaacuucaaccaguacgaggccaugagcugcgacuucaacgggggcaagaucuccgugcaguacaaccugagccacuccuacgccggggacgcggccaaccacugcggcaccguggccaacgggguccugcagacguucaugcggauggccuggggcggcagcuacaucgcgcucgacuccgggcgcggcaacugggacugcaucaugaccagcuaccaguaccugaucauccagaacaccaccugggaggaccacugccaguucucccggcccagccccaucggguaccugggccuccugucccagcgcacgcgggacaucuacaucagccgccggcugcucggcaccuucaccuggacccugagcgacuccgagggggaggacacgccgggcggguacugccugacccgcuggaugcucaucgaggccgagcugaagugcuucggcaacaccgccguggccaagugcaacgagaagcacgacgaggaguucugcgacaugcugcggcuguucgacuucugcaagcaggccauccagcgccugaaggcgcccgcccagaugagcauccagcugaucaacaaggccgugaacgcccucaucaacgaccagcugaucaugaagaaccaccuccgggacaucauggggauccccuacugcaacuacuccaaguacugcuaccucaaccacaccacgaccggccgcaccagccugcccaagugcugccuggucuccaacggcagcuaccucaacgagacccacuucuccgacgacaucgagcagcaggccgacaacaugaucacggagaugcugcagaaggaguacauggagcggcaggggaagaccccgcugggccugguggaccucuucguguucagcaccuccuucuaccugaucagcaucuuccugcaccucgucaagauccccacccaccgccacaucguggggaaguccugccccaagccccaccggcugaaccacaugggcaucugcagcugcgggcuguacaagcagccgggcgugcccgucaaguggaagcgcugaggacuagucccuguucccagagcccacuuuuuuuucuuuuuuugaaauaaaauagccugucuuucagaucuaaaaaaaaaaaaaaaaaaaaaaaaaaaaaaaaaaaaaaaaaaaaaaaaaaaaaaaaaaaaaaaaaaaaaaaaaaaaaaaaaaaaaaaaaaaaaaaaaaaa

SEQ ID NO: 33985 - RNA, 1743 nt, Artificial Sequence
  mRNA product Design a-2 (A100) comprising derived and/or modified sequence from LASV(LM765-SLE-2012;Clade IV)__AIT17814__GPCmut8 (opt1)
aggagaguccgcucagccagguugcagaagcggcuuagcguguguccuaaucuucucucugcguguagguaggccugugccgcaaacaagcuuaccaugggccagaucgugaccuucuuccaggaggucccccacgugaucgaggaggugaugaacaucguccugaucgcccucagcauccuggccgugcugaaggggcucuacaacuucgcgaccugcggccugguggggcuggucacguuccuccugcugugcggccgcuccugcaccaccagccucuacaaggggguguacgagcugcagacccuggagcucaacauggagacgcugaacaugugcaugccgcuguccugcaccaagaacaacagccaccacuacaucauggugggcaacgagaccggccucgagcugacccugacgaacaccuccaucaucgaccacaaguucugcaaccucagcgacgcccaccggaagaaccuguacgaccacgcccugauguccaucaucagcaccuuccaccucuccauccccaacuucaaccaguacgaggccaugagcugcgacuucaacgggggcaagaucuccguccaguacaaccugagccacuccuacgccaaggacgcggccgaccacugcgggaccguggccaacggcgugcugcagacguucaugcgcauggccuggggcgggagcuacaucgcgcucgacuccggccgggggcgcugggacugcaucaugaccagcuaccaguaccugaucauccagaacaccaccugggaggaccacugccaguucucccggcccagccccaucggcuaccuggggcuccugucccagcgcacgcgggacaucuacaucagccgccggcugcucggcaccuucaccuggacccugagcgacuccgagggcaaggacacgcccgggggcuacugccugacccgcuggaugcucaucgaggccgagcugaagugcuucgggaacaccgccgucgccaagugcaacgagaagcacgacgaggaguucugcgacaugcugcggcuguucgacuucugcaagcaggccauccagcgccugaaggcgccggcccagaugagcauccagcugaucaacaaggccgugaacgcccucaucaacgaccagcugaucaugaagaaccaccuccgggacaucaugggcauccccuacugcaacuacuccaaguacugcuaccucaaccacaccacgaccgggaagaccagccugcccaagugcugccugguguccaacggcagcuaccucaacgagacccacuucuccgacgacaucgagcagcaggccgacaacaugaucacggagaugcugcagaaggaguacauggagcgccagggcaagaccccgcuggggcuggucgaccucuucguguucagcaccuccuucuaccugaucagcaucuuccugcaccucgugaagauccccacccaccggcacaucgucggcaagcccugccccaagccgcaccgccugaaccacauggggaucugcuccugcggccuguacaagcagcccggggugcccgugaaguggaagcggugaggacuagucccuguucccagagcccacuuuuuuuucuuuuuuugaaauaaaauagccugucuuucagaucuaaaaaaaaaaaaaaaaaaaaaaaaaaaaaaaaaaaaaaaaaaaaaaaaaaaaaaaaaaaaaaaaaaaaaaaaaaaaaaaaaaaaaaaaaaaaaaaaaaaa

SEQ ID NO: 33986 - RNA, 1743 nt, Artificial Sequence
  mRNA product Design a-2 (A100) comprising derived and/or modified sequence from LASV(LM776-SLE-2012;Clade IV)__AIT17824__GPCmut8 (opt1)
aggagaguccgcucagccagguugcagaagcggcuuagcguguguccuaaucuucucucugcguguagguaggccugugccgcaaacaagcuuaccaugggccagaucgugaccuucuuccaggaggucccccacgugaucgaggaggugaugaacaucguccugaucgcccucagcauccuggccgugcugaaggggcucuacaacuucgcgaccugcggccugguggggcuggucacguuccuccugcugugcggccgcuccugcaccaccagcguguacaaggggguguacgagcuccagacccuggagcugaacauggagacgcucaacaugugcaugccgcuguccugcaccaagaacaacagccaccacuacaucauggucggcaacgagaccggccuggagcucacccugacgaacaccuccaucaucaaccacaaguucugcaaccugagcgacgcccacaagaagaaccucuacgaccacgcccugauguccaucaucagcaccuuccaccuguccauccccaacuucaaccaguacgaggccaugagcugcgacuucaacgggggcaagaucuccgugcaguacaaccucagccacuccuacgccggggacgcggccaaccacugcggcaccguggccaacgggguccugcagacguucaugcggauggccuggggcggcagcuacaucgcgcuggacuccgggcacggcaagugggacugcaucaugaccagcuaccaguaccucaucauccagaacaccaccugggaggaccacugccaguucucccgccccagccccaucggguaccugggccugcucucccagcggacgcgcgacaucuacaucagccggcgccugcugggcaccuucaccuggacccucagcgacuccgaggggaaggacacgccgggcggguacugccugacccgguggaugcugaucgaggccgagcucaagugcuucggcaacaccgccguggccaagugcaacgagaagcacgacgaggaguucugcgacaugcugcgccuguucgacuucugcaagcaggccauccagcggcucaaggcgcccgcccagaugagcauccagcugaucaacaaggccgugaacgcccugaucaacgaccagcucaucaugaagaaccaccuccgcgacaucauggggauccccuacugcaacuacuccaaguacugcuaccugaaccacaccacgaccggcaagaccagccugcccaagugcugccuggucuccaacggcagcuaccugaacgagacccacuucuccgacgacaucgagcagcaggccgacaacaugaucacggagaugcuccagaaggaguacauggagcggcaggggaagaccccgcugggccugguggaccuguucguguucagcaccuccuucuaccucaucagcaucuuccugcaccuggucaagauccccacccaccgccacaucguggggaaguccugccccaagccccaccggcucaaccacaugggcaucugcagcugcgggcuguacaagcagccgggcgugcccguccgcuggaagcggugaggacuagucccuguucccagagcccacuuuuuuuucuuuuuuugaaauaaaauagccugucuuucagaucuaaaaaaaaaaaaaaaaaaaaaaaaaaaaaaaaaaaaaaaaaaaaaaaaaaaaaaaaaaaaaaaaaaaaaaaaaaaaaaaaaaaaaaaaaaaaaaaaaaaa

SEQ ID NO: 33987 - RNA, 1743 nt, Artificial Sequence
  mRNA product Design a-2 (A100) comprising derived and/or modified sequence from LASV(Mad39;Clade IV)__ANH09722__GPCmut8 (opt1)
aggagaguccgcucagccagguugcagaagcggcuuagcguguguccuaaucuucucucugcguguagguaggccugugccgcaaacaagcuuaccaugggccagaucgugaccuucuuccaggaggucccccacgugaucgaggaggugaugaacaucguccugaucgcccucagcauccuggccgugcugaaggggcucuacaacguggcgaccugcggccugaucgggcuggucacguuccuccugcugugcggccgcuccugcaccaccacccucuacaaggggguguacgagcugcaggcccuggagcucaacauggagacgcugaacaugugcaugccgcugagcugcaccaagaacaacucccaccacuacauccgggugggcaacgagaccggccucgagcugacccugacgaacaccagccucaucaaccacaaguucugcaaccuguccgacgcccacaagaagaaccuguacgaccacgcccucaugagcaucaucuccaccuuccaccugagcauccccaacuucaaccaguacgaggccauguccugcgacuucaacgacgggaagaucagcguccaguacaaccugucccacaccuacgcgggcgacacggccaaccacugcgggaccguggccaacggcgugcuccagaccuucaugcgcauggccuggggcgggagcuacaucgcgcuggacuccggccgcgggggcugggacugcaucaugaccagcuaccaguaccugaucauccagaacacgaccugggaggaccacugccaguucucccggcccagccccaucggguaccucggccugcugucccagcggacccgcgacaucuacaucagccggcgccuccugggcaccuucacguggacccuguccgacagcgaggggaaggacaccccgggcggguacugccucacccgguggaugcugaucgaggccgagcugaagugcuucggcaacacggccgucgccaagugcaacgagaagcacgacgaggaguucugcgacaugcuccgccuguucgacuucugcaagcaggccauccagcggcugaaggcgcccgcccagaugagcauccagcucaucaacaaggccgugaacgcccugaucaacgaccagcugaucaugaagaaccaccuccgcgacaucauggggauccccuacugcaacuacuccaaguacugcuaccugaaccacaccgugaccggcaagaccagccugcccaagugcugccucgucuccaacggcagcuaccugaacgagacgcacuucuccgacgacaucgagcagcaggccgacaacaugaucaccgagaugcugcagaaggaguacauggagcggcaggggaagaccccgcugggccucguggaccuguucguguucagcaccuccuucuaccugaucagcaucuuccuccaccuggucaagauccccacgcaccgccacgugguggggaagcccugccccaagccgcaccggcugaaccacaugggcaucugcuccugcggguucuacaagcagcccggcguccccgugcgcuggaagcggugaggacuagucccuguucccagagcccacuuuuuuuucuuuuuuugaaauaaaauagccugucuuucagaucuaaaaaaaaaaaaaaaaaaaaaaaaaaaaaaaaaaaaaaaaaaaaaaaaaaaaaaaaaaaaaaaaaaaaaaaaaaaaaaaaaaaaaaaaaaaaaaaaaaaa

SEQ ID NO: 33988 - RNA, 1743 nt, Artificial Sequence
  mRNA product Design a-2 (A100) comprising derived and/or modified sequence from LASV(Z0947-SLE-2011;Clade IV)__AIT17840__GPCmut8 (opt1)
aggagaguccgcucagccagguugcagaagcggcuuagcguguguccuaaucuucucucugcguguagguaggccugugccgcaaacaagcuuaccaugggccagaucgugaccuucuuccaggaggucccccacgugaucgaggaggugaugaacaucguccugaucgcccucagcauccuggccgugcugaaggggcucuacaacuucgcgaccugcggccugguggggcuggucacguuccuccugcugugcggccgcuccugcaccaucagccucuacaaggggguguacgagcugcagacccuggagcucaacauggagacccugaacaugugcaugccgcuguccugcacgaagaacaacagccaccacuacaucauggugggcaacgagaccggccucgagcugacccugaccaacacguccaucaucaaccacaaguucugcaaccucagcgacgcccacaagaagaaccuguacgaccacgcccugauguccaucaucagcaccuuccaccucuccauccccaacuucaaccaguacgaggccaugagcugcgacuucaacgggggcaagaucuccguccaguacaaccugagccacuccuacgccggggacgcggccaaccacugcggcaccguggccaacggggugcugcagaccuucaugcggauggccuggggcggcagcuacaucgcgcucgacuccgggcgcgaccggugggacugcaucaugacgagcuaccaguaccugaucauccagaacaccaccugggaggaccacugccaguucucccgccccagccccaucggcuaccuggggcuccugucccagcggacccgcgacaucuacaucagccggcgccugcucggcacguucaccuggacccugagcgacuccgagggcaaggacacccccgggggcuacugccugacgcgguggaugcucaucgaggccgagcugaagugcuucgggaacaccgccgucgccaagugcaacgagaagcacgacgaggaguucugcgacaugcugcgccucuucgacuucugcaagcaggccauccagcggcugaaggcgccggcccagaugagcauccagcugaucaacaaggccgugaacgcccucaucaacgaccagcugaucaugaagaaccaccuccgcgacaucaugggcauccccuacugcaacuacuccaaguacugcuaccugaaccacaccaccacggggaagaccagccugcccaagugcugccugguguccaacggcagcuaccucaacgagacccacuucuccgacgacaucgagcagcaggccgacaacaugaucaccgagaugcugcagaaggaguacauggagcggcagggcaagacgccgcuggggcuggucgaccucuucguguucagcaccuccuucuaccugaucagcaucuuccugcaccucgugaagauccccacccaccgccacaucgucggcaagcccugccccaagccgcaccggcugaaccacauggggaucugcuccugcggccuguacaagcagcccggggugcccgugaaguggaagcgcugaggacuagucccuguucccagagcccacuuuuuuuucuuuuuuugaaauaaaauagccugucuuucagaucuaaaaaaaaaaaaaaaaaaaaaaaaaaaaaaaaaaaaaaaaaaaaaaaaaaaaaaaaaaaaaaaaaaaaaaaaaaaaaaaaaaaaaaaaaaaaaaaaaaaa

SEQ ID NO: 33989 - RNA, 1743 nt, Artificial Sequence
  mRNA product Design a-2 (A100) comprising derived and/or modified sequence from LASV(Josiah;Clade IV)__NP_694870__GPCmut8 (opt4)
aggagaguccgcucagccagguugcagaagcggcuuagcguguguccuaaucuucucucugcguguagguaggccugugccgcaaacaagcuuaccaugggccagaucgugaccuucuuccaggaggugccccacgugaucgaggaggugaugaacaucgugcugaucgcccugagcgugcuggccgugcugaagggccuguacaacuucgccaccugcggccuggugggccuggugaccuuccugcugcugugcggcagaagcugcaccaccagccuguacaagggcguguacgagcugcagacccuggagcugaacauggagacccugaacaugugcaugccccugagcugcaccaagaacaacagccaccacuacaucauggugggcaacgagaccggccuggagcugacccugaccaacaccagcaucaucaaccacaaguucugcaaccugagcgacgcccacaagaagaaccuguacgaccacgcccugaugagcaucaucagcaccuuccaccugagcauccccaacuucaaccaguacgaggccaugagcugcgacuucaacggcggcaagaucagcgugcaguacaaccugagccacagcuacgccggcgacgccgccaaccacugcggcaccguggccaacggcgugcugcagaccuucaugagaauggccuggggcggcagcuacaucgcccuggacagcggcagaggcaacugggacugcaucaugaccagcuaccaguaccugaucauccagaacaccaccugggaggaccacugccaguucagcagacccagccccaucggcuaccugggccugcugagccagagaaccagagacaucuacaucagcagaagacugcugggcaccuucaccuggacccugagcgacagcgagggcaaggacacccccggcggcuacugccugaccagauggaugcugaucgaggccgagcugaagugcuucggcaacaccgccguggccaagugcaacgagaagcacgacgaggaguucugcgacaugcugagacuguucgacuucugcaagcaggccauccagagacugaaggcccccgcccagaugagcauccagcugaucaacaaggccgugaacgcccugaucaacgaccagcugaucaugaagaaccaccugagagacaucaugggcauccccuacugcaacuacagcaaguacugcuaccugaaccacaccaccaccggcagaaccagccugcccaagugcugccuggugagcaacggcagcuaccugaacgagacccacuucagcgacgacaucgagcagcaggccgacaacaugaucaccgagaugcugcagaaggaguacauggagagacagggcaagaccccccugggccugguggaccuguucguguucagcaccagcuucuaccugaucagcaucuuccugcaccuggugaagauccccacccacagacacaucgugggcaagagcugccccaagccccacagacugaaccacaugggcaucugcagcugcggccuguacaagcagcccggcgugcccgugaaguggaagagaugaggacuagucccuguucccagagcccacuuuuuuuucuuuuuuugaaauaaaauagccugucuuucagaucuaaaaaaaaaaaaaaaaaaaaaaaaaaaaaaaaaaaaaaaaaaaaaaaaaaaaaaaaaaaaaaaaaaaaaaaaaaaaaaaaaaaaaaaaaaaaaaaaaaaa

SEQ ID NO: 33990 - RNA, 1740 nt, Artificial Sequence
  mRNA product Design a-2 (A100) comprising derived and/or modified sequence from LASV(LP;Clade I)__AAF86701__GPCmut8 (opt4)
aggagaguccgcucagccagguugcagaagcggcuuagcguguguccuaaucuucucucugcguguagguaggccugugccgcaaacaagcuuaccaugggccagaucaucaccuucuuccaggaggugccccacgugaucgaggaggugaugaacaucgugcugaucgcccugagccugcuggccauccugaagggccuguacaacaucgccaccugcggcaucaucggccugguggccuuccuguuccugugcggcaagagcugcagccugacccugaagggcggcuacgagcugcagacccuggagcugaacauggagacccugaacaugugcaugccccugagcugcaccaagaacagcagccaccacuacaucagagugggcaacgagaccggccuggagcugacccugaccaacaccagcaucaucaaccacaaguucugcaaccugagcgacgcccacaagaagaaccuguacgaccacgcccugaugagcaucaucagcaccuuccaccugagcauccccaacuucaaccaguacgaggccaugagcugcgacuucaacggcggcaagaucagcgugcaguacaaccugagccacagcuacgccggcgacgccgccgagcacugcggcaccguggccaacggcgugcugcagaccuucaugagaauggccuggggcggcagauacaucgcccuggacagcggcaagggcaacugggacugcaucaugaccagcuaccaguaccugaucauccagaacaccaccugggaggaccacugccaguucagcagacccagccccaucggcuaccugggccugcugagccagagaaccagagacaucuacaucagcagaagacugcugggcaccuucaccuggacccugagcgacagcgagggcaacgagacccccggcggcuacugccugaccagauggaugcugaucgaggccgagcugaagugcuucggcaacaccgccguggccaagugcaacgagaagcacgacgaggaguucugcgacaugcugagacuguucgacuucugcaagcaggccaucagaagacugaaggcccccgcccagaugagcauccagcugaucaacaaggccgugaacgcccugaucaacgaccagcugaucaugaagaaccaccugagagacaucaugggcauccccuacugcaacuacagcaaguacugcuaccugaaccacaccagcagcggcagaaccagccugcccaagugcugccugaucagcaacggcagcuaccugaacgagacccaguucagcgacgacaucgagcagcaggccgacaacaugaucaccgagaugcugcagaaggaguacaucgagagacagggcaagaccccccugggccugguggacaucuucaucuucagcaccagcuucuaccugaucagcaucuuccugcaccugaucaagauccccacccacagacacaucgugggcaagcccugccccaagccccacagacugaaccacaugggcgugugcagcugcggccuguacaagcaccccggcgugcccaccaaguggaagagaugaggacuagucccuguucccagagcccacuuuuuuuucuuuuuuugaaauaaaauagccugucuuucagaucuaaaaaaaaaaaaaaaaaaaaaaaaaaaaaaaaaaaaaaaaaaaaaaaaaaaaaaaaaaaaaaaaaaaaaaaaaaaaaaaaaaaaaaaaaaaaaaaaaaaa

SEQ ID NO: 33991 - RNA, 1740 nt, Artificial Sequence
  mRNA product Design a-2 (A100) comprising derived and/or modified sequence from LASV(803213;Clade II)__AAF86703__GPCmut8 (opt4)
aggagaguccgcucagccagguugcagaagcggcuuagcguguguccuaaucuucucucugcguguagguaggccugugccgcaaacaagcuuaccaugggccagaucaucaccuucuuccaggaggugccccacgugaucgaggaggugaugaacaucgugcugaucgcccugagccugcuggccauccugaagggcaucuacaacguggccaccugcggccuguucggccugaucagcuuccugcugcugugcggcagaagcugcagcgugaccuacaagggcguguacgagcugcagacccuggagcugaacauggccaaccugaacaugugcaugccccugagcugcaccaagaacaacagccaccacuacaucauggugggcaacgagaccggccuggagcugacccugaccaacaccagcaucaucaaccacaaguucugcaaccugagcgacgcccacaagaagaaccuguacgaccacgcccugaugagcaucaucagcaccuuccaccugagcauccccaacuucaaccaguacgaggccaugagcugcgacuucaacggcggcaagaucagcgugcaguacaaccugagccacagcuucgccguggacgccgccaaccacugcggcaccaucgccaacggcgugcugcagaccuucaugagaauggccuggggcggcagcuacaucgcccuggacagcggcaagggcaacugggacugcaucaugaccagcuaccaguaccugaucauccagaacaccaccugggaggaccacugccaguucagcagacccagccccaucggcuaccugggccugcugagccagagaaccagagacaucuacaucagcagaagacugcugggcaccuucaccuggacccugagcgacagcgagggcaacgaggcccccggcggcuacugccugaccagauggaugcugaucgaggccgagcugaagugcuucggcaacaccgccguggccaagugcaacgagaagcacgacgaggaguucugcgacaugcugagacuguucgacuucugcaagcaggccaucaagagacugaagacccccgcccagaugagcauccagcugaucaacaaggccgugaacgcccugaucaacgaccagcugaucaugaagaaccaccugagagacaucaugggcauccccuacugcaacuacagcagauacugcuaccugaaccacaccgugaccggcaagaccagccugcccagaugcugccuggugagcaacggcagcuaccugaacgagacccacuucagcgacgacaucgagcagcaggccgacaacaugaucaccgagaugcugcagaaggaguacauggacagacagggcaagaccccccugggccugguggaccuguucguguucagcaccagcuucuaccugaucagcaucuuccugcaccuggugaagauccccacccacagacacaucgugggcaagcccugccccaagccccacagacugaaccacaugggcaucugcagcugcggccuguacaagcaccccggcgugcccgugaaguggaagagaugaggacuagucccuguucccagagcccacuuuuuuuucuuuuuuugaaauaaaauagccugucuuucagaucuaaaaaaaaaaaaaaaaaaaaaaaaaaaaaaaaaaaaaaaaaaaaaaaaaaaaaaaaaaaaaaaaaaaaaaaaaaaaaaaaaaaaaaaaaaaaaaaaaaaa

SEQ ID NO: 33992 - RNA, 1740 nt, Artificial Sequence
  mRNA product Design a-2 (A100) comprising derived and/or modified sequence from LASV(GA391;Clade III)__CAA36645__GPCmut8 (opt4)
aggagaguccgcucagccagguugcagaagcggcuuagcguguguccuaaucuucucucugcguguagguaggccugugccgcaaacaagcuuaccaugggccagaucgugaccuucuuccaggaggugccccacgugaucgaggaggugaugaacaucgugcugaucgcccugagcauccuggccauccugaagggccuguacaacguggccaccugcggccugaucggccuggugaccuuccugcugcugagcggcagaagcugcagccugaucuacaagggcaccuacgagcugcagacccuggagcugaacauggagacccugaacaugugcaugccccugagcugcaccaagaacaacagccaccacuacaucagagugggcaacgagaccggccuggagcugacccugaccaacaccagcauccugaaccacaaguucugcaaccugagcgacgcccacaagagaaaccuguacgaccacagccugaugagcaucaucagcaccuuccaccugagcauccccaacuucaaccaguacgaggccaugagcugcgacuucaacggcggcaagaucaccgugcaguacaaccugagccacagcuucgccguggacgccgccggccacugcggcacccuggccaacggcgugcugcagaccuucaugagaauggccuggggcggcagcuacaucgcccuggacagcggcagaggcaacugggacugcaucaugaccagcuaccaguaccugaucauccagaacaccaccugggacgaccacugccaguucagcagacccagccccaucggcuaccugggccugcugagccagagaaccagagacaucuacaucagcagaagacugcugggcaccuucaccuggacccugagcgacagcgagggcaacgagacccccggcggcuacugccugaccagauggaugcugaucgaggccgagcugaagugcuucggcaacaccgccguggccaagugcaacgagaagcacgacgaggaguucugcgacaugcugagacuguucgacuucugcaagcaggccaucagaagacugaagacccccgcccagaugagcauccagcugaucaacaaggccgugaacgcccugaucaacgaccagcugaucaugaagaaccaccugagagacaucaugggcauccccuacugcaacuacagcagauacugcuaccugaaccacaccagcaccggcaagaccagccugcccagaugcugccugaucagcaacggcagcuaccugaacgagaccaaguucagcgacgacaucgagcagcaggccgacaacaugaucaccgagaugcugcagaaggaguacaucgacagacagggcaagaccccccugggccugguggaccuguucguguucagcaccagcuucuaccugaucagcaucuuccugcaccuggugaagauccccacccacagacacaucgugggcaagcccugccccaagccccacagacugaaccacaugggcaucugcagcugcggccuguacaagcagcccggcgugcccgugagauggaagagaugaggacuagucccuguucccagagcccacuuuuuuuucuuuuuuugaaauaaaauagccugucuuucagaucuaaaaaaaaaaaaaaaaaaaaaaaaaaaaaaaaaaaaaaaaaaaaaaaaaaaaaaaaaaaaaaaaaaaaaaaaaaaaaaaaaaaaaaaaaaaaaaaaaaaa

SEQ ID NO: 33993 - RNA, 1743 nt, Artificial Sequence
  mRNA product Design a-2 (A100) comprising derived and/or modified sequence from LASV(AV;Clade V)__CCA30314__GPCmut8 (opt4)
aggagaguccgcucagccagguugcagaagcggcuuagcguguguccuaaucuucucucugcguguagguaggccugugccgcaaacaagcuuaccaugggccagaucgugaccuucuuccaggaggugccccacgugaucgaggaggugaugaacaucgugcugaucgcccugagcauccuggccgugcugaagggccuguacaacaucgccaccugcggccugaucggccugaucaccuuccugcugcugugcggcagaagcugcagcagcaaccuguacaagggcguguacgagcugcagagccuggaccugaacauggagacccugaacaugugcaugccccugagcugcaccaagaacaacagccaccacuacaucagagugggcaacgacaccggccuggagcugacccugaccaacaccagcauccugaaccacaaguucugcaaccugagcgacgcccacaagaaggaccuguacgaccacgcccugaugagcaucaucagcaccuuccaccugagcauccccaacuucaaccaguacgaggccaugagcugcgacuucaacggcggcaagaucagcgugcaguacaaccugagccacagcuacgccaucgacgccgccaaccacugcggcaccguggccaacggcauccugcagaccuucaugagaauggccuggggcggcagcuacaucgcccuggacagcggcagaggcaacugggacugcaucaugaccagcuaccaguaccugaucauccagaacaccaccugggagaaccacugccaguucagcagacccagccccaucggcuaccugggccugcugagccagagaaccagagacaucuacaucagcagaagacugcugggcaccuucaccuggacccugagcgacagcgagggcaacgccacccccggcggcuacugccugaccagauggaugcugaucgaggccgagcugaagugcuucggcaacaccgccguggccaagugcaacgagaagcacgacgaggaguucugcgacaugcugagacuguucgacuucugcaagcaggccaucagcagacugaagagccccgcccagaugagcauccagcugaucaacaaggccgugaacgcccugaucaacgaccagcugaucaugaagaaccaccugagagacaucaugggcauccccuacugcaacuacagcaaguacugcuaccugaaccacaccaucaccggcaagaccagccugcccaagugcugccuggugagcaacggcagcuaccugaacgagacccacuucagcgacgacaucgagcagcaggccgacaacaugaucaccgagaugcugcagaaggaguacauggagagacagggcaagaccccccugggccugguggaccuguucguguucagcaccagcuucuaccugaucagcaucuuccugagacuggugaagauccccacccacagacacaucgugggcaagcccugccccaagccccacagacugaaccacaugggcaucugcagcugcggccuguacaagcagcccggcgugcccgugagauggaagagaugaggacuagucccuguucccagagcccacuuuuuuuucuuuuuuugaaauaaaauagccugucuuucagaucuaaaaaaaaaaaaaaaaaaaaaaaaaaaaaaaaaaaaaaaaaaaaaaaaaaaaaaaaaaaaaaaaaaaaaaaaaaaaaaaaaaaaaaaaaaaaaaaaaaaa

SEQ ID NO: 33994 - RNA, 1740 nt, Artificial Sequence
  mRNA product Design a-2 (A100) comprising derived and/or modified sequence from LASV(Togo/2016/7082;Clade VI)__AMR44577__GPCmut8 (opt4)
aggagaguccgcucagccagguugcagaagcggcuuagcguguguccuaaucuucucucugcguguagguaggccugugccgcaaacaagcuuaccaugggccagaucaucaccuucuuccaggaggugccccacgugaucgaggaggugaugaacaucgugcugaucgcccugagccugcuggccauccugaagggcguguacaacguggccaccugcggcaucaucggccuggugaccuuccuguuccugugcggcagaagcugcagccugaucuacaagggcagcuacgagcugcagacccuggagcugaacauggagacccugaacaugugcaugccccugagcugcaccaagaacagcagccaccacuacaucagagugggcaacgagaccggccuggagcugacccugaccaacaccagcaucaucaaccacaaguucugcaaccugagcgacgcccacaagagaaaccuguacgaccacgcccugaugagcauccugagcaccuuccaccugagcauccccaacuucaaccaguacgaggccaugagcugcgacuucaacggcggcaagaucagcgugcaguacaaccugagccacgccuacgccguggacgccgccgagcacugcggcaccguggccaacggcgugcugcagaccuucaugagaauggccuggggcggcagcuacaucgcccuggacagcggcagaggcaacugggacugcaucaugaccagcuaccaguaccugaucauccagaacaccaccugggaggaccacugccaguucagcagacccagccccaucggcuaccugggccugcugagccagagaaccagagacaucuacaucagcagaagacugcugggcaccuucaccuggacccugagcgacagcgagggcaacgagacccccggcggcuacugccugaccagauggaugcugaucgaggccgagcugaagugcuucggcaacaccgccguggccaagugcaacgagaagcacgacgaggaguucugcgacaugcugagacuguucgacuucugcaagcaggccauccagagacugaagagccccgcccagaugagcauccagcugaucaacaaggccgugaacgcccugaucaacgaccagcugaucaugaagaaccaccugagagacaugaugggcauccccuacugcaacuacagcaaguacugcuaccugaaccacaccagcagcggcagaaccagccugcccaagugcugccuggugagcaacggcagcuaccugaacgagacccacuucagcgacgacaucgagcagcaggccgacaacaugaucaccgagaugcugcagaaggaguacaucgacagacagggcaagaccccccugggccugguggaccuguucguguucagcaccagcuucuaccugaucagcaucuuccugcaccugaucaagauccccacccacagacacaucgugggcaagcccugccccaagccccacagacugaaccacaugggcaucugcagcugcggccuguacaagcagcccggcgugcccaccagauggaagagaugaggacuagucccuguucccagagcccacuuuuuuuucuuuuuuugaaauaaaauagccugucuuucagaucuaaaaaaaaaaaaaaaaaaaaaaaaaaaaaaaaaaaaaaaaaaaaaaaaaaaaaaaaaaaaaaaaaaaaaaaaaaaaaaaaaaaaaaaaaaaaaaaaaaaa

SEQ ID NO: 33995 - RNA, 1740 nt, Artificial Sequence
  mRNA product Design a-2 (A100) comprising derived and/or modified sequence from LASV(KAK-428;Clade n.d. (VII))__ANH09740__GPCmut8 (opt4)
aggagaguccgcucagccagguugcagaagcggcuuagcguguguccuaaucuucucucugcguguagguaggccugugccgcaaacaagcuuaccaugggccagaucgugaccuucuuccaggaggugccccacgugaucgaggaggugaugaacaucgugcugaucgcccugagccugcuggccauccugaagggccuguacaacuucgccaccugcggcgugaucggccugaucaccuuccugcugcugugcggcagaagcugcagcgccaccuacaagggccaguacgagcugcagacccuggagcugaacauggagagccugaacaugugcaugccccugagcugcaccaagaacaacagccaccacuacaucagagccggcaacaacaccggccuggagcugacccugaccaacaccagcaucaucagccacaaguucugcaaccugagcgacgcccacaagaagaaccuguacgaccacacccugaugagcaucaucaccaccuuccaccugagcauccccaacuucaaccaguacgaggccaugagcugcgacuucaacggcggcaagaucagcauccaguacaaccugagccacagcuacgccggcgacgccgcccagcacugcggcaccguggccaacggcgugcugcagaccuucaugagaauggccuggggcggcagcuaccuggcccuggacagcggcagaagaggcugggacugcaucaucagcagcuaccaguaccugaucauccagaacaccaccugggacgaccacugccaguucagcagacccagccccaucggcuaccugggcuucgugagccagaagaccagagacaucuacaucagcagaagacugcugggcaccuucaccuggacccugagcgacagcgagggccacgacaugcccggcggcuacugccugaccagauggaugcugaucgaggccgaccugaagugcuucggcaacaccgccguggccaagugcaacgagaagcacgacgaggaguucugcgacauguggagacuguucgacuucugcaagcaggccauccagagacugaaggcccccgcccagaugaacauccagcugaucaacaaggccgugaacgcccugaucaacgaccagcugaugaugaagaaccaccugagagacaucaugggcauccccuacugcaacuacagcaaguucugcuaccugaacaacaccaccaccggcagaaccagccugcccagaugcugccugaucagcaacggcagcuaccugaacgagacccacuucagcgacgacaucgagcagcaggccgacaacaugaucaccgagaugcugcagaaggaguacauggacagacagggcaagaccccccugggccugguggaccuguucguguucagcaccagcuucuaccugaucaccaucuuccugcaccuggugaagauccccacccacagacacaucgugggcaagcccugccccaagccccacagacugaaccacaugggcaucugcagcugcggccuguacaagcagcccggcgugcccgugagauggaagagaugaggacuagucccuguucccagagcccacuuuuuuuucuuuuuuugaaauaaaauagccugucuuucagaucuaaaaaaaaaaaaaaaaaaaaaaaaaaaaaaaaaaaaaaaaaaaaaaaaaaaaaaaaaaaaaaaaaaaaaaaaaaaaaaaaaaaaaaaaaaaaaaaaaaaa

SEQ ID NO: 33996 - RNA, 1740 nt, Artificial Sequence; identical to SEQ ID NO: 33990
  mRNA product Design a-2 (A100) comprising derived and/or modified sequence from LASV(Pinneo-NIG-1969;Clade I)__AIT17836__GPCmut8 (opt4)

SEQ ID NO: 33997 - RNA, 1740 nt, Artificial Sequence
  mRNA product Design a-2 (A100) comprising derived and/or modified sequence from LASV(ISTH0009-NIG-2011;Clade II)__AIT17404__GPCmut8 (opt4)
aggagaguccgcucagccagguugcagaagcggcuuagcguguguccuaaucuucucucugcguguagguaggccugugccgcaaacaagcuuaccaugggccagaucaucaccuucuuccaggaggugccccacgugaucgaggaggugaugaacaucgugcugaucgcccugagccugcuggccauccugaagggcaucuacaacguggccaccugcggccuguucggccuggugagcuuccugcugcugugcggcagaagcugcagcaccaccuacaagggcguguacgagcugcagacccuggagcuggacauggccagccugaacaugugcaugccccugagcugcaccaagaacaacagccaccacuacaucauggugggcaacgagaccggccuggagcugacccugaccaacaccagcaucaucaaccacaaguucugcaaccugagcgacgcccacaagaagaaccuguacgaccacgcccugaugagcaucaucagcaccuuccaccugagcauccccaacuucaaccaguacgaggccaugagcugcgacuucaacggcggcaagaucagcgugcaguacaaccugagccacgccuacgccguggacgccgccaaccacugcggcaccaucgccaacggcgugcugcagaccuucaugagaauggccuggggcggcagcuacaucgcccuggacagcggcaagggcagcugggacugcaucaugaccagcuaccaguaccugaucauccagaacaccaccugggaggaccacugccaguucagcagacccagccccaucggcuaccugggccugcugagccagagaaccagagacaucuacaucagcagaagacugcugggcaccuucaccuggacccugagcgacagcgagggcaacgagacccccggcggcuacugccugaccagauggaugcugaucgaggccgagcugaagugcuucggcaacaccgccguggccaagugcaacgagaagcacgacgaggaguucugcgacaugcugagacuguucgacuucugcaagcaggccaucagaagacugaagacccccgcccagaugagcauccagcugaucaacaaggccgugaacgcccugaucaacgaccagcugaucaugaagaaccaccugagagacaucaugggcauccccuacugcaacuacagcaaguacugcuaccugaaccacaccgugaccggcaagaccagccugcccagaugcugccuggugagcaacggcagcuaccugaacgagacccacuucagcgacgacaucgagcagcaggccgacaacaugaucaccgagcugcugcagaaggaguacauggacagacagggcaagaccccccugggccugguggaccuguucguguucagcaccagcuucuaccugaucagcaucuuccugcaccugaucaagauccccacccacagacacaucaccggcaagcccugccccaagccccacagacugaaccacaugggcaucugcagcugcggccuguacaagcaccccggcgugcccgugaaguggaagagaugaggacuagucccuguucccagagcccacuuuuuuuucuuuuuuugaaauaaaauagccugucuuucagaucuaaaaaaaaaaaaaaaaaaaaaaaaaaaaaaaaaaaaaaaaaaaaaaaaaaaaaaaaaaaaaaaaaaaaaaaaaaaaaaaaaaaaaaaaaaaaaaaaaaaa

SEQ ID NO: 33998 - RNA, 1740 nt, Artificial Sequence
  mRNA product Design a-2 (A100) comprising derived and/or modified sequence from LASV(ISTH2010-NIG-2012;Clade II)__AIT17482__GPCmut8 (opt4)
aggagaguccgcucagccagguugcagaagcggcuuagcguguguccuaaucuucucucugcguguagguaggccugugccgcaaacaagcuuaccaugggccagaucaucaccuucuuccaggaggugccccacgugaucgaggaggugaugaacaucgugcugaucgcccugagccugcuggccauccugaagggcaucuacaacguggccaccugcggccuguucggccuggugagcuuccugcugcugugcggcagaagcugcagcaccaccuacaagggcguguacgagcugcagacccuggagcuggacauggccagccugaacaugugcaugccccugagcugcaccaagaacaacagccaccacuacaucauggugggcaacgagaccggccuggagcugacccugaccaacaccagcaucaucaaccacaaguucugcaaccugagcgacgcccacaagaagaaccuguacgaccacgcccugaugagcaucaucagcaccuuccaccugagcauccccaacuucaaccaguacgaggccaugagcugcgacuucaacggcggcaagaucagcgugcaguacaaccugagccacgccuacgccguggacgccgccaaccacugcggcaccaucgccaacggcgugcugcagaccuucaugagaauggccuggggcggcagcuacaucgcccuggacagcggcaagggcagcugggacugcaucaugaccagcuaccaguaccugaucauccagaacaucaccugggaggaccacugccaguucagcagacccagccccaucggcuaccugggccugcugagccagagaaccagagacaucuacaucagcagaagacugcugggcaccuucaccuggacccugagcgacagcgagggcaacgagacccccggcggcuacugccugaccagauggaugcugaucgaggccgagcugaagugcuucggcaacaccgccguggccaagugcaacgagaagcacgacgaggaguucugcgacaugcugagacuguucgacuucugcaagcaggccaucagaagacugaagacccccgcccagaugagcauccagcugaucaacaaggccgugaacgcccugaucaacgaccagcugaucaugaagaaccaccugagagacaucaugggcauccccuacugcaacuacagcaaguacugcuaccugaaccacaccgugaccggcaagaccagccugcccagaugcugccuggugagcaacggcagcuaccugaacgagacccacuucagcgacgacaucgagcagcaggccgacaacaugaucaccgagcugcugcagaaggaguacaucgacagacagggcaagaccccccugggccugguggaccuguucguguucagcaccagcuucuaccugaucagcaucuuccugcaccuggugaagauccccacccacagacacguggugggcaagcccugccccaagccccacagacugaaccacaugggcaucugcagcugcggccuguacaagcaccccggcgugcccgugaaguggaagagaugaggacuagucccuguucccagagcccacuuuuuuuucuuuuuuugaaauaaaauagccugucuuucagaucuaaaaaaaaaaaaaaaaaaaaaaaaaaaaaaaaaaaaaaaaaaaaaaaaaaaaaaaaaaaaaaaaaaaaaaaaaaaaaaaaaaaaaaaaaaaaaaaaaaaa

SEQ ID NO: 33999 - RNA, 1740 nt, Artificial Sequence
  mRNA product Design a-2 (A100) comprising derived and/or modified sequence from LASV(Lassa virus/H.sapiens-wt/NGA/2015/ISTH_0543;Clade II)__AVO03639__GPCmut8 (opt4)
aggagaguccgcucagccagguugcagaagcggcuuagcguguguccuaaucuucucucugcguguagguaggccugugccgcaaacaagcuuaccaugggccagaucaucaccuucuuccaggaggugccccacgugaucgaggaggugaugaacaucgugcugaucgcccugagccugcuggccauccugaagggcaucuacaacguggccaccugcggccuguucggccuggugagcuuccugcugcugugcggcagaagcugcagcaccaccuacaagggcguguacgagcugcagacccuggagcuggacauggccaaccugaacaugugcaugccccugagcugcaccaagaacaacagccaccacuacaucauggugggcaacgagaccggccuggagcugacccugaccaacaccagcaucaucaaccacaaguucugcaaccugagcgacgcccacaagaagaaccuguacgaccacgcccugaugagcaucaucagcaccuuccaccugagcauccccaacuucaaccaguacgaggccaugagcugcgacuucaacggcggcaagaucagcgugcaguacaaccugagccacaccuacgccguggacgccgccaaccacugcggcaccaucgccaacggcgugcugcagaccuucaugagaauggccuggggcggcagcuacaucgcccuggacagcggcaagggcagcugggacugcaucaugaccagcuaccaguaccuggugauccagaacaccaccugggaggaccacugccaguucagcagacccagccccaucggcuaccugggccugcugagccagagaaccagagacaucuacaucagcagaagacugcugggcaccuucaccuggacccugagcgacagcgagggcaacgagacccccggcggcuacugccugaccagauggaugcugaucgaggccgagcugaagugcuucggcaacaccgccguggccaagugcaacgagaagcacgacgaggaguucugcgacaugcugagacuguucgacuucugcaagcaggccaucagaagacugaagacccccgcccagaugagcauccagcugaucaacaaggccgugaacgcccugaucaacgaccagcugaucaugaagaaccaccugagagacaucaugggcauccccuacugcaacuacagcaaguacugcuaccugaaccacaccgugaccggcaagaccagccugcccagaugcugccuggugagcaacggcagcuaccugaacgagacccacuucagcgacgacaucgagcagcaggccgacaacaugaucaccgagcugcugcagaaggaguacaucgacagacagggcaagaccccccugggccugguggaccuguucguguucagcaccagcuucuaccugaucagcaucuuccugcaccuggugaagauccccacccacagacacaucaccggcaagcccugccccaagccccacagacugaaccacaugggcaucugcagcugcggccuguacaagcaccccggcgugcccgugaaguggaagagaugaggacuagucccuguucccagagcccacuuuuuuuucuuuuuuugaaauaaaauagccugucuuucagaucuaaaaaaaaaaaaaaaaaaaaaaaaaaaaaaaaaaaaaaaaaaaaaaaaaaaaaaaaaaaaaaaaaaaaaaaaaaaaaaaaaaaaaaaaaaaaaaaaaaaa

SEQ ID NO: 34000 - RNA, 1740 nt, Artificial Sequence
  mRNA product Design a-2 (A100) comprising derived and/or modified sequence from LASV(Lassa virus/H.sapiens-wt/NGA/2016/ISTH_0009;Clade II)__AVO03571__GPCmut8 (opt4)
aggagaguccgcucagccagguugcagaagcggcuuagcguguguccuaaucuucucucugcguguagguaggccugugccgcaaacaagcuuaccaugggccagaucaucaccuucuuccaggaggugccccacgugaucgaggaggugaugaacaucgugcugaucgcccugagccugcuggccauccugaagggcaucuacaacguggccaccugcggccugcugggccuggugagcuuccugcugcugugcggcagaagcugcagcaccaccuacaagggcguguacgagcugcagacccuggagcuggacauggccagccugaacaugugcaugccccugagcugcaccaagaacaacagccaccacuacaucauggugggcaacgagaccggccuggagcugacccugaccaacaccagcaucaucaaccacaaguucugcaaccugagcgacgcccacaagaagaaccuguacgaccacgcccugaugagcaucaucagcaccuuccaccugagcauccccaacuucaaccaguacgaggccaugagcugcgacuucaacggcggcagaaucagcgugcaguacaaccugagccacagcuacgccguggacgccgccaaccacugcggcaccaucgccaacggcgugcugcagaccuucaugagaauggccuggggcggcagcuacaucgcccuggacagcggcaagggcagcugggacugcaucaugaccagcuaccaguaccugaucauccagaacaccaccugggaggaccacugccaguucagcagacccagccccaucggcuaccugggccugcugagccagagaaccagagacaucuacaucagcagaagacugcugggcaccuucaccuggacccugagcgacagcgagggcaacgagacccccggcggcuacugccugaccagauggaugcugaucgaggccgagcugaagugcuucggcaacaccgccguggccaagugcaacgagaagcacgacgaggaguucugcgacaugcugagacuguucgacuucugcaagcaggccaucagaagacugaagacccccgcccagaugagcauccagcugaucaacaaggccgugaacgcccugaucaacgaccagcugaucaugaagaaccaccugagagacaucaugggcauccccuacugcaacuacagcaaguacugcuaccugaaccacaccgugaccggcaagaccagccugcccagaugcugccuggugagcaacggcagcuaccugaacgagacccacuucagcgacgacaucgagcagcaggccgacaacaugaucaccgagcugcugcagaaggaguacaucgacagacagggcaagaccccccugggccugguggaccuguucguguucagcaccagcuucuaccugaucagcaucuuccugcaccuggugaagauccccacccacagacacaucaccggcaagcccugccccaagccccacagacugaaccacaugggcaucugcagcugcggccuguacaaccaccccggcgugcccgugaaguggaagagaugaggacuagucccuguucccagagcccacuuuuuuuucuuuuuuugaaauaaaauagccugucuuucagaucuaaaaaaaaaaaaaaaaaaaaaaaaaaaaaaaaaaaaaaaaaaaaaaaaaaaaaaaaaaaaaaaaaaaaaaaaaaaaaaaaaaaaaaaaaaaaaaaaaaaa

SEQ ID NO: 34001 - RNA, 1740 nt, Artificial Sequence
  mRNA product Design a-2 (A100) comprising derived and/or modified sequence from LASV(Lassa virus/H.sapiens-wt/NGA/2016/ISTH_0017;Clade II)__AVO03567__GPCmut8 (opt4)
aggagaguccgcucagccagguugcagaagcggcuuagcguguguccuaaucuucucucugcguguagguaggccugugccgcaaacaagcuuaccaugggccagaucaucaccuucuuccaggaggugccccacgugaucgaggaggugaugaacaucgugcugaucgcccugagccugcuggccauccugaagggcaucuacaacguggccaccugcggccuguucggccuggugagcuuccugcugcugugcggcagaagcugcagcaccaccuacaagggcguguacgagcugcagacccuggagcuggacauggccagccugaacaugugcaugccccugagcugcaccaagaacaacagccaccacuacaucauggugggcaacgagaccggccuggagcugacccugaccaacaccagcaucaucaaccacaaguucugcaaccugagcgacgcccacaagaagaaccuguacgaccacgcccugaugagcaucaucagcaccuuccaccugagcauccccaacuucaaccaguacgaggccaugagcugcgacuucaacggcggcaagaucagcgugcaguacaaccugagccacaccuacgccaucgacgccgccaaccacugcggcaccaucgccaacggcgugcugcagaccuucaugagaauggccuggggcggcagcuacaucgcccuggacagcggcaagggcagcugggacugcaucaugaccagcuaccaguaccugaucauccagaacaccaccugggaggaccacugccaguucagcagacccagccccaucggcuaccugggccugcugagccagagaaccagagacaucuacaucagcagaagacugcugggcaccuucaccuggacccugagcgacagcgagggcaacgagacccccggcggcuacugccugaccagauggaugcugaucgaggccgagcugaagugcuucggcaacaccgccguggccaagugcaacgagaagcacgacgaggaguucugcgacaugcugagacuguucgacuucugcaagcaggccaucagaagacugaagacccccgcccagaugagcauccagcugaucaacaaggccgugaacgcccugaucaacgaccagcugaucaugaagaaccaccugagagacaucaugggcauccccuacugcaacuacagcaaguacugcuaccugaaccacaccgugaccggcaagaccagccugcccagaugcugccuggugagcaacggcagcuaccugaacgagacccacuucagcgacgacaucgagcagcaggccgacaacaugaucaccgagcugcugcagaaggaguacauggacagacagggcaagaccccccugggccugguggaccuguucguguucagcaccagcuucuaccugaucagcaucuuccugcaccuggugagaauccccacccacagacacgugaucggcaagcccugccccaagccccacagacugaaccacaugggcaucugcagcugcggccuguacaagcaccccggcgugcccgugaaguggaagagaugaggacuagucccuguucccagagcccacuuuuuuuucuuuuuuugaaauaaaauagccugucuuucagaucuaaaaaaaaaaaaaaaaaaaaaaaaaaaaaaaaaaaaaaaaaaaaaaaaaaaaaaaaaaaaaaaaaaaaaaaaaaaaaaaaaaaaaaaaaaaaaaaaaaaa

SEQ ID NO: 34002 - RNA, 1740 nt, Artificial Sequence
  mRNA product Design a-2 (A100) comprising derived and/or modified sequence from LASV(Lassa virus/H.sapiens-wt/NGA/2018/ISTH_0959;Clade II)__AVV65099__GPCmut8 (opt4)
aggagaguccgcucagccagguugcagaagcggcuuagcguguguccuaaucuucucucugcguguagguaggccugugccgcaaacaagcuuaccaugggccagaucaucaccuucuuccaggaggugccccacgugaucgaggaggugaugaacaucgugcugaucgcccugagccugcuggccauccugaagggcaucuacaacguggugaccugcggccuguucggccuggugagcuuccugcugcugugcggcagaagcugcagcaccaccuacaagggcguguacgagcugcagacccuggagcuggacauggccagccugaacaugugcaugccccugagcugcaccaagaacaacagccaccacuacaucauggugggcaacgagaccggccuggagcugacccugaccaacaccagcaucaucaaccacaaguucugcaaccugagcgacgcccacaagaagaaccuguacgaccacgcccugaugagcaucaucagcaccuuccaccugagcauccccaacuucaaccaguacgaggccaugagcugcgacuucaacggcggcaagaucagcgugcaguacaaccugagccacgccuacgccaucgacgccgccaaccacugcggcaccaucgccaacggcgugcugcagaccuucaugagaauggccuggggcggcagcuacaucgcccuggacagcggcaagggcagcugggacugcaucaugaccagcuaccaguaccugaucauccagaacaccaccugggaggaccacugccaguucagcagacccagccccaucggcuaccugggccugcugagccagagaaccagagacaucuacaucagcagaagacugcugggcaccuucaccuggacccugagcgacagcgagggcaacgagacccccggcggcuacugccugaccagauggaugcugaucgaggccgagcugaagugcuucggcaacaccgccguggccaagugcaacgagaagcacgacgaggaguucugcgacaugcugagacuguucgacuucugcaagcaggccaucagaagacugaagacccccgcccagaugagcauccagcugaucaacaaggccgugaacgcccugaucaacgaccagcugaucaugaagaaccaccugagagacaucaugggcauccccuacugcaacuacagcaaguacugcuaccugaaccacaccgugaccggcaagaccagccugcccagaugcugccuggugagcaacggcagcuaccugaacgagacccacuucagcgacgacaucgagcagcaggccgacaacaugaucaccgagcugcugcagaaggaguacaucgacagacagggcaagaccccccugggccugguggaccuguucguguucagcaccagcuucuaccugaucagcaucuuccugcaccuggugaagauccccacccacagacacgugaucggcaagcccugccccaagccccacagacugaaccacaugggcaucugcagcugcggccuguacaagcaccccggcgugcccgugaaguggaagagaugaggacuagucccuguucccagagcccacuuuuuuuucuuuuuuugaaauaaaauagccugucuuucagaucuaaaaaaaaaaaaaaaaaaaaaaaaaaaaaaaaaaaaaaaaaaaaaaaaaaaaaaaaaaaaaaaaaaaaaaaaaaaaaaaaaaaaaaaaaaaaaaaaaaaa

SEQ ID NO: 34003 - RNA, 1740 nt, Artificial Sequence
  mRNA product Design a-2 (A100) comprising derived and/or modified sequence from LASV(LASV003-NIG-2008;Clade II)__AIT17580__GPCmut8 (opt4)
aggagaguccgcucagccagguugcagaagcggcuuagcguguguccuaaucuucucucugcguguagguaggccugugccgcaaacaagcuuaccaugggccagaucaucaccuucuuccaggaggugccccacgugaucgaggaggugaugaacaucgugcugaucgcccugagccugcuggccauccugaagggcaucuacaacguggccaccugcggccuguucggccuggugagcuuccugcugcugugcggcagaagcugcagcaccaccuacaagggcguguacgagcugcagacccuggagcuggacauggccagccugaacaugugcaugccccugagcugcaccaagaacaacagccaccacuacaucauggugggcaacgagaccggccuggagcugacccugaccaacaccagcaucaucaaccacaaguucugcaaccugagcgacgcccacaagaagaaccuguacgaccacgcccugaugagcaucaucagcaccuuccaccugagcauccccaacuucaaccaguacgaggccaugagcugcgacuucaacggcggcaagaucagcgugcaguacaaccugagccacaccuacgccguggacgccgccaaccacugcggcaccaucgccaacggcgugcugcagaccuucaugagaauggccuggggcggcagcuacaucgcccuggacagcggcaagggcagcugggacugcaucaugaccagcuaccaguaccugaucauccagaacaccaccugggaggaccacugccaguucagcagacccagccccaucggcuaccugggccugcugagccagagaaccagagacaucuacaucagcagaagacugcugggcaccuucaccuggacccugagcgacagcgagagcaacgagacccccggcggcuacugccugaccagauggaugcugaucgaggccgagcugaagugcuucggcaacaccgccguggccaagugcaacgagaagcacgacgaggaguucugcgacaugcugagacuguucgacuucugcaagcaggccaucagaagacugaaggcccccgcccagaugagcauccagcugaucaacaaggccgugaacgcccugaucaacgaccagcugaucaugaagaaccaccugagagacaucaugggcauccccuacugcaacuacagcaaguacugcuaccugaaccacaccgugaccggcagaaccagccugcccagaugcugccuggugagcaacggcagcuaccugaacgagacccacuucagcgacgacaucgagcagcaggccgacaacaugaucaccgagcugcugcagaaggaguacauggacagacagggcaagaccccccugggccugguggaccuguucguguucagcaccagcuucuaccugaucagcaucuuccugcaccuggugaagauccccacccacagacacgugaucggcaagcccugccccaagccccacagacugaaccacaugggcaucugcagcugcggccuguacaagcaccccggcgugcccgugaaguggaagagaugaggacuagucccuguucccagagcccacuuuuuuuucuuuuuuugaaauaaaauagccugucuuucagaucuaaaaaaaaaaaaaaaaaaaaaaaaaaaaaaaaaaaaaaaaaaaaaaaaaaaaaaaaaaaaaaaaaaaaaaaaaaaaaaaaaaaaaaaaaaaaaaaaaaaa

SEQ ID NO: 34004 - RNA, 1740 nt, Artificial Sequence
  mRNA product Design a-2 (A100) comprising derived and/or modified sequence from LASV(LASV035-NIG-2009;Clade II)__AIT17588__GPCmut8 (opt4)
aggagaguccgcucagccagguugcagaagcggcuuagcguguguccuaaucuucucucugcguguagguaggccugugccgcaaacaagcuuaccaugggccagaucaucaccuucuuccaggaggugccccacgugaucgaggaggugaugaacaucgugcugaucgcccugagccugcuggccauccugaagggcaucuacaacguggccaccugcggccuguucggccuggugagcuuccugcugcugugcggcagaagcugcagcaccaccuacaagggcguguacgagcugcagacccuggagcuggacauggccagccugaacaugugcaugccccugagcugcaccaagaacaacagccaccacuacaucauggugggcaacgagaccggccuggagcugacccugaccaacaccagcaucaucaaccacaaguucugcaaccugagcgacgcccacaagaagaaccuguacgaccacgcccugaugagcaucaucagcaccuuccaccugagcauccccaacuucaaccaguacgaggccaugagcugcgacuucaacggcggcaagaucagcgugcaguacaaccugagccacgccuacgccguggacgccgccaaccacugcggcaccaucgccaacggcgugcugcagaccuucaugagaauggccuggggcggcagcuacaucgcccuggacagcggcaagggcagcugggacugcaucaugaccagcuaccaguaccugaucauccagaacaccaccugggaggaccacugccaguucagcagacccagccccaucggcuaccugggccugcugagccagagaaccagagacaucuacaucagcagaagacugcugggcaccuucaccuggacccugagcgacagcgagggcaacgagacccccggcggcuacugccugaccagauggaugcugaucgaggccgagcugaagugcuucggcaacaccgccguggccaagugcaacgagaagcacgacgaggaguucugcgacaugcugagacuguucgacuucugcaagcaggccaucagaagacugaaggcccccgcccagaugagcauccagcugaucaacaaggccgugaacgcccugaucaacgaccagcugaucaugaagaaccaccugagagacaucaugggcauccccuacugcaacuacagcaaguacugcuaccugaaccacaccgugaccggcaagaccagccugcccagaugcugccuggugagcaacggcagcuaccugaacgagacccacuucagcgacgacaucgagcagcaggccgacaacaugaucaccgagcugcugcagaaggaguacaucgacagacagggcaagaccccccugggccugguggaccuguucguguucagcaccagcuucuaccugaucagcaucuuccugcaccuggugaagauccccacccacagacacgugaucggcaagcccugccccaagccccacagacugaaccacaugggcaucugcagcugcggccuguacaagcaccccggcgugcccgugaaguggaagagaugaggacuagucccuguucccagagcccacuuuuuuuucuuuuuuugaaauaaaauagccugucuuucagaucuaaaaaaaaaaaaaaaaaaaaaaaaaaaaaaaaaaaaaaaaaaaaaaaaaaaaaaaaaaaaaaaaaaaaaaaaaaaaaaaaaaaaaaaaaaaaaaaaaaaa

SEQ ID NO: 34005 - RNA, 1740 nt, Artificial Sequence
  mRNA product Design a-2 (A100) comprising derived and/or modified sequence from LASV(LASV1000-NIG-2009;Clade II)__AIT17782__GPCmut8 (opt4)
aggagaguccgcucagccagguugcagaagcggcuuagcguguguccuaaucuucucucugcguguagguaggccugugccgcaaacaagcuuaccaugggccagaucaucaccuucuuccaggaggugccccacgugaucgaggaggugaugaacaucgugcugaucgcccugagccugcuggccauccugaagggcaucuacaacguggccaccugcggccuguucggccuggugagcuuccugcugcugugcggcagaagcugcagcaccaccuacaagggcguguacgagcugcagacccuggagcuggacauggccagccugaacaugugcaugccccugagcugcaccaagaacaacagccaccacuacaucauggugggcaacgagaccggccuggagcugacccugaccaacaccagcaucaucaaccacaaguucugcaaccugagcgacgcccacaagaagaaccuguacgaccacgcccugaugagcaucaucagcaccuuccaccugagcauccccaacuucaaccaguacgaggccaugagcugcgacuucaacggcggcaagaucagcgugcaguacaaccugagccacaccuacgccguggacgccgccaaccacugcggcaccaucgccaacggcgugcugcagaccuucaugagaauggccuggggcggcagcuacaucgcccuggacagcggcaagggcagcugggacugcaucaugaccagcuaccaguaccugaucauccagaacaccaccugggaggaccacugccaguucagcagacccagccccaucggcuaccugggccugcugagccagagaaccagagacaucuacaucagcagaagacugcugggcaccuucaccuggacccugagcgacagcgagggcaacgagacccccggcggcuacugccugaccagauggaugcugaucgaggccgagcugaagugcuucggcaacaccgccguggccaagugcaacgagaagcacgacgaggaguucugcgacaugcugagacuguucgacuucugcaagcaggccaucaagagacugaagacccccgcccagaugagcauccagcugaucaacaaggccgugaacgcccugaucaacgaccagcugaucaugaagaaccaccugagagacaucaugggcauccccuacugcaacuacagcaaguacugcuaccugaaccacaccgugaccggcaagaccagccugcccagaugcugccuggugagcaacggcagcuaccugaacgagacccacuucagcgacgacaucgagcagcaggccgacaacaugaucaccgagcugcugcagaaggaguacaucgacagacagggcaagaccccccugggccugguggaccuguucguguucagcaccagcuucuaccugaucagcaucuuccugcaccuggugaagauccccacccacagacacguggugggcaagcccugccccaagccccacagacugaaccacaugggcaucugcagcugcggccuguacaagcaccccggcgugcccgugaaguggaagagaugaggacuagucccuguucccagagcccacuuuuuuuucuuuuuuugaaauaaaauagccugucuuucagaucuaaaaaaaaaaaaaaaaaaaaaaaaaaaaaaaaaaaaaaaaaaaaaaaaaaaaaaaaaaaaaaaaaaaaaaaaaaaaaaaaaaaaaaaaaaaaaaaaaaaa

SEQ ID NO: 34006 - RNA, 1740 nt, Artificial Sequence
  mRNA product Design a-2 (A100) comprising derived and/or modified sequence from LASV(LASV221-NIG-2010;Clade II)__AIT17624__GPCmut8 (opt4)
aggagaguccgcucagccagguugcagaagcggcuuagcguguguccuaaucuucucucugcguguagguaggccugugccgcaaacaagcuuaccaugggccagaucaucaccuucuuccaggaggugccccacgugaucgaggaggugaugaacaucgugcugaucgcccugagccugcuggccauccugaagggcaucuacaacguggccaccugcggccuguucggccuggugagcuuccugcugcugugcggcagaagcugcagcaccaccuacaagggcguguacgagcugcagacccuggagcuggacauggccagccugaacaugugcaugccccugagcugcaccaagaacaacagccaccacuacaucauggugggcaacgagaccggccuggagcugacccugaccaacaccagcaucaucaaccacaaguucugcaaccugagcgacgcccacaagaagaaccuguacgaccacgcccugaugagcaucaucagcaccuuccaccugagcauccccaacuucaaccaguacgaggccaugagcugcgacuucaacggcggcaagaucagcgugcaguacaaccugagccacaccuacgccaucgacgccgccaaccacugcggcaccaucgccaacggcgugcugcagaccuucaugagaauggccuggggcggcagcuacaucgcccuggacagcggcaagggcagcugggacugcaucaugaccagcuaccaguaccugaucauccagaacaccaccugggaggaccacugccaguucagcagacccagccccaucggcuaccugggccugcugagccagagaaccagagacaucuacaucagcagaagacugcugggcaccuucaccuggacccugagcgacagcgagggcaacgagacccccggcggcuacugccugaccagauggaugcugaucgaggccgagcugaagugcuucggcaacaccgccguggccaagugcaacgagaagcacgacgaggaguucugcgacaugcugagacuguucgacuucugcaagcaggccaucagaagacugaagacccccgcccagaugagcauccagcugaucaacaaggccgugaacgcccugaucaacgaccagcugaucaugaagaaccaccugagagacaucaugggcauccccuacugcaacuacagcaaguacugcuaccugaaccacaccgugaccggcaagaccagccugcccagaugcugccuggugagcaacggcagcuaccugaacgagacccacuucagcgacgacaucgagcagcaggccgacaacaugaucaccgagaugcugcagaaggaguacauggacagacagggcaagaccccccugggccugguggaccuguucguguucagcaccagcuucuaccugaucagcaucuuccugcaccuggugaagauccccacccacagacacgugaucggcaagcccugccccaagccccacagacugaaccacaugggcaucugcagcugcggccuguacaagcaccccggcgugcccgugaaguggaagagaugaggacuagucccuguucccagagcccacuuuuuuuucuuuuuuugaaauaaaauagccugucuuucagaucuaaaaaaaaaaaaaaaaaaaaaaaaaaaaaaaaaaaaaaaaaaaaaaaaaaaaaaaaaaaaaaaaaaaaaaaaaaaaaaaaaaaaaaaaaaaaaaaaaaaa

SEQ ID NO: 34007 - RNA, 1740 nt, Artificial Sequence
  mRNA product Design a-2 (A100) comprising derived and/or modified sequence from LASV(LASV237-NIG-2010;Clade II)__AIT17638__GPCmut8 (opt4)
aggagaguccgcucagccagguugcagaagcggcuuagcguguguccuaaucuucucucugcguguagguaggccugugccgcaaacaagcuuaccaugggccagaucaucaccuucuuccaggaggugccccacgugaucgaggaggugaugaacaucgugcugaucgcccugagccugcuggccauccugaagggcaucuacaacguggccaccugcggccuguucggccuggugagcuuccugcugcugugcggcagaagcugcagcaccaccuacaagggcguguacgagcugcagacccuggagcuggacauggccagccugaacaugugcaugccccugagcugcaccaagaacaacagccaccacuacaucauggugggcaacgagaccggccuggagcugacccugaccaacaccagcaucaucaaccacaaguucugcaaccugagcgacgcccacaagaaggaccuguacgaccacgcccugaugagcaucaucagcaccuuccaccugagcauccccaacuucaaccaguacgaggccaugagcugcgacuucaacggcggcaagaucagcgugcaguacaaccugagccacaccuacgccguggacgccgccaaccacugcggcaccaucgccaacggcgugcugcagaccuucaugagaauggccuggggcggcagcuacaucgcccuggacagcggcaagggcagcugggacugcaucaugaccagcuaccaguaccugaucauccagaacaccaccugggaggaccacugccaguucagcagacccagccccaucggcuaccugggccugcugagccagagaaccagagacaucuacaucagcagaagacugcugggcaccuucaccuggacccugagcgacagcgagggcaacgagacccccggcggcuacugccugaccagauggaugcugaucgaggccgagcugaagugcuucggcaacaccgccguggccaagugcaacgagaagcacgacgaggaguucugcgacaugcugagacuguucgacuucugcaagcaggccaucagaagacugaagacccccgcccagaugagcauccagcugaucaacaaggccgugaacgcccugaucaacgaccagcugaucaugaagaaccaccugagagacaucaugggcauccccuacugcaacuacagcaaguacugcuaccugaaccacaccgugaccggcaagaccagccugcccagaugcugccuggugagcaacggcagcuaccugaacgagacccacuucagcgacgacaucgagcagcaggccgacaacaugaucaccgagcugcugcagaaggaguacauggacagacagggcaagaccccccugggccugguggaccuguucguguucagcaccagcuucuaccugaucagcaucuuccugcaccugaucaagauccccacccacagacacaucaccggcaagcccugccccaagccccacagacugaaccacaugggcaucugcagcugcggccuguacaagcaccccggcgugcccgugaaguggaagagaugaggacuagucccuguucccagagcccacuuuuuuuucuuuuuuugaaauaaaauagccugucuuucagaucuaaaaaaaaaaaaaaaaaaaaaaaaaaaaaaaaaaaaaaaaaaaaaaaaaaaaaaaaaaaaaaaaaaaaaaaaaaaaaaaaaaaaaaaaaaaaaaaaaaaa

SEQ ID NO: 34008 - RNA, 1740 nt, Artificial Sequence
  mRNA product Design a-2 (A100) comprising derived and/or modified sequence from LASV(LASV253-NIG-2011;Clade II)__AIT17670__GPCmut8 (opt4)
aggagaguccgcucagccagguugcagaagcggcuuagcguguguccuaaucuucucucugcguguagguaggccugugccgcaaacaagcuuaccaugggccagaucaucaccuucuuccaggaggugccccacgugaucgaggaggugaugaacaucgugcugaucgcccugagccugcuggccauccugaagggcaucuacaacguggccaccugcggccuguucggccuggugagcuuccugcugcugugcggcagaagcugcagcaccaccuacaagggcguguacgagcugcagacccuggagcuggacauggccagccugaacaugugcaugccccugagcugcaccaagaacaacagccaccacuacaucauggugggcaacgagaccggccuggagcugacccugaccaacaccagcaucaucaaccacaaguucugcaaccugagcgacgcccacaagaagaaccuguacgaccacgcccugaugagcaucaucagcaccuuccaccugagcauccccaacuucaaccaguacgaggccaugagcugcgacuucaacggcggcaagaucagcgugcaguacaaccugagccacaccuacgccguggacgccgccaaccacugcggcaccaucgccaacggcgugcugcagaccuucaugagaauggccuggggcggcagcuacaucgcccuggacagcggcaagggcagcugggacugcaucaugaccagcuaccaguaccugaucauccagaacaccaccugggaggaccacugccaguucagcagacccagccccaucggcuaccugggccugcugagccagagaaccagagacaucuacaucagcagaagacugcugggcaccuucaccuggacccugagcgacagcgagggcaacgagacccccggcggcuacugccugaccagauggaugcugaucgaggccgagcugaagugcuucggcaacaccgccguggccaagugcaacgagaagcacgacgaggaguucugcgacaugcugagacuguucgacuucugcaagcaggccaucagaagacugaaggcccccgcccagaugagcauccagcugaucaacaaggccgugaacgcccugaucaacgaccagcugaucaugaagaaccaccugagagacaucaugggcauccccuacugcaacuacagcaaguacugcuaccugaaccacaccgugaccggcagaaccagccugcccagaugcugccuggugagcaacggcagcuaccugaacgagacccacuucagcgacgacaucgagcagcaggccgacaacaugaucaccgagcugcugcagaaggaguacaucgacagacagggcaagaccccccugggccugguggaccuguucguguucagcaccagcuucuaccugaucagcaucuuccugcaccuggugaagauccccacccacagacacaucaucggcaagcccugccccaagccccacagacugaaccacaugggcaucugcagcugcggccuguacaagcaccccggcgugcccgugaaguggaagagaugaggacuagucccuguucccagagcccacuuuuuuuucuuuuuuugaaauaaaauagccugucuuucagaucuaaaaaaaaaaaaaaaaaaaaaaaaaaaaaaaaaaaaaaaaaaaaaaaaaaaaaaaaaaaaaaaaaaaaaaaaaaaaaaaaaaaaaaaaaaaaaaaaaaaa

SEQ ID NO: 34009 - RNA, 1740 nt, Artificial Sequence
  mRNA product Design a-2 (A100) comprising derived and/or modified sequence from LASV(LASV254-NIG-2011;Clade II)__AIT17674__GPCmut8 (opt4)
aggagaguccgcucagccagguugcagaagcggcuuagcguguguccuaaucuucucucugcguguagguaggccugugccgcaaacaagcuuaccaugggccagaucaucaccuucuuccaggaggugccccacgugaucgaggaggugaugaacaucgugcugaucgcccugagccugcuggccauccugaagggcaucuacaacguggccaccugcggccuguucggccuggugagcuuccugcugcugugcggcagaagcugcagcaccaccuacaagggcguguacgagcugcagacccuggagcuggacaugaccaaccugaacaugugcaugccccugagcugcaccaagaacaacagccaccacuacaucauggugggcaacgagaccggccuggagcugacccugaccaacaccagcaucaucaaccacaaguucugcaaccugagcgacgcccacaagaagaaccuguacaaccacgcccugaugagcaucaucagcaccuuccaccugagcauccccaacuucaaccaguacgaggccaugagcugcgacuucaacggcggcaagaucagcgugcaguacaaccugagccacagcuacgccguggacgccgccaaccacugcggcaccaucgccaacggcgugcugcagaccuucaugagaauggccuggggcggcagcuacaucgcccuggacagcggcaagggcaacugggacugcaucaugaccagcuaccaguaccugaucauccagaacaccaccugggaggaccacugccaguucagcagacccagccccaucggcuaccugggccugcugagccagagaaccagagacaucuacaucagcagaagacugcugggcaccuucaccuggacccugagcgacagcgagggcaacgagacccccggcggcuacugccugaccagauggaugcugaucgaggccgagcugaagugcuucggcaacaccgccguggccaagugcaacgagaagcacgacgaggaguucugcgacaugcugagacuguucgacuucugcaagcaggccaucagaagacugaagacccccgcccaggccaacauccagcugaucaacaaggccgugaacgcccugaucaacgaccagcugaucaugaagaaccaccugagagacaucaugggcauccccuacugcaacuacagcaaguacugcuaccugaaccacaccgugaccggcaagaccagccugcccagaugcugccuggugagcaacggcagcuaccugaacgagacccacuucagcgacgacaucgagcagcaggccgacaacaugaucaccgagcugcugcagaaggaguacauggacagacagggcaagaccccccugggccugguggaccuguucguguucagcaccagcuucuaccugaucagcaucuuccugcaccuggugaagauccccacccacagacacgugaucggcaagcccugccccaagccccacagacugaaccacaugggcaucugcagcugcggccuguacaagcaccccggcgugcccgugaaguggaagagaugaggacuagucccuguucccagagcccacuuuuuuuucuuuuuuugaaauaaaauagccugucuuucagaucuaaaaaaaaaaaaaaaaaaaaaaaaaaaaaaaaaaaaaaaaaaaaaaaaaaaaaaaaaaaaaaaaaaaaaaaaaaaaaaaaaaaaaaaaaaaaaaaaaaaa

SEQ ID NO: 34010 - RNA, 1740 nt, Artificial Sequence
  mRNA product Design a-2 (A100) comprising derived and/or modified sequence from LASV(Nig08-A19;Clade III)__ADU56618__GPCmut8 (opt4)
aggagaguccgcucagccagguugcagaagcggcuuagcguguguccuaaucuucucucugcguguagguaggccugugccgcaaacaagcuuaccaugggccagaucgugaccuucuuccaggaggugccccacgugaucgaggaggugaugaacaucgugcugaucgcccugagcauccuggccauccugaagggccuguacaacaucgccaccugcggccugaucggccuggugaccuuccugcugcugagcggcagaagcugcagcaugaccuacaagggcguguacgagcugcagacccuggagcugaacaugaacacccugaacaugugcaugccccugagcugcaccaagaacaacagccaccacuacaucauggugggcaacgagaccggccuggagcugacccugaccaacaccagccugcugcaccacaaguucugcaaccugagcgacgcccacaagaagaaccuguacgaccacacccugaugagcaucaucagcaccuuccaccugagcauccccaacuucaaccaguacgaggccaugagcugcgacuucaacggcggcaagaucaccgugcaguacaaccugagccacagcuacgccaucgacgccgccaaccacugcggcaccguggccaacggcgugcugcagaccuucaugagaauggccuggggcggcagcuacaucgcccuggacagcggcagaggcaagugggacugcaucaugaccagcuaccaguaccugaucauccagaacaccaccugggaggaccacugccaguucagcagacccagccccaucggcuaccugggccugcugagccagagaaccagagacaucuacaucagcagaagacugcugggcaccuucaccuggacccugagcgacagcgagggcaacgagacccccggcggcuacugccugaccagauggaugcugaucgaggccgagcugaagugcuucggcaacaccgccguggccaagugcaacgagaagcacgacgaggaguucugcgacaugcugagacuguucgacuucugcaagcaggccaucagaagacugaaggcccccgcccagaugagcauccagcugaucaacaaggccgugaacgcccugaucaacgaccagcugaucaugaagaaccaccugagagacaucaugggcauccccuacugcaacuacagcaaguacugcuaccugaaccacaccagcaccggcagaaccagccugcccagaugcugccuggugagcaacggcagcuaccugaacgagacccacuucagcgacgacaucgagcagcaggccgacaacaugaucaccgagaugcugcagaaggaguaccuggacagacagggcaagaccccccugggccugguggaccuguucguguucagcaccagcuucuaccugaucagcaucuuccugcaccuggugaagauccccacccacagacacaucgugggcaagcccugccccaagccccacagacugaaccacaugggcaucugcagcugcggccuguacaagcagcccggcgugcccgugagauggaagagaugaggacuagucccuguucccagagcccacuuuuuuuucuuuuuuugaaauaaaauagccugucuuucagaucuaaaaaaaaaaaaaaaaaaaaaaaaaaaaaaaaaaaaaaaaaaaaaaaaaaaaaaaaaaaaaaaaaaaaaaaaaaaaaaaaaaaaaaaaaaaaaaaaaaaa

SEQ ID NO: 34011 - RNA, 1743 nt, Artificial Sequence
  mRNA product Design a-2 (A100) comprising derived and/or modified sequence from LASV(G1180-SLE-2010;Clade IV)__AIT17168__GPCmut8 (opt4)
aggagaguccgcucagccagguugcagaagcggcuuagcguguguccuaaucuucucucugcguguagguaggccugugccgcaaacaagcuuaccaugggccagaucgugaccuucuuccaggaggugccccacgugaucgaggaggugaugaacaucgugcugaucgcccugagcauccuggccgugcugaagggccuguacaacuucgccaccugcggccuggugggccugcugaccuuccugcugcugugcggcagaagcugcaccgccagcagauacaagggcguguacgagcugcagacccuggagcugaacauggagacccugaacaugugcaugccccugagcugcaccaagaacaacagccaccacuacaucauggugggcaacgagaccggccuggagcugacccugaccaacaccagcaucaucaaccacaaguucugcaaccugagcgacgcccacaagaagaaccuguacgaccacgcccugaugagcaucaucagcaccuuccaccugagcauccccaacuucaaccaguacgaggccaugagcugcgacuucaacggcggcaagaucagcgugcaguacaaccugagccacagcuacgccggcgacgccgccaaccacugcggcaccguggccaacggcgugcugcagaccuucaugagaauggccuggggcggcagcuacaucgcccuggacagcggccacggcagcugggacugcaucaugaccagcuaccaguaccugaucauccagaacaccaccugggaggaccacugccaguucagcagacccagccccaucggcuaccugggccugcugagccagagaaccagagacaucuacaucagcagaagacugcugggcaccuucaccuggacccugagcgacagcgagggcaaggacacccccggcggcuacugccugaccagauggaugcugaucgaggccgagcugaagugcuucggcaacaccgccguggccaagugcaacgagaagcacgacgaggaguucugcgacaugcugagacuguucgacuucugcaagcaggccauccagagacugaaggcccccgcccagaugagcauccagcugaucaacaaggccgugaacgcccugaucaacgaccagcugaucaugaagaaccaccugagagacaucaugggcauccccuacugcaacuacagcaaguacugcuaccugaaccacaccaccaccggcaagaccagccugcccaagugcugccuggugagcaacggcagcuaccugaacgagacccacuucagcgacgacaucgagcagcaggccgacaacaugaucaccgagaugcugcagaaggaguacauggagagacagggcaagaccccccugggccugguggaccuguucguguucagcaccagcuucuaccugaucagcaucuuccugcaccuggugaagauccccacccacagacacaucgugggcaagagcugccccaagccccacagacugaaccacaugggcaucugcagcugcggccuguacaagcagcccggcgugcccgugaaguggaagagaugaggacuagucccuguucccagagcccacuuuuuuuucuuuuuuugaaauaaaauagccugucuuucagaucuaaaaaaaaaaaaaaaaaaaaaaaaaaaaaaaaaaaaaaaaaaaaaaaaaaaaaaaaaaaaaaaaaaaaaaaaaaaaaaaaaaaaaaaaaaaaaaaaaaaa

SEQ ID NO: 34012 - RNA, 1743 nt, Artificial Sequence
  mRNA product Design a-2 (A100) comprising derived and/or modified sequence from LASV(G1442-SLE-2011;Clade IV)__AIT17180__GPCmut8 (opt4)
aggagaguccgcucagccagguugcagaagcggcuuagcguguguccuaaucuucucucugcguguagguaggccugugccgcaaacaagcuuaccaugggccagaucgugaccuucuuccaggaggugccccacgugaucgaggaggugaugaacaucgugcugaucgcccugagcauccuggccgugcugaagggccuguacaacguggccaccugcggccugaucggccuggugaccuuccugcugcugugcggcagaagcugcaccaccacccuguacaagggcguguacgagcugcagacccuggagcugaacauggagacccugaacaugugcaugccccugagcugcaccaagaacaacagccaccacuacaucagagugggcaacgagaccggccuggagcugacccugaccaacaccagcaucaucaaccacaaguucugcaaccugagcgacgcccacaagaagaaccuguacgaccacgcccugaugagcaucaucagcaccuuccaccugagcauccccaacuucaaccaguacgaggccaugagcugcgacuucaacggcggcaagaucagcgugcaguacaaccugagccacagcuacgccggcgacgccgccaaccacugcggcaccguggccaacggcgugcugcagaccuucaugagaauggccuggggcggcagcuacaucgcccuggacagcggcagaggcaacugggacugcaucaugaccagcuaccaguaccugaucauccagaacaccaccugggacgaccacugccaguucagcagacccagccccaucggcuaccugggccugcugagccagagaaccagagacguguacaucagcagaagacugcugggcaccuucaccuggacccugagcgacagcgagggcaaggacacccccggcggcuacugccugaccagauggaugcugaucgaggccgagcugaagugcuucggcaacaccgccguggccaagugcaacgagaagcacgacgaggaguucugcgacaugcugagacuguucgacuucugcaagcaggccauccagagacugaaggcccccgcccagaugagcauccagcugaucaacaaggccgugaacgcccugaucaacgaccagcugaucaugaagaaccaccugagagacaucaugggcauccccuacugcaacuacagcaaguacugcuaccugaacaacaccgccaccggcaagaccagccugcccaagugcugccugaucagcaacggcagcuaccugaacgagacccacuucagcgacgacaucgagcaggaggccgacaacaugaucaccgagaugcugcagaaggaguacauggagagacagggcaagaccccccugggccugguggaccuguucguguucagcaccagcuucuaccugaucagcaucuuccugcaccuggugaagauccccacccacagacacaucgugggcaagagcugccccaagccccacagacugaaccacaugggcaucugcagcugcggccuguacaagcagcccggcgugcccgugagauggaagagaugaggacuagucccuguucccagagcccacuuuuuuuucuuuuuuugaaauaaaauagccugucuuucagaucuaaaaaaaaaaaaaaaaaaaaaaaaaaaaaaaaaaaaaaaaaaaaaaaaaaaaaaaaaaaaaaaaaaaaaaaaaaaaaaaaaaaaaaaaaaaaaaaaaaaa

SEQ ID NO: 34013 - RNA, 1743 nt, Artificial Sequence
  mRNA product Design a-2 (A100) comprising derived and/or modified sequence from LASV(G3010-SLE-2013;Clade IV)__AIT17344__GPCmut8 (opt4)
aggagaguccgcucagccagguugcagaagcggcuuagcguguguccuaaucuucucucugcguguagguaggccugugccgcaaacaagcuuaccaugggccagaucgugaccuucuuccaggaggugccccacgugaucgaggaggugaugaacaucgugcugaucgcccugagcauccuggccgugcugaagggccuguacaacuucgccaccugcggccuggugggccuggugaccuuccugcugcugugcggcagaagcugcaccaccagccuguacaagggcguguacgagcugcagacccuggagcugaacauggagacccugaacaugugcaugccccugagcugcaccaagaacaacagccaccacuacaucauggugggcaacgagaccggccuggagcugacccugaccaacaccagcaucaucaaccacaaguucugcaaccugagcgacgcccacaagaagaaccuguacaaccacgcccugaugagcaucaucagcaccuuccaccugagcauccccaacuucaaccaguacgaggccaugagcugcgacuucaacggcggcaagaucagcgugcaguacaaccugagccacagcuacgccggcgacgccgccagccacugcggcaccguggccaacggcgugcugcagaccuucaugagaauggccuggggcggcagcuacaucgcccuggacagcggcuacggcaagugggacugcaucaugaccagcuaccaguaccugaucauccagaacaccaccugggaggaccacugccaguucagcagacccagccccaucggcuaccugggccugcugagccagagaaccagagacaucuacaucagcagaagacugcugggcaccuucaccuggacccugagcgacagcgagggcaaggacacccccggcggcuacugccugaccagauggaugcugaucgaggccgagcugaagugcuucggcaacaccgccguggccaagugcaacgagaagcacgacgaggaguucugcgacaugcugagacuguucgacuucugcaagcaggccauccagagacugaagacccccgcccagaugagcauccagcugaucaacaaggccgugaacgcccugaucaacgaccagcugaucaugaagaaccaccugagagacaucaugggcauccccuacugcaacuacagcaaguacugcuaccugaaccacaccaccaccggcaagaccagccugcccaagugcugccuggugagcaacggcagcuaccugaacgagacccacuucagcgacgacaucgagcagcaggccgacaacaugaucaccgagaugcugcagaaggaguacauggagagacagggcaagaccccccugggccugguggaccuguucguguucagcaccagcuucuaccugaucagcaucuuccugcaccuggugaagauccccacccacagacacaucgugggcaagagcugccccaagccccacagacugaaccacaugggcaucugcagcugcggccuguacaagcagcccggcgugcccgugagauggaagagaugaggacuagucccuguucccagagcccacuuuuuuuucuuuuuuugaaauaaaauagccugucuuucagaucuaaaaaaaaaaaaaaaaaaaaaaaaaaaaaaaaaaaaaaaaaaaaaaaaaaaaaaaaaaaaaaaaaaaaaaaaaaaaaaaaaaaaaaaaaaaaaaaaaaaa

SEQ ID NO: 34014 - RNA, 1743 nt, Artificial Sequence
  mRNA product Design a-2 (A100) comprising derived and/or modified sequence from LASV(G502-SLE-2009;Clade IV)__AIT17126__GPCmut8 (opt4)
aggagaguccgcucagccagguugcagaagcggcuuagcguguguccuaaucuucucucugcguguagguaggccugugccgcaaacaagcuuaccaugggccagaucgugaccuucuuccaggaggugccccacgugaucgaggaggugaugaacaucgugcugaucgcccugagcauccuggccgugcugaagggccuguacaacuucgccaccugcggccuggugggccugcugaccuuccugcugcugugcggcagaagcugcaccaccggccuguacaagggcguguacgagcugcagacccuggagcugaacauggagacccugaacaugugcaugccccugagcugcaccaagaacaacagccaccacuacaucauggugggcaacgagaccggccuggagcugacccugaccaacaccagcaucaucaaccacaaguucugcaaccugagcgacgcccacaagaagaaccuguacgaccacgcccugaugagcaucaucagcaccuuccaccugagcauccccaacuucaaccaguacgaggccaugagcugcgacuucaacggcggcaagaucagcgugcaguacaaccugagccacagcuacgccggcgacgccgccgaccacugcggcaccguggccaacggcgugcugcagaccuucaugagaauggccuggggcggcagcuacaucgcccuggacagcggcagaggcagaugggacugcaucaugaccagcuaccaguaccugaucauccagaacaccaccugggaggaccacugccaguucagcagacccagccccaucggcuaccugggccugcugagccagagaaccagagacaucuacaucagcagaagacugcugggcaccuucaccuggacccugagcgacagcgagggcaaggacacccccggcggcuacugccugaccagauggaugcugaucgaggccgagcugaagugcuucggcaacaccgccguggccaagugcaacgagaagcacgacgaggaguucugcgacaugcugagacuguucgacuucugcaagcaggccauccagagacugaaggcccccgcccagaugagcauccagcugaucaacaaggccgugaacgcccugaucaacgaccagcuggugaugaagaaccaccugagagacaucaugggcauccccuacugcaacuacagcagauacugcuaccugaaccacaccaccaccggcagaaccagccugcccaagugcugccuggugagcaacggcagcuaccugaacgagacccacuucagcgacgacaucgagcagcaggccgacaacaugaucaccgagaugcugcagaaggaguacauggagagacagggcaagaccccccugggccugguggaccuguucguguucagcaccagcuucuaccugaucagcaucuuccugcaccuggugaagauccccacccacagacacaucgugggcaagagcugccccaagccccacagacugaaccacaugggcaucugcagcugcggccuguacaagcagcccggcgugcccgugaaguggaagagaugaggacuagucccuguucccagagcccacuuuuuuuucuuuuuuugaaauaaaauagccugucuuucagaucuaaaaaaaaaaaaaaaaaaaaaaaaaaaaaaaaaaaaaaaaaaaaaaaaaaaaaaaaaaaaaaaaaaaaaaaaaaaaaaaaaaaaaaaaaaaaaaaaaaaa

SEQ ID NO: 34015 - RNA, 1743 nt, Artificial Sequence
  mRNA product Design a-2 (A100) comprising derived and/or modified sequence from LASV(G733-SLE-2010;Clade IV)__AIT17154__GPCmut8 (opt4)
aggagaguccgcucagccagguugcagaagcggcuuagcguguguccuaaucuucucucugcguguagguaggccugugccgcaaacaagcuuaccaugggccagaucgugaccuucuuccaggaggugccccacgugaucgaggaggugaugaacaucgugcugaucgcccugagcauccuggccgugcugaagggccuguacaacuucgccaccugcggcaucgugggccuggugagcuuccugcugcugugcggcagaagcugcaccaccagccuguacaagggcguguacgagcugcagacccuggagcugaacauggagacccugaacaugugcaugccccugagcugcaccaagaacaacagccaccacuacaucauggugggcaacgagaccggccuggagcugacccugaccaacaccagcaucaucaaccacaaguucugcaaccugagcgacgcccacaagaagaaccuguacgaccacgcccugaugagcaucaucagcaccuuccaccugagcauccccaacuucaaccaguacgaggccaugagcugcgacuucaacggcggcaagaucagcgugcaguacaaccugagccacagcuacgccggcgacgccgccaaccacugcggcaccaucgccaacggcgugcugcagaccuucaugagaauggccuggggcggcagcuacaucgcccuggacagcggcagagacagaugggacugcaucaugaccagcuaccaguaccugaucauccagaacaccaccugggaggaccacugccaguucagcagacccagccccaucggcuaccugggccugcugagccagagaaccagagacaucuacaucagcagaagacugcugggcaccuucaccuggacccugagcgacagcgagggcaaggacacccccggcggcuacugccugaccagauggaugcugaucgaggccgagcugaagugcuucggcaacaccgccguggccaagugcaacgagaagcacgacgaggaguucugcgacaugcugagacuguucgacuucugcaagcaggccauccagagacugaaggcccccgcccagaugagcauccagcugaucaacaaggccgugaacgcccugaucaacgaccagcugaucaugaagaaccaccugagagacaucaugggcauccccuacugcaacuacagcaaguacugcuaccugaaccacaccaccaccggcaagaccagccugcccaagugcugccuggugagcaacggcagcuaccugaacgagacccacuucagcgacgacaucgagcagcaggccgacaacaugaucaccgagaugcugcagaaggaguacauggagagacagggcaagaccccccugggccugguggaccuguucguguucagcaccagcuucuaccugaucagcaucuuccugcaccuggugaagauccccacccacagacacguggugggcaagagcugccccaagccccacagacugaaccacaugggcaucugcagcugcggccuguacggccagcccggcgugcccgugaaguggaagagaugaggacuagucccuguucccagagcccacuuuuuuuucuuuuuuugaaauaaaauagccugucuuucagaucuaaaaaaaaaaaaaaaaaaaaaaaaaaaaaaaaaaaaaaaaaaaaaaaaaaaaaaaaaaaaaaaaaaaaaaaaaaaaaaaaaaaaaaaaaaaaaaaaaaaa

SEQ ID NO: 34016 - RNA, 1743 nt, Artificial Sequence
  mRNA product Design a-2 (A100) comprising derived and/or modified sequence from MOPV/LASV reassortant(IGS-1;Clade IV)__AFY05576__GPCmut8 (opt4)
aggagaguccgcucagccagguugcagaagcggcuuagcguguguccuaaucuucucucugcguguagguaggccugugccgcaaacaagcuuaccaugggccagaucgugaccuucuuccaggaggugccccacgugaucgaggaggugaugaacaucgugcugaucgcccugagcgugcuggccgugcugaagggccuguacaacuucgccaccugcggccuggugggccuggugaccuuccugcugcugugcggcagaagcugcaccaccagccuguacaagggcguguacgagcugcagacccuggagcugaacauggagacccugaacaugugcaugccccugagcugcaccaagaacaacagccaccacuacaucauggugggcaacgagaccggccuggagcugacccugaccaacaccagcaucaucaaccacaaguucugcaaccugagcgacgcccacaagaagaaccuguacgaccacgcccugaugagcaucaucagcaccuuccaccugagcauccccaacuucaaccaguacgaggccaugagcugcgacuucaacggcggcaagaucagcgugcaguacaaccugagccacagcuacgccggcgacgccgccaaccacugcggcaccguggccaacggcgugcugcagaccuucaugagaauggccuggggcggcagcuacaucgcccuggacagcggcagaggcaacugggacugcaucaugaccagcuaccaguaccugaucauccagaacaccaccugggaggaccacugccaguucagcagacccagccccaucggcuaccugggccugcugagccagagaaccagagacaucuacaucagcagaagacugcugggcaccuucaccuggacccugagcgacagcgagggcgaggacacccccggcggcuacugccugaccagauggaugcugaucgaggccgagcugaagugcuucggcaacaccgccguggccaagugcaacgagaagcacgacgaggaguucugcgacaugcugagacuguucgacuucugcaagcaggccauccagagacugaaggcccccgcccagaugagcauccagcugaucaacaaggccgugaacgcccugaucaacgaccagcugaucaugaagaaccaccugagagacaucaugggcauccccuacugcaacuacagcaaguacugcuaccugaaccacaccaccaccggcagaaccagccugcccaagugcugccuggugagcaacggcagcuaccugaacgagacccacuucagcgacgacaucgagcagcaggccgacaacaugaucaccgagaugcugcagaaggaguacauggagagacagggcaagaccccccugggccugguggaccuguucguguucagcaccagcuucuaccugaucagcaucuuccugcaccuggugaagauccccacccacagacacaucgugggcaagagcugccccaagccccacagacugaaccacaugggcaucugcagcugcggccuguacaagcagcccggcgugcccgugaaguggaagagaugaggacuagucccuguucccagagcccacuuuuuuuucuuuuuuugaaauaaaauagccugucuuucagaucuaaaaaaaaaaaaaaaaaaaaaaaaaaaaaaaaaaaaaaaaaaaaaaaaaaaaaaaaaaaaaaaaaaaaaaaaaaaaaaaaaaaaaaaaaaaaaaaaaaaa

SEQ ID NO: 34017 - RNA, 1743 nt, Artificial Sequence
  mRNA product Design a-2 (A100) comprising derived and/or modified sequence from LASV(LM765-SLE-2012;Clade IV)__AIT17814__GPCmut8 (opt4)
aggagaguccgcucagccagguugcagaagcggcuuagcguguguccuaaucuucucucugcguguagguaggccugugccgcaaacaagcuuaccaugggccagaucgugaccuucuuccaggaggugccccacgugaucgaggaggugaugaacaucgugcugaucgcccugagcauccuggccgugcugaagggccuguacaacuucgccaccugcggccuggugggccuggugaccuuccugcugcugugcggcagaagcugcaccaccagccuguacaagggcguguacgagcugcagacccuggagcugaacauggagacccugaacaugugcaugccccugagcugcaccaagaacaacagccaccacuacaucauggugggcaacgagaccggccuggagcugacccugaccaacaccagcaucaucgaccacaaguucugcaaccugagcgacgcccacagaaagaaccuguacgaccacgcccugaugagcaucaucagcaccuuccaccugagcauccccaacuucaaccaguacgaggccaugagcugcgacuucaacggcggcaagaucagcgugcaguacaaccugagccacagcuacgccaaggacgccgccgaccacugcggcaccguggccaacggcgugcugcagaccuucaugagaauggccuggggcggcagcuacaucgcccuggacagcggcagaggcagaugggacugcaucaugaccagcuaccaguaccugaucauccagaacaccaccugggaggaccacugccaguucagcagacccagccccaucggcuaccugggccugcugagccagagaaccagagacaucuacaucagcagaagacugcugggcaccuucaccuggacccugagcgacagcgagggcaaggacacccccggcggcuacugccugaccagauggaugcugaucgaggccgagcugaagugcuucggcaacaccgccguggccaagugcaacgagaagcacgacgaggaguucugcgacaugcugagacuguucgacuucugcaagcaggccauccagagacugaaggcccccgcccagaugagcauccagcugaucaacaaggccgugaacgcccugaucaacgaccagcugaucaugaagaaccaccugagagacaucaugggcauccccuacugcaacuacagcaaguacugcuaccugaaccacaccaccaccggcaagaccagccugcccaagugcugccuggugagcaacggcagcuaccugaacgagacccacuucagcgacgacaucgagcagcaggccgacaacaugaucaccgagaugcugcagaaggaguacauggagagacagggcaagaccccccugggccugguggaccuguucguguucagcaccagcuucuaccugaucagcaucuuccugcaccuggugaagauccccacccacagacacaucgugggcaagcccugccccaagccccacagacugaaccacaugggcaucugcagcugcggccuguacaagcagcccggcgugcccgugaaguggaagagaugaggacuagucccuguucccagagcccacuuuuuuuucuuuuuuugaaauaaaauagccugucuuucagaucuaaaaaaaaaaaaaaaaaaaaaaaaaaaaaaaaaaaaaaaaaaaaaaaaaaaaaaaaaaaaaaaaaaaaaaaaaaaaaaaaaaaaaaaaaaaaaaaaaaaa

SEQ ID NO: 34018 - RNA, 1743 nt, Artificial Sequence
  mRNA product Design a-2 (A100) comprising derived and/or modified sequence from LASV(LM776-SLE-2012;Clade IV)__AIT17824__GPCmut8 (opt4)
aggagaguccgcucagccagguugcagaagcggcuuagcguguguccuaaucuucucucugcguguagguaggccugugccgcaaacaagcuuaccaugggccagaucgugaccuucuuccaggaggugccccacgugaucgaggaggugaugaacaucgugcugaucgcccugagcauccuggccgugcugaagggccuguacaacuucgccaccugcggccuggugggccuggugaccuuccugcugcugugcggcagaagcugcaccaccagcguguacaagggcguguacgagcugcagacccuggagcugaacauggagacccugaacaugugcaugccccugagcugcaccaagaacaacagccaccacuacaucauggugggcaacgagaccggccuggagcugacccugaccaacaccagcaucaucaaccacaaguucugcaaccugagcgacgcccacaagaagaaccuguacgaccacgcccugaugagcaucaucagcaccuuccaccugagcauccccaacuucaaccaguacgaggccaugagcugcgacuucaacggcggcaagaucagcgugcaguacaaccugagccacagcuacgccggcgacgccgccaaccacugcggcaccguggccaacggcgugcugcagaccuucaugagaauggccuggggcggcagcuacaucgcccuggacagcggccacggcaagugggacugcaucaugaccagcuaccaguaccugaucauccagaacaccaccugggaggaccacugccaguucagcagacccagccccaucggcuaccugggccugcugagccagagaaccagagacaucuacaucagcagaagacugcugggcaccuucaccuggacccugagcgacagcgagggcaaggacacccccggcggcuacugccugaccagauggaugcugaucgaggccgagcugaagugcuucggcaacaccgccguggccaagugcaacgagaagcacgacgaggaguucugcgacaugcugagacuguucgacuucugcaagcaggccauccagagacugaaggcccccgcccagaugagcauccagcugaucaacaaggccgugaacgcccugaucaacgaccagcugaucaugaagaaccaccugagagacaucaugggcauccccuacugcaacuacagcaaguacugcuaccugaaccacaccaccaccggcaagaccagccugcccaagugcugccuggugagcaacggcagcuaccugaacgagacccacuucagcgacgacaucgagcagcaggccgacaacaugaucaccgagaugcugcagaaggaguacauggagagacagggcaagaccccccugggccugguggaccuguucguguucagcaccagcuucuaccugaucagcaucuuccugcaccuggugaagauccccacccacagacacaucgugggcaagagcugccccaagccccacagacugaaccacaugggcaucugcagcugcggccuguacaagcagcccggcgugcccgugagauggaagagaugaggacuagucccuguucccagagcccacuuuuuuuucuuuuuuugaaauaaaauagccugucuuucagaucuaaaaaaaaaaaaaaaaaaaaaaaaaaaaaaaaaaaaaaaaaaaaaaaaaaaaaaaaaaaaaaaaaaaaaaaaaaaaaaaaaaaaaaaaaaaaaaaaaaaa

SEQ ID NO: 34019 - RNA, 1743 nt, Artificial Sequence
  mRNA product Design a-2 (A100) comprising derived and/or modified sequence from LASV(Mad39;Clade IV)__ANH09722__GPCmut8 (opt4)
aggagaguccgcucagccagguugcagaagcggcuuagcguguguccuaaucuucucucugcguguagguaggccugugccgcaaacaagcuuaccaugggccagaucgugaccuucuuccaggaggugccccacgugaucgaggaggugaugaacaucgugcugaucgcccugagcauccuggccgugcugaagggccuguacaacguggccaccugcggccugaucggccuggugaccuuccugcugcugugcggcagaagcugcaccaccacccuguacaagggcguguacgagcugcaggcccuggagcugaacauggagacccugaacaugugcaugccccugagcugcaccaagaacaacagccaccacuacaucagagugggcaacgagaccggccuggagcugacccugaccaacaccagccugaucaaccacaaguucugcaaccugagcgacgcccacaagaagaaccuguacgaccacgcccugaugagcaucaucagcaccuuccaccugagcauccccaacuucaaccaguacgaggccaugagcugcgacuucaacgacggcaagaucagcgugcaguacaaccugagccacaccuacgccggcgacaccgccaaccacugcggcaccguggccaacggcgugcugcagaccuucaugagaauggccuggggcggcagcuacaucgcccuggacagcggcagaggcggcugggacugcaucaugaccagcuaccaguaccugaucauccagaacaccaccugggaggaccacugccaguucagcagacccagccccaucggcuaccugggccugcugagccagagaaccagagacaucuacaucagcagaagacugcugggcaccuucaccuggacccugagcgacagcgagggcaaggacacccccggcggcuacugccugaccagauggaugcugaucgaggccgagcugaagugcuucggcaacaccgccguggccaagugcaacgagaagcacgacgaggaguucugcgacaugcugagacuguucgacuucugcaagcaggccauccagagacugaaggcccccgcccagaugagcauccagcugaucaacaaggccgugaacgcccugaucaacgaccagcugaucaugaagaaccaccugagagacaucaugggcauccccuacugcaacuacagcaaguacugcuaccugaaccacaccgugaccggcaagaccagccugcccaagugcugccuggugagcaacggcagcuaccugaacgagacccacuucagcgacgacaucgagcagcaggccgacaacaugaucaccgagaugcugcagaaggaguacauggagagacagggcaagaccccccugggccugguggaccuguucguguucagcaccagcuucuaccugaucagcaucuuccugcaccuggugaagauccccacccacagacacguggugggcaagcccugccccaagccccacagacugaaccacaugggcaucugcagcugcggcuucuacaagcagcccggcgugcccgugagauggaagagaugaggacuagucccuguucccagagcccacuuuuuuuucuuuuuuugaaauaaaauagccugucuuucagaucuaaaaaaaaaaaaaaaaaaaaaaaaaaaaaaaaaaaaaaaaaaaaaaaaaaaaaaaaaaaaaaaaaaaaaaaaaaaaaaaaaaaaaaaaaaaaaaaaaaaa

SEQ ID NO: 34020 - RNA, 1743 nt, Artificial Sequence
  mRNA product Design a-2 (A100) comprising derived and/or modified sequence from LASV(Z0947-SLE-2011;Clade IV)__AIT17840__GPCmut8 (opt4)
aggagaguccgcucagccagguugcagaagcggcuuagcguguguccuaaucuucucucugcguguagguaggccugugccgcaaacaagcuuaccaugggccagaucgugaccuucuuccaggaggugccccacgugaucgaggaggugaugaacaucgugcugaucgcccugagcauccuggccgugcugaagggccuguacaacuucgccaccugcggccuggugggccuggugaccuuccugcugcugugcggcagaagcugcaccaucagccuguacaagggcguguacgagcugcagacccuggagcugaacauggagacccugaacaugugcaugccccugagcugcaccaagaacaacagccaccacuacaucauggugggcaacgagaccggccuggagcugacccugaccaacaccagcaucaucaaccacaaguucugcaaccugagcgacgcccacaagaagaaccuguacgaccacgcccugaugagcaucaucagcaccuuccaccugagcauccccaacuucaaccaguacgaggccaugagcugcgacuucaacggcggcaagaucagcgugcaguacaaccugagccacagcuacgccggcgacgccgccaaccacugcggcaccguggccaacggcgugcugcagaccuucaugagaauggccuggggcggcagcuacaucgcccuggacagcggcagagacagaugggacugcaucaugaccagcuaccaguaccugaucauccagaacaccaccugggaggaccacugccaguucagcagacccagccccaucggcuaccugggccugcugagccagagaaccagagacaucuacaucagcagaagacugcugggcaccuucaccuggacccugagcgacagcgagggcaaggacacccccggcggcuacugccugaccagauggaugcugaucgaggccgagcugaagugcuucggcaacaccgccguggccaagugcaacgagaagcacgacgaggaguucugcgacaugcugagacuguucgacuucugcaagcaggccauccagagacugaaggcccccgcccagaugagcauccagcugaucaacaaggccgugaacgcccugaucaacgaccagcugaucaugaagaaccaccugagagacaucaugggcauccccuacugcaacuacagcaaguacugcuaccugaaccacaccaccaccggcaagaccagccugcccaagugcugccuggugagcaacggcagcuaccugaacgagacccacuucagcgacgacaucgagcagcaggccgacaacaugaucaccgagaugcugcagaaggaguacauggagagacagggcaagaccccccugggccugguggaccuguucguguucagcaccagcuucuaccugaucagcaucuuccugcaccuggugaagauccccacccacagacacaucgugggcaagcccugccccaagccccacagacugaaccacaugggcaucugcagcugcggccuguacaagcagcccggcgugcccgugaaguggaagagaugaggacuagucccuguucccagagcccacuuuuuuuucuuuuuuugaaauaaaauagccugucuuucagaucuaaaaaaaaaaaaaaaaaaaaaaaaaaaaaaaaaaaaaaaaaaaaaaaaaaaaaaaaaaaaaaaaaaaaaaaaaaaaaaaaaaaaaaaaaaaaaaaaaaaa

SEQ ID NO: 34021 - RNA, 1743 nt, Artificial Sequence
  mRNA product Design a-2 (A100) comprising derived and/or modified sequence from LASV(Josiah;Clade IV)__NP_694870__GPCmut8 (opt5)
aggagaguccgcucagccagguugcagaagcggcuuagcguguguccuaaucuucucucugcguguagguaggccugugccgcaaacaagcuuaccaugggccagaucgugaccuucuuucaagaggucccccacguuauugaagaggugaugaacaucgugcugauugcccucagcguccuggcugugcuuaaggggcuguacaauuucgccacaugcggacucguuggccuggugacguuucuucugcucugugggagauccugcaccacaucucuguauaaaggagucuacgaacugcagacccucgagcugaacauggaaacacuuaauauguguaugccucugagcugcaccaagaacaauucccaucacuauaucauggugggcaacgagacagggcucgagcugacccuuacgaauaccucuauuaucaaccauaaauucuguaaucugagcgacgcgcacaagaaaaaccucuacgaucaugcucugauguccaucauuucuacauuucaccugagcaucccgaauuucaaccaguaugaagccauguccugcgacuuuaauggaggcaagauuagcguucaguacaaccucucucacuccuaugccggcgaugcugccaaucauugugggaccguggcuaacggaguccugcaaacauucaugcggauggccuggggcgggagcuacaucgcgcuugacucuggacgcggcaacugggauugcauuaugaccuccuaccaguaucugaucauucagaauacgacaugggaggaccacugucaguuuagcagacccucuccuaucggguaccucggacugcuuucccaacggacccgcgauaucuauauuagcagacggcugcucggcacauucaccuggacccuguccgacucugaaggcaaggauacacccgggggauacugccugacgcgcuggaugcucaucgaggccgagcugaaauguuuuggcaacaccgcuguggccaagugcaaugaaaaacaugacgaggaguucugcgauaugcuuagacuguuugacuucuguaagcaggcuauucagcggcucaaagccccugcgcagaugagcauccaacugauuaacaaggccgugaaugcucuuaucaacgaucagcugaucaugaagaaucaccuccgcgacauuauggggauccccuauugcaacuacuccaaauauuguuaccugaaucacacaaccacaggaagaaccagccugccuaagugcugucucgucucuaacggcuccuaccugaaugaaacgcauuucagcgacgauauugaacagcaagccgacaacaugaucacagagaugcuucagaaagaguauauggaacggcaggggaagaccccgcugggacucguugaucuguuuguguucucuaccagcuuuuaccugauuuccaucuuccuucaccucgugaaaauccccacacaucgccacauugucggcaagucuugcccuaaaccccauagacugaaucacaugggcaucuguagcugcgggcuguauaagcagccuggagugcccguuaaguggaaacggugaggacuagucccuguucccagagcccacuuuuuuuucuuuuuuugaaauaaaauagccugucuuucagaucuaaaaaaaaaaaaaaaaaaaaaaaaaaaaaaaaaaaaaaaaaaaaaaaaaaaaaaaaaaaaaaaaaaaaaaaaaaaaaaaaaaaaaaaaaaaaaaaaaaaa

SEQ ID NO: 34022 - RNA, 1740 nt, Artificial Sequence
  mRNA product Design a-2 (A100) comprising derived and/or modified sequence from LASV(LP;Clade I)__AAF86701__GPCmut8 (opt5)
aggagaguccgcucagccagguugcagaagcggcuuagcguguguccuaaucuucucucugcguguagguaggccugugccgcaaacaagcuuaccaugggccagaucauuaccuucuuucaagaggugccccacgucaucgaagagguuaugaacauugugcugaucgcccucagccugcuugcuauucugaaggggcucuacaauaucgccacaugcggaaucauuggccugguggcguuccuuuuucugugugggaaauccugcucucucacgcugaagggaggcuaugaacugcagacccucgagcugaacauggaaacacuuaauauguguaugccucugagcugcaccaaaaacuccucucaucacuacaucagagucgggaaugagacaggacucgagcugacccuuacaaacaccagcauuaucaaucauaaguucuguaaccuguccgacgcucacaaaaagaaucucuaugaucaugcccugaugucuauuaucagcacguuucaccuguccauuccgaacuucaaucaguacgaagccaugagcugcgacuuuaacggcggcaagaucucugugcaguauaaucucucccacagcuacgcuggggaugccgcugagcauuguggaaccguugccaacggcgugcugcaaacauucaugcggauggcguggggagggcgcuauaucgcccuugacucuggcaaagggaauugggauugcauuaugaccuccuaccaguaccugaucauucagaacacaaccugggaagaccacugucaguuuagcagacccucuccuaucggauaucucggccugcuuucccaacggacgcgcgauauuuacaucagcagacggcugcucggcacauucaccuggacacuguccgacucugaggggaacgagacccccggaggcuauugccugacccgcuggaugcucaucgaagcugagcugaaguguuuugggaauacagccgucgcuaaaugcaacgaaaagcaugaugaggaguucugcgacaugcuuagacuguuugauuucuguaaacaggccauucggcgccucaaggcgccugcccagaugagcauccagcugauuaauaaggcugugaacgcccuuaucaaugaccaacugauuaugaaaaaccaccucagagauaucaugggaauccccuacugcaauuauuccaaguacuguuaucugaaccacacgagcucuggccggaccucccugccuaaaugcugucucauuagcaaugggucuuaccugaacgaaacacaguucagcgacgacaucgagcagcaagcugauaauaugauuaccgaaaugcuucagaaggaguacaucgaacgccagggaaaaacaccgcugggccucguugacauuuuuaucuucuccaccucuuuuuaucugauuagcaucuuccugcaucuuaucaagauucccacgcacagacauaucgugggcaaaccuugccccaagccucaccggcucaaccauaugggggucuguuccugcggacuguacaagcaccccggcgugccgacaaaauggaagcgcugaggacuagucccuguucccagagcccacuuuuuuuucuuuuuuugaaauaaaauagccugucuuucagaucuaaaaaaaaaaaaaaaaaaaaaaaaaaaaaaaaaaaaaaaaaaaaaaaaaaaaaaaaaaaaaaaaaaaaaaaaaaaaaaaaaaaaaaaaaaaaaaaaaaaa

SEQ ID NO: 34023 - RNA, 1740 nt, Artificial Sequence
  mRNA product Design a-2 (A100) comprising derived and/or modified sequence from LASV(803213;Clade II)__AAF86703__GPCmut8 (opt5)
aggagaguccgcucagccagguugcagaagcggcuuagcguguguccuaaucuucucucugcguguagguaggccugugccgcaaacaagcuuaccaugggccagaucauuaccuucuuucaagaggugccccacgucaucgaagagguuaugaacauugugcugaucgcccucagccugcuugcuauucugaaggggaucuacaauguggccacaugcggacucuucggccugaucuccuuucuucugcucugugggagaucuugcagcgucacguauaaaggaguguacgaacugcagacccuggagcucaacauggcgaaucugaacauguguaugccucuuuccugcacaaagaauaacucucaucacuauauuaugguuggcaaugaaaccgggcuggagcucacacugaccaacacaagcaucauuaaucauaaauucuguaaccuuuccgacgcucacaagaaaaaucuguacgaucaugcccucaugucuaucauuagcaccuuucaccuguccaucccgaacuucaaucaguaugaggccaugagcugcgacuuuaacggaggcaagauuucugugcaguacaaucugucccacagcuucgcugucgaugccgcuaaccauuguggcacgaucgccaacggggugcuccaaaccuuuaugcggauggcguggggaggcucuuauaucgcccuggacuccgggaagggaaauugggauugcauuaugacaagcuaccaguaccuuaucauucagaacaccacaugggaagaccacugucaguucucucgccccuccccuaucggcuaucuggggcuccugagccaaagaacccgggauauuuacaucucccgcagacuucugggaacguuuacauggacccucucugacagcgagggcaaugaagcucccggcggguauugccugacacgguggaugcugaucgaggccgagcucaaauguuucggaaacaccgcuguugccaagugcaaugaaaaacaugaugaggaauuuugcgacaugcugcgccuuuucgauuucuguaagcaggcgauuaaaagacugaagaccccugcccagauguccauccagcucauuaacaaggcugugaaugcccugaucaacgaccaacuuauuaugaaaaaucaucugcgggauaucaugggcauccccuacugcaacuauagccgcuacuguuaucucaaucacacagucacggggaagaccucucugccuagaugcugucugguguccaacggaagcuaccucaaugagacacacuuuucugacgacauugaacagcaggcugauaacaugaucaccgagaugcugcaaaaagaguacauggaccggcagggcaagacaccgcuugggcugguggaucucuucgucuuuagcaccuccuucuaucugauuucuaucuuucugcaccuuguuaaaauucccacgcaucgccacaucgugggaaagccuugccccaaaccucauagacucaaucacaugggcauuuguagcugcggccuguacaagcaccccggggugccggucaaguggaaacggugaggacuagucccuguucccagagcccacuuuuuuuucuuuuuuugaaauaaaauagccugucuuucagaucuaaaaaaaaaaaaaaaaaaaaaaaaaaaaaaaaaaaaaaaaaaaaaaaaaaaaaaaaaaaaaaaaaaaaaaaaaaaaaaaaaaaaaaaaaaaaaaaaaaaa

SEQ ID NO: 34024 - RNA, 1740 nt, Artificial Sequence
  mRNA product Design a-2 (A100) comprising derived and/or modified sequence from LASV(GA391;Clade III)__CAA36645__GPCmut8 (opt5)
aggagaguccgcucagccagguugcagaagcggcuuagcguguguccuaaucuucucucugcguguagguaggccugugccgcaaacaagcuuaccaugggccagaucgugaccuucuuucaagaggucccccacguuauugaagaggugaugaacaucgugcugauugcccucagcauccuggcuauucuuaaggggcuguacaaugucgccacaugcggacucaucggccuggugacguuccuucugcucuccgggagaucuuguagccugaucuauaaaggaaccuacgaacugcagacacucgagcugaacauggaaacccuuaauaugugcaugccucuguccuguacaaagaacaauucucaucacuauauucggguuggcaacgagaccgggcucgagcugacacuuaccaauacgagcauccugaaccauaaauuuugcaaucucuccgacgcgcacaagcgcaaccuguacgaucauucucugaugagcauuaucuccaccuuccaccucagcauuccgaauuuuaaccaguaugaagcuaugucuugugacuucaauggaggcaaaaucacagugcaguacaaccugucccacagcuuugccgucgaugccgcuggccauugcgggacccuugccaauggagugcugcaaacauucaugagaauggcuuggggcgggucuuauauugcccucgacuccggacggggcaacugggauuguaucaugaccagcuaccaguaccugaucauucagaacacgacaugggacgaucacugccaguuuucucgccccuccccuaucggguaucuuggacugcucagccaaagaacccgggacauuuacaucucccgcagacugcugggcacauucaccuggacccucucugauagcgagggcaaugaaacacccgggggauauugucugacgcgguggaugcuuauugaggcggagcugaagugcuuuggcaacaccgccguugcuaaguguaaugaaaaacaugacgaggaguucugcgauaugcuccgccuguuugacuucugcaagcaggccaucagacggcuuaaaaccccugcucagauguccauccagcugauuaacaaggccgugaaugcgcucaucaacgaucaacugauuaugaaaaaucaucugcgcgacaucauggggauucccuacuguaacuauagcagauacugcuaucucaaucacacaucuacaggaaagaccucccugccucgguguugccuuaucagcaacggcucuuaccugaaugaaacgaaguucagcgacgauaucgaacagcaggccgacaacaugauuacagagaugcuccaaaaagaguacaucgaucgccaggggaagaccccgcugggacuggucgaccuuuuuguguucuccaccucuuuuuaucucauuagcaucuuccugcaccuggugaaaauucccacacacagacauaucgucggcaagccuugucccaaaccucaccggcucaaucauaugggcauuugcuccugugggcuguacaagcagcccggaguuccggugagauggaaacgcugaggacuagucccuguucccagagcccacuuuuuuuucuuuuuuugaaauaaaauagccugucuuucagaucuaaaaaaaaaaaaaaaaaaaaaaaaaaaaaaaaaaaaaaaaaaaaaaaaaaaaaaaaaaaaaaaaaaaaaaaaaaaaaaaaaaaaaaaaaaaaaaaaaaaa

SEQ ID NO: 34025 - RNA, 1743 nt, Artificial Sequence
  mRNA product Design a-2 (A100) comprising derived and/or modified sequence from LASV(AV;Clade V)__CCA30314__GPCmut8 (opt5)
aggagaguccgcucagccagguugcagaagcggcuuagcguguguccuaaucuucucucugcguguagguaggccugugccgcaaacaagcuuaccaugggccagaucgugaccuucuuucaagaggucccccacguuauugaagaggugaugaacaucgugcugauugcccucagcauccuggcuguccuuaaggggcuguacaauauugccacaugcggacucaucggccugaucacguuccuucugcucugugggagauccugcucuagcaaccuguauaaaggaguguacgaacugcagucccucgaccugaauauggagacccuuaacauguguaugccucugucuugcacaaagaauaacagccaucacuauauucggguuggcaaugauaccgggcucgaacugacacuuaccaacacauccauccugaaucauaaauuuuguaaccucucugacgcgcacaagaaagaucuguacgaccaugcucugaugagcauuaucuccaccuuccaccucagcauuccgaauuuuaaccaguaugaggccaugucuugcgauuucaauggaggcaagaucuccgugcaguacaaccugagccacucuuaugccauugacgcugccaaucauuguggcacggucgcuaacgggauccuucaaaccuuuaugcgcauggccuggggaggcuccuacaucgcgcuggauagcgggagaggaaacugggacugcauuaugacaucuuaccaguaucucaucauucagaauaccacaugggagaaccacugucaguucucccggcccagcccuaucggcuaccuggggcuucugucccaacgcaccagagauauuuauaucucucggcgccuccugggaacguuuacauggacccugagcgacuccgaaggcaaugccacacccggcggguacugccucaccagauggaugcugaucgaggcugaacuuaaguguuucggaaacaccgccguggcuaaaugcaaugagaagcaugaugaggaauuuugcgacaugcugcgccucuucgauuuuuguaaacaggccauuagccggcugaagucuccugcgcagauguccauccagcuuauuaacaaagccguuaaugcucugaucaacgaccaacucauuaugaagaaucaccugagagacaucaugggcauccccuauugcaacuacagcaaguauuguuaccugaaucacacaauuacggggaaaaccucucucccuaagugcugucuggugagcaacggauccuaccuuaaugagacacauuucucugaugacaucgaacagcaggccgauaacaugauuaccgagaugcugcaaaaagaauauauggagcggcagggcaagacaccgcucgggcuggucgaccuguucguguuuagcaccuccuucuaccuuaucagcauuuuucuccgccuggugaaaauccccacgcacagacauauugucggaaagccuugccccaaaccucaccggcugaaucauaugggcaucuguucuugcggccucuauaagcagcccgggguuccggugcgcuggaagagaugaggacuagucccuguucccagagcccacuuuuuuuucuuuuuuugaaauaaaauagccugucuuucagaucuaaaaaaaaaaaaaaaaaaaaaaaaaaaaaaaaaaaaaaaaaaaaaaaaaaaaaaaaaaaaaaaaaaaaaaaaaaaaaaaaaaaaaaaaaaaaaaaaaaaa

SEQ ID NO: 34026 - RNA, 1740 nt, Artificial Sequence
  mRNA product Design a-2 (A100) comprising derived and/or modified sequence from LASV(Togo/2016/7082;Clade VI)__AMR44577__GPCmut8 (opt5)
aggagaguccgcucagccagguugcagaagcggcuuagcguguguccuaaucuucucucugcguguagguaggccugugccgcaaacaagcuuaccaugggccagaucauuaccuucuuucaagaggugccccacgucaucgaagagguuaugaacauugugcugaucgcccucagccugcuugcuauucugaaggggguguacaaugucgccacaugcggaaucaucggccucgugacguuccuguuucuuugugggagauccugcucucugauuuauaaaggaagcuacgaacuccagacccuggagcugaacauggaaacacucaauauguguaugccucuguccugcaccaagaacucuagccaucacuauauccggguuggcaaugagacagggcuugagcugacccucacaaacaccuccauuaucaaucauaaauucuguaaccugucugacgcgcacaagcgcaaucuuuacgaucaugcucugaugagcauucucuccacguuucaccugagcaucccgaacuucaaucaguaugaagccaugucuugcgacuuuaacggaggcaaaauuuccgugcaguacaaucugagccacgccuaugcugucgaugccgcugagcauuguggcaccguggccaacgggguucuccaaacauucaugagaauggcguggggaggcucuuacaucgcccuggacuccgggcggggaaauugggauugcaucaugaccagcuaccaguaucuuauuauccagaacacaaccugggaagaccacugucaguuuucucgccccuccccuauuggcuaccuggggcuccugagccaaagaacgcgggauaucuauauuucccgcagacuucugggaacauucaccuggacacucucugacagcgagggcaacgagacccccggcggguacugccugacccgguggaugcugaucgaagcugagcucaaguguuuuggaaauacagccguggcuaagugcaacgaaaaacaugaugaggaguucugcgacaugcugcgccuuuuugauuucuguaagcaggccauccagagacugaaauccccugcgcagaugagcauucaacucaucaauaaggccgucaacgcucugauuaaugaccagcuuaucaugaaaaaccaucugcgggauaugaugggcauucccuauugcaauuacucuaaguauuguuaccucaaccacacguccagcgggcgcaccucucugccuaagugcugucuggugagcaauggauccuaccucaacgaaacacacuucucugacgacaucgagcagcaagccgauaauaugaucaccgaaaugcugcagaaagaguauauugacagacagggcaagacaccgcuugggcugguggaucucuuugucuucagcaccuccuuuuaccugaucagcauuuuccugcaccuuaucaaaauucccacgcaucggcacaucguuggaaagccuugccccaaaccucaucgccucaaccacaugggcauuuguucuugcggccuguauaagcagcccggggugccgacaagauggaaacggugaggacuagucccuguucccagagcccacuuuuuuuucuuuuuuugaaauaaaauagccugucuuucagaucuaaaaaaaaaaaaaaaaaaaaaaaaaaaaaaaaaaaaaaaaaaaaaaaaaaaaaaaaaaaaaaaaaaaaaaaaaaaaaaaaaaaaaaaaaaaaaaaaaaaa

SEQ ID NO: 34027 - RNA, 1740 nt, Artificial Sequence
  mRNA product Design a-2 (A100) comprising derived and/or modified sequence from LASV(KAK-428;Clade n.d. (VII))__ANH09740__GPCmut8 (opt5)
aggagaguccgcucagccagguugcagaagcggcuuagcguguguccuaaucuucucucugcguguagguaggccugugccgcaaacaagcuuaccaugggccagaucgugaccuucuuucaagaggucccccacguuauugaagaggugaugaacaucgugcugauugcccucagccugcuugcuauccugaaggggcucuacaauuucgccacaugcggagucauuggccugaucacguuucuucugcucugugggagauccugcucugcgaccuauaaaggacaguacgaacugcagacacuggagcucaacauggaaagccugaauauguguaugccucuuuccugcaccaagaacaauucucaucacuauauccgggcuggcaacaauacagggcuggagcucacccugacaaacaccagcauuaucucccauaaauucuguaaucuuucugacgcccacaagaaaaaccuguacgaucauacgcucaugagcauuaucaccacauuucaccuguccauuccgaauuucaaccaguaugaggccaugagcugcgacuuuaauggaggcaagaucucuauucaauacaaccugucccacagcuaugcuggcgaugccgcucagcauugugggaccguggccaauggaguucuccagacauucaugcgcauggcguggggcgggucuuaccuggcccuugacuccggaagacggggcugggauugcaucaucagcucuuaccaguaucugauuauccaaaacaccacgugggacgaucacugucaguuuucccgccccagcccuauuggguaccucggauucgugucccagaagacaagagacaucuauauuucucggcgccugcuuggcaccuuuacauggacccugagcgauuccgaaggccaugacaugcccgggggauacugccucaccagauggaugcugaucgaggcugaucugaaauguuucggcaacacagccgucgcuaagugcaaugaaaaacacgacgaggaguuuugcgauauguggcgccucuucgacuucuguaagcaggccauccaacggcugaaagcgccugcccagaugaacauucagcuuaucaauaaggcugugaacgcccugauuaaugaccaacucaugaugaagaaccaccugagagauaucauggggauucccuauugcaauuacagcaaauuuuguuaucuuaacaauacgaccacaggacggaccucucugccucgcugcugucucaucuccaacggcagcuaccugaaugaaacacauuucucugacgauaucgagcagcaggcugacaacaugauuaccgaaaugcugcagaaggaguacauggauagacaagggaaaacgccgcucggacugguugaccuuuuuguguucagcacauccuuuuaucugaucaccauuuuccuccaccuggucaagauccccacccaucggcacauugugggcaaaccuugccccaagccucaucgccugaaucacaugggcaucuguucuugcgggcuuuacaaacagcccggagugccggucagauggaagcggugaggacuagucccuguucccagagcccacuuuuuuuucuuuuuuugaaauaaaauagccugucuuucagaucuaaaaaaaaaaaaaaaaaaaaaaaaaaaaaaaaaaaaaaaaaaaaaaaaaaaaaaaaaaaaaaaaaaaaaaaaaaaaaaaaaaaaaaaaaaaaaaaaaaaa

SEQ ID NO: 34028 - RNA, 1740 nt, Artificial Sequence; identical to SEQ ID NO: 34022
  mRNA product Design a-2 (A100) comprising derived and/or modified sequence from LASV(Pinneo-NIG-1969;Clade I)__AIT17836__GPCmut8 (opt5)

SEQ ID NO: 34029 - RNA, 1740 nt, Artificial Sequence
  mRNA product Design a-2 (A100) comprising derived and/or modified sequence from LASV(ISTH0009-NIG-2011;Clade II)__AIT17404__GPCmut8 (opt5)
aggagaguccgcucagccagguugcagaagcggcuuagcguguguccuaaucuucucucugcguguagguaggccugugccgcaaacaagcuuaccaugggccagaucauuaccuucuuucaagaggugccccacgucaucgaagagguuaugaacauugugcugaucgcccucagccugcuugcuauucugaaggggaucuacaauguggccacaugcggacucuucggccuggucuccuuucuucugcucugugggagaucuugcagcacgaccuauaaaggaguguacgaacugcagacacuggagcucgacauggcgucccugaacauguguaugccucuuucuugcaccaagaauaacagccaucacuauaucaugguuggcaaugaaacagggcuggagcucacccugacaaacaccuccauuaucaaucauaaauucuguaaccuuucugaugcucacaagaaaaaucuguacgaccaugcccucaugagcauuaucuccacguuucaccugagcauuccgaacuucaaucaguaugaggccaugucuugcgauuuuaacggaggcaagaucuccgugcaguacaaucugagccacgcuuaugccgucgacgcugccaaccauuguggcaccauugcgaauggggugcuccaaacauucaugcggauggccuggggaggcucuuacaucgcucuggauuccgggaagggaagcugggacugcaucaugaccucuuaccaguaucuuauuauccagaacacaaccugggaagaucacugucaguuuucccgccccagcccuauuggcuaccuggggcuccugucccaaagaacgcgggacaucuauauuucucgcagacuucugggaacauucaccuggacacucagcgauuccgagggcaacgaaacccccggcggguacugccugacccgguggaugcugaucgaggccgagcucaaauguuuuggaaauacagcuguugccaagugcaacgaaaaacaugacgaggaguucugcgauaugcugcgccuuuuugacuucuguaagcaggcgaucagacggcugaaaacgccugcccagaugagcauucagcucaucaauaaggcugugaacgcccugauuaaugaucaacuuaucaugaagaaccaucugcgcgacauuaugggcauccccuauugcaauuacucuaaauauuguuaccucaaccacaccgucacagggaagaccucccugccuagaugcugucuggugagcaauggaucuuaccucaacgaaacacacuucagcgacgauaucgaacagcaggcugacaauaugauuaccgagcugcuucaaaaagaguauauggaucggcagggcaagacgccgcuggggcucguggaccuguuugucuucuccacaucuuuuuaccugaucagcauuuuccuucaccucaucaaaauucccacccaucgccacaucaccggaaagccuugccccaaaccucauagacugaaccacaugggcauuuguuccugcggccuguauaagcaccccgggguuccggugaaguggaaacggugaggacuagucccuguucccagagcccacuuuuuuuucuuuuuuugaaauaaaauagccugucuuucagaucuaaaaaaaaaaaaaaaaaaaaaaaaaaaaaaaaaaaaaaaaaaaaaaaaaaaaaaaaaaaaaaaaaaaaaaaaaaaaaaaaaaaaaaaaaaaaaaaaaaaa

SEQ ID NO: 34030 - RNA, 1740 nt, Artificial Sequence
  mRNA product Design a-2 (A100) comprising derived and/or modified sequence from LASV(ISTH2010-NIG-2012;Clade II)__AIT17482__GPCmut8 (opt5)
aggagaguccgcucagccagguugcagaagcggcuuagcguguguccuaaucuucucucugcguguagguaggccugugccgcaaacaagcuuaccaugggccagaucauuaccuucuuucaagaggugccccacgucaucgaagagguuaugaacauugugcugaucgcccucagccugcuugcuauucugaaggggaucuacaauguggccacaugcggacucuucggccuggucuccuuucuucugcucugugggagaucuugcagcacgaccuauaaaggaguguacgaacugcagacacuggagcucgacauggcgucccugaacauguguaugccucuuucuugcaccaagaauaacagccaucacuauaucaugguuggcaaugaaacagggcuggagcucacccugacaaacaccuccauuaucaaucauaaauucuguaaccuuucugaugcucacaagaaaaaucuguacgaccaugcccucaugagcauuaucuccacguuucaccugagcauuccgaacuucaaucaguaugaggccaugucuugcgauuuuaacggaggcaagaucuccgugcaguacaaucugagccacgcuuaugccgucgacgcugccaaccauuguggcaccauugcgaauggggugcuccaaacauucaugcggauggccuggggaggcucuuacaucgcucuggauuccgggaagggaagcugggacugcaucaugaccucuuaccaguaucuuauuauccagaacauuacaugggaagaucacugucaguuuucccgccccagcccuaucggcuaccuggggcuccugucccaaagaacccgggacauuuauaucucucgcagacuucugggaacguucacauggacccucagcgauuccgagggcaacgaaacacccggcggguacugccugacccgguggaugcugaucgaggccgagcucaaauguuuuggaaauaccgcuguugccaagugcaacgaaaaacaugacgaggaguucugcgauaugcugcgccuuuuugacuucuguaagcaggcgauuagacggcugaaaacgccugcccagaugagcauccagcucauuaauaaggcugugaacgcccugaucaaugaucaacuuauuaugaagaaccaucugcgcgacaucaugggcauccccuauugcaauuacucuaaauauuguuaccucaaccacacagucaccgggaagacaucccugccuagaugcugucuggugagcaauggaucuuaccucaacgaaacccacuucagcgacgauauugaacagcaggcugacaauaugaucacagagcugcuucaaaaagaguauauugaucggcagggcaagaccccgcuggggcucguggaccuguuugucuucuccacgucuuuuuaccugaucagcauuuuccuucaccucguuaaaauccccacacaucgccacguggugggaaagccuugccccaaaccucauagacugaaccacaugggcauuuguuccugcggccuguauaagcaccccggggucccggugaaguggaaacggugaggacuagucccuguucccagagcccacuuuuuuuucuuuuuuugaaauaaaauagccugucuuucagaucuaaaaaaaaaaaaaaaaaaaaaaaaaaaaaaaaaaaaaaaaaaaaaaaaaaaaaaaaaaaaaaaaaaaaaaaaaaaaaaaaaaaaaaaaaaaaaaaaaaaa

SEQ ID NO: 34031 - RNA, 1740 nt, Artificial Sequence
  mRNA product Design a-2 (A100) comprising derived and/or modified sequence from LASV(Lassa virus/H.sapiens-wt/NGA/2015/ISTH_0543;Clade II)__AVO03639__GPCmut8 (opt5)
aggagaguccgcucagccagguugcagaagcggcuuagcguguguccuaaucuucucucugcguguagguaggccugugccgcaaacaagcuuaccaugggccagaucauuaccuucuuucaagaggugccccacgucaucgaagagguuaugaacauugugcugaucgcccucagccugcuugcuauucugaaggggaucuacaauguggccacaugcggacucuucggccuggucuccuuucuucugcucugugggagaucuugcagcacgaccuauaaaggaguguacgaacugcagacacuggagcucgacauggcgaaccugaauauguguaugccucuuuccugcaccaagaacaauucucaucacuauaucaugguuggcaacgaaacagggcuggagcucacccugacaaauaccagcauuaucaaccauaaauucuguaaucuuuccgaugcucacaagaaaaaccuguacgaccaugcccucaugucuauuaucagcacguuucaccuguccauuccgaauuucaaccaguaugaggccaugagcugcgauuuuaauggaggcaagaucucugugcaguacaaccugucccacaccuaugcugucgacgccgcuaaucauuguggcacaauugccaacggggugcuccaaaccuucaugcggauggcguggggaggcagcuacaucgcccuggauucugggaagggauccugggacugcaucaugacaagcuaccaguaucuuguuauucagaacaccacgugggaagaucacugucaguuuucucgccccuccccuaucggcuaccuggggcuccugagccaaagaacacgggacauuuauaucucccgcagacuucugggaaccuucacauggacccucucugauagcgagggcaaugaaacccccggcggguacugccugacacgguggaugcugauugaggcugagcucaaauguuuuggaaacacggccguggcuaagugcaaugaaaaacaugacgaggaguucugcgauaugcugcgccuuuuugacuucuguaagcaggccaucagacggcugaaaaccccugcgcagauguccauccagcucauuaacaaggccgucaaugcucugaucaacgaucaacuuauuaugaagaaucaucugcgcgacaucaugggcauucccuauugcaacuacagcaaauauuguuaccucaaucacacagugaccgggaagacaucucugccuagaugcugucugguguccaacggaagcuaccucaaugaaacccacuucucugacgauaucgaacagcaggccgacaacaugaucacggagcugcuucaaaaagaguauauugaucggcagggcaagacaccgcuggggcucgucgaccuguuuguuuucagcaccuccuuuuaccugaucucuauuuuccuucaccucgugaaaauccccacccaucgccacauuacaggaaagccuugccccaaaccucauagacugaaucacaugggcaucuguagcugcggccuguauaagcaccccggggugccggucaaguggaaacggugaggacuagucccuguucccagagcccacuuuuuuuucuuuuuuugaaauaaaauagccugucuuucagaucuaaaaaaaaaaaaaaaaaaaaaaaaaaaaaaaaaaaaaaaaaaaaaaaaaaaaaaaaaaaaaaaaaaaaaaaaaaaaaaaaaaaaaaaaaaaaaaaaaaaa

SEQ ID NO: 34032 - RNA, 1740 nt, Artificial Sequence
  mRNA product Design a-2 (A100) comprising derived and/or modified sequence from LASV(Lassa virus/H.sapiens-wt/NGA/2016/ISTH_0009;Clade II)__AVO03571__GPCmut8 (opt5)
aggagaguccgcucagccagguugcagaagcggcuuagcguguguccuaaucuucucucugcguguagguaggccugugccgcaaacaagcuuaccaugggccagaucauuaccuucuuucaagaggugccccacgucaucgaagagguuaugaacauugugcugaucgcccucagccugcuugcuauucugaaggggaucuacaauguggccacaugcggacuccugggccuugucuccuuccugcuccugugugggagaucuugcagcacgaccuauaaaggaguguacgaacugcagacacucgagcuggacauggcgucccuuaacauguguaugccucugucuugcaccaagaauaacagccaucacuauaucaugguuggcaaugaaacagggcucgagcugacccuuacaaacaccuccauuaucaaucauaaauuuuguaaccugucugaugcucacaagaaaaaucucuacgaccaugcccugaugagcauuaucuccacguuccaccugagcauuccgaacuuuaaucaguaugaggccaugucuugcgauuucaacggaggccggaucuccgugcaguacaaucucagccacucuuaugcugucgacgccgcuaaccauuguggcaccauugccaauggggugcugcaaacauuuaugcgcauggcguggggaggcuccuacaucgcccuugauagcgggaagggaucuugggacugcaucaugaccuccuaccaguaucugauuauccagaacacaaccugggaagaucacugucaguucagcagacccuccccuauuggcuaccucgggcugcuuucucaacggacgcgcgacaucuauauuagcagacggcugcucggaacauuuaccuggacacuguccgauagcgagggcaacgaaacccccggcggguacugccugacccgcuggaugcucaucgaggcugagcugaaguguuucggaaauacagccguugcuaaaugcaacgaaaagcaugacgaggaauuuugcgauaugcuuagacuguucgacuuuuguaaacaggccauccggcgccucaagacgccugcgcagaugucuauucagcugaucaauaaagccgugaacgcucuuauuaaugaucaacugaucaugaagaaccaccucagagacauuaugggcauccccuauugcaauuacuccaaguauuguuaccugaaccacaccgucacagggaaaaccagccugccucggugcugucucgugucuaauggaagcuaccugaacgagacacauuucuccgacgauaucgaacagcaggccgacaauaugauuaccgagcuucugcaaaaggaguauaucgaucgccagggcaaaacgccgcucgggcugguggaccuguucgucuuuucuaccagcuucuaccuuauuuccaucuuucuccaccugguuaagauucccacacauagacacaucaccggaaaaccuugccccaagccucaucggcugaaccacaugggcauuuguagcugcggccucuauaaucaccccggggugccggugaaauggaagcgcugaggacuagucccuguucccagagcccacuuuuuuuucuuuuuuugaaauaaaauagccugucuuucagaucuaaaaaaaaaaaaaaaaaaaaaaaaaaaaaaaaaaaaaaaaaaaaaaaaaaaaaaaaaaaaaaaaaaaaaaaaaaaaaaaaaaaaaaaaaaaaaaaaaaaa

SEQ ID NO: 34033 - RNA, 1740 nt, Artificial Sequence
  mRNA product Design a-2 (A100) comprising derived and/or modified sequence from LASV(Lassa virus/H.sapiens-wt/NGA/2016/ISTH_0017;Clade II)__AVO03567__GPCmut8 (opt5)
aggagaguccgcucagccagguugcagaagcggcuuagcguguguccuaaucuucucucugcguguagguaggccugugccgcaaacaagcuuaccaugggccagaucauuaccuucuuucaagaggugccccacgucaucgaagagguuaugaacauugugcugaucgcccucagccugcuugcuauucugaaggggaucuacaauguggccacaugcggacucuucggccuggucuccuuucuucugcucugugggagaucuugcagcacgaccuauaaaggaguguacgaacugcagacacuggagcucgacauggcgucccugaacauguguaugccucuuucuugcaccaagaauaacagccaucacuauaucaugguuggcaaugaaacagggcuggagcucacccugacaaacaccuccauuaucaaucauaaauucuguaaccuuucugaugcucacaagaaaaaucuguacgaccaugcccucaugagcauuaucuccacguuucaccugagcauuccgaacuucaaucaguaugaggccaugucuugcgauuuuaacggaggcaagaucuccgugcaguacaaucugagccacaccuaugcuauugacgccgcuaaccauuguggcacaaucgccaaugggguccuccaaaccuucaugcggauggcguggggaggcucuuacaucgcccuggauuccgggaagggaagcugggacugcauuaugacaucuuaccaguaucuuaucauucagaacaccacgugggaagaucacugucaguuuucccgccccagcccuaucggcuaccuggggcuccugucccaaagaacacgggacauuuauaucucucgcagacuucugggaaccuucacauggacccucagcgauuccgagggcaacgaaacccccggcggguacugccugacacgguggaugcugaucgaggcugagcucaaauguuuuggaaauacggccguggcuaagugcaacgaaaaacaugacgaggaguucugcgauaugcugcgccuuuuugacuucuguaagcaggccauuagacggcugaaaaccccugcgcagaugagcauccagcucauuaauaaggccguuaacgcucugaucaaugaucaacuuauuaugaagaaccaucugcgcgacaucaugggcauccccuauugcaauuacucuaaauauuguuaccucaaccacacagugaccgggaagacaucccugccuagaugcugucuggucagcaauggaucuuaccucaacgaaacccacuucagcgacgauauugaacagcaggccgacaauaugaucacggagcugcuucaaaaagaguauauggaucggcagggcaagacaccgcuggggcucguggaccuguuuguguucuccaccucuuuuuaccugauuagcaucuuccuucaccucguccgcauucccacccauagacacguuaucggaaaaccuugccccaagccucaucggcugaaccacaugggcauuuguuccugcggccuguauaaacaccccggggugccggugaaguggaagcgcugaggacuagucccuguucccagagcccacuuuuuuuucuuuuuuugaaauaaaauagccugucuuucagaucuaaaaaaaaaaaaaaaaaaaaaaaaaaaaaaaaaaaaaaaaaaaaaaaaaaaaaaaaaaaaaaaaaaaaaaaaaaaaaaaaaaaaaaaaaaaaaaaaaaaa

SEQ ID NO: 34034 - RNA, 1740 nt, Artificial Sequence
  mRNA product Design a-2 (A100) comprising derived and/or modified sequence from LASV(Lassa virus/H.sapiens-wt/NGA/2018/ISTH_0959;Clade II)__AVV65099__GPCmut8 (opt5)
aggagaguccgcucagccagguugcagaagcggcuuagcguguguccuaaucuucucucugcguguagguaggccugugccgcaaacaagcuuaccaugggccagaucauuaccuucuuucaagaggugccccacgucaucgaagagguuaugaacauugugcugaucgcccucagccugcuugcuauucugaaggggaucuacaauguggucacaugcggacucuucggccugguguccuuucuucugcucugugggagaucuugcagcacgaccuauaaaggaguuuacgaacugcagacacuggagcucgacauggccucccugaacauguguaugccucuuucuugcaccaagaauaacagccaucacuauaucauggugggcaaugaaacagggcuggagcucacccugacaaacaccuccauuaucaaucauaaauucuguaaccuuucugaugcgcacaagaaaaaucuguacgaccaugcucucaugagcauuaucuccacguuucaccugagcauuccgaacuucaaucaguaugaggccaugucuugcgauuuuaacggaggcaagaucuccguccaguacaaucugagccacgccuaugcuauugacgccgcuaaccauuguggcaccaucgccaauggggugcuccaaacauucaugcggauggcguggggaggcucuuacaucgcccuggauuccgggaagggaagcugggacugcauuaugaccucuuaccaguaucuuaucauucagaacacaaccugggaagaucacugucaguuuucccgccccagcccuaucggcuaccuggggcuccugucccaaagaacgcgggacauuuauaucucucgcagacuucugggaacauucaccuggacacucagcgauuccgagggcaacgaaacccccggcggguacugccugacccgguggaugcugaucgaggcugagcucaaauguuuuggaaauacagccguugcuaagugcaacgaaaaacaugacgaggaguucugcgauaugcugcgccuuuuugacuucuguaagcaggccauuagacggcugaaaacgccugcgcagaugagcauccagcucauuaauaaggccgugaacgcucugaucaaugaucaacuuauuaugaagaaccaucugcgcgacaucaugggcauccccuauugcaauuacucuaaauauuguuaccucaaccacaccgucacagggaagaccucccugccuagaugcugucuggugagcaauggaucuuaccucaacgaaacacacuucagcgacgauauugaacagcaggccgacaauaugaucaccgagcugcuucaaaaagaguauauugaucggcagggcaagacgccgcuggggcucguggaccuguuugucuucuccacaucuuuuuaccugaucagcauuuuccuucaccucguuaaaauccccacccaucgccacgugauuggaaagccuugccccaaaccucauagacugaaccacaugggcaucuguuccugcggccuguauaagcaccccggggugccggucaaguggaaacggugaggacuagucccuguucccagagcccacuuuuuuuucuuuuuuugaaauaaaauagccugucuuucagaucuaaaaaaaaaaaaaaaaaaaaaaaaaaaaaaaaaaaaaaaaaaaaaaaaaaaaaaaaaaaaaaaaaaaaaaaaaaaaaaaaaaaaaaaaaaaaaaaaaaaa

SEQ ID NO: 34035 - RNA, 1740 nt, Artificial Sequence
  mRNA product Design a-2 (A100) comprising derived and/or modified sequence from LASV(LASV003-NIG-2008;Clade II)__AIT17580__GPCmut8 (opt5)
aggagaguccgcucagccagguugcagaagcggcuuagcguguguccuaaucuucucucugcguguagguaggccugugccgcaaacaagcuuaccaugggccagaucauuaccuucuuucaagaggugccccacgucaucgaagagguuaugaacauugugcugaucgcccucagccugcuugcuauucugaaggggaucuacaauguggccacaugcggacucuucggccuggucuccuuucuucugcucugugggagaucuugcagcacgaccuauaaaggaguguacgaacugcagacacuggagcucgacauggcgucccugaacauguguaugccucuuucuugcaccaagaauaacagccaucacuauaucaugguuggcaaugaaacagggcuggagcucacccugacaaacaccuccauuaucaaucauaaauucuguaaccuuucugaugcucacaagaaaaaucuguacgaccaugcccucaugagcauuaucuccacguuucaccugagcauuccgaacuucaaucaguaugaggccaugucuugcgauuuuaacggaggcaagaucuccgugcaguacaaucugagccacaccuaugcugucgacgccgcuaaccauuguggcacaauugccaauggggugcuccaaaccuucaugcggauggcguggggaggcucuuacaucgcccuggauuccgggaagggaagcugggacugcaucaugacaucuuaccaguaucuuauuauccagaacaccacgugggaagaucacugucaguuuucccgccccagcccuauuggcuaccuggggcuccugucccaaagaacacgggacaucuauauuucucgcagacuucugggaaccuucacauggacccucagcgauuccgagagcaacgaaacccccggcggcuacugccugacacgguggaugcugaucgaggcugagcucaaauguuuugggaauacggccguugcuaagugcaacgaaaaacaugacgaggaguucugcgauaugcugcgccuuuuugacuucuguaagcaggccaucagacggcugaaagcgccugcccagaugucuauucagcucaucaauaaggcugugaacgcccugauuaaugaucaacuuaucaugaagaaccaucugcgcgacauuaugggaauccccuauugcaauuacuccaaauauuguuaccucaaccacaccgucacaggcagaaccagccugccucggugcugucuggugucuaaugggagcuaccucaacgaaacacacuucuccgacgauaucgaacagcaggcugacaauaugauuaccgagcugcuucaaaaggaguauauggaucgccagggaaaaacgccgcugggccucguggaccuguuugucuucucuaccagcuuuuaccugaucuccauuuuccuucaccucguuaagauccccacacauagacacgugauugggaaaccuugccccaagccucaucggcugaaccacaugggaaucuguagcugcggccuguauaaacaccccggcgugccggucaaguggaagcgcugaggacuagucccuguucccagagcccacuuuuuuuucuuuuuuugaaauaaaauagccugucuuucagaucuaaaaaaaaaaaaaaaaaaaaaaaaaaaaaaaaaaaaaaaaaaaaaaaaaaaaaaaaaaaaaaaaaaaaaaaaaaaaaaaaaaaaaaaaaaaaaaaaaaaa

SEQ ID NO: 34036 - RNA, 1740 nt, Artificial Sequence
  mRNA product Design a-2 (A100) comprising derived and/or modified sequence from LASV(LASV035-NIG-2009;Clade II)__AIT17588__GPCmut8 (opt5)
aggagaguccgcucagccagguugcagaagcggcuuagcguguguccuaaucuucucucugcguguagguaggccugugccgcaaacaagcuuaccaugggccagaucauuaccuucuuucaagaggugccccacgucaucgaagagguuaugaacauugugcugaucgcccucagccugcuugcuauucugaaggggaucuacaauguggccacaugcggacucuucggccuggucuccuuucuucugcucugugggagaucuugcagcacgaccuauaaaggaguguacgaacugcagacacuggagcucgacauggcgucccugaacauguguaugccucuuucuugcaccaagaauaacagccaucacuauaucaugguuggcaaugaaacagggcuggagcucacccugacaaacaccuccauuaucaaucauaaauucuguaaccuuucugaugcucacaagaaaaaucuguacgaccaugcccucaugagcauuaucuccacguuucaccugagcauuccgaacuucaaucaguaugaggccaugucuugcgauuuuaacggaggcaagaucuccgugcaguacaaucugagccacgcuuaugccgucgacgcugccaaccauuguggcaccauugcgaauggggugcuccaaacauucaugcggauggccuggggaggcucuuacaucgcucuggauuccgggaagggaagcugggacugcaucaugaccucuuaccaguaucuuauuauccagaacacaaccugggaagaucacugucaguuuucccgccccagcccuauuggcuaccuggggcuccugucccaaagaacgcgggacaucuauauuucucgcagacuucugggaacauucaccuggacacucagcgauuccgagggcaacgaaacccccggcggguacugccugacccgguggaugcugaucgaggccgagcucaaauguuuuggaaauacagcuguugccaagugcaacgaaaaacaugacgaggaguucugcgauaugcugcgccuuuuugacuucuguaagcaggcgaucagacggcugaaagccccugcucagaugagcauucagcucaucaauaaggccgugaacgcucugauuaaugaucaacuuaucaugaagaaccaucugcgcgacauuaugggcauccccuauugcaauuacucuaaauauuguuaccucaaccacacggucaccgggaagacaucccugccuagaugcugucuggugagcaauggaucuuaccucaacgaaacccacuucagcgacgauaucgaacagcaggccgacaauaugauuacagagcugcuucaaaaagaguauaucgaucggcagggcaagaccccgcuggggcucguggaccuguuugucuucuccacgucuuuuuaccugauuagcaucuuccuucaccucguuaaaauucccacacaucgccacgugaucggaaagccuugccccaaaccucauagacugaaccacaugggcauuuguuccugcggccuguauaagcaccccggggugccggucaaguggaaacggugaggacuagucccuguucccagagcccacuuuuuuuucuuuuuuugaaauaaaauagccugucuuucagaucuaaaaaaaaaaaaaaaaaaaaaaaaaaaaaaaaaaaaaaaaaaaaaaaaaaaaaaaaaaaaaaaaaaaaaaaaaaaaaaaaaaaaaaaaaaaaaaaaaaaa

SEQ ID NO: 34037 - RNA, 1740 nt, Artificial Sequence
  mRNA product Design a-2 (A100) comprising derived and/or modified sequence from LASV(LASV1000-NIG-2009;Clade II)__AIT17782__GPCmut8 (opt5)
aggagaguccgcucagccagguugcagaagcggcuuagcguguguccuaaucuucucucugcguguagguaggccugugccgcaaacaagcuuaccaugggccagaucauuaccuucuuucaagaggugccccacgucaucgaagagguuaugaacauugugcugaucgcccucagccugcuugcuauucugaaggggaucuacaauguggccacaugcggacucuucggccuggucuccuuucuucugcucugugggagaucuugcagcacgaccuauaaaggaguguacgaacugcagacacuggagcucgacauggcgucccugaacauguguaugccucuuucuugcaccaagaauaacagccaucacuauaucaugguuggcaaugaaacagggcuggagcucacccugacaaacaccuccauuaucaaucauaaauucuguaaccuuucugaugcucacaagaaaaaucuguacgaccaugcccucaugagcauuaucuccacguuucaccugagcauuccgaacuucaaucaguaugaggccaugucuugcgauuuuaacggaggcaagaucuccgugcaguacaaucugagccacaccuaugcugucgacgccgcuaaccauuguggcacaauugccaauggggugcuccaaaccuucaugcggauggcguggggaggcucuuacaucgcccuggauuccgggaagggaagcugggacugcaucaugacaucuuaccaguaucuuauuauccagaacaccacgugggaagaucacugucaguuuucccgccccagcccuauuggcuaccuggggcuccugucccaaagaacacgggacaucuauauuucucgcagacuucugggaaccuucacauggacccucagcgauuccgagggcaacgaaacccccggcggguacugccugacacgguggaugcugaucgaggcugagcucaaauguuuuggaaauacggccguugcuaagugcaacgaaaaacaugacgaggaguucugcgauaugcugcgccuuuuugacuucuguaagcaggccaucaaaagacugaagaccccugcgcagaugagcauucagcucaucaauaaggccgugaacgcucugauuaaugaucaacuuaucaugaaaaaccaucugcgggacauuaugggcauccccuauugcaauuacucuaaguauuguuaccucaaccacacagucaccgggaaaacaucccugccucgcugcugucuggugagcaauggaucuuaccucaacgaaacccacuucagcgacgauaucgaacagcaggccgacaauaugauuacggagcugcuucaaaaggaguauaucgauagacagggcaaaacaccgcuggggcucguggaccuguuugucuucuccaccucuuuuuaccugauuagcaucuuccuucaccucguuaagauucccacccaucggcacguggugggaaaaccuugccccaagccucaucgccugaaccacaugggcaucuguuccugcggccuguauaagcaccccggggucccggugaaauggaagagaugaggacuagucccuguucccagagcccacuuuuuuuucuuuuuuugaaauaaaauagccugucuuucagaucuaaaaaaaaaaaaaaaaaaaaaaaaaaaaaaaaaaaaaaaaaaaaaaaaaaaaaaaaaaaaaaaaaaaaaaaaaaaaaaaaaaaaaaaaaaaaaaaaaaaa

SEQ ID NO: 34038 - RNA, 1740 nt, Artificial Sequence
  mRNA product Design a-2 (A100) comprising derived and/or modified sequence from LASV(LASV221-NIG-2010;Clade II)__AIT17624__GPCmut8 (opt5)
aggagaguccgcucagccagguugcagaagcggcuuagcguguguccuaaucuucucucugcguguagguaggccugugccgcaaacaagcuuaccaugggccagaucauuaccuucuuucaagaggugccccacgucaucgaagagguuaugaacauugugcugaucgcccucagccugcuugcuauucugaaggggaucuacaauguggccacaugcggacucuucggccuggucuccuuucuucugcucugugggagaucuugcagcacgaccuauaaaggaguguacgaacugcagacacuggagcucgacauggcgucccugaacauguguaugccucuuucuugcaccaagaauaacagccaucacuauaucaugguuggcaaugaaacagggcuggagcucacccugacaaacaccuccauuaucaaucauaaauucuguaaccuuucugaugcucacaagaaaaaucuguacgaccaugcccucaugagcauuaucuccacguuucaccugagcauuccgaacuucaaucaguaugaggccaugucuugcgauuuuaacggaggcaagaucuccgugcaguacaaucugagccacaccuaugcuauugacgccgcuaaccauuguggcacaaucgccaaugggguccuccaaaccuucaugcggauggcguggggaggcucuuacaucgcccuggauuccgggaagggaagcugggacugcauuaugacaucuuaccaguaucuuaucauucagaacaccacgugggaagaucacugucaguuuucccgccccagcccuaucggcuaccuggggcuccugucccaaagaacacgggacauuuauaucucucgcagacuucugggaaccuucacauggacccucagcgauuccgagggcaacgaaacccccggcggguacugccugacacgguggaugcugaucgaggcugagcucaaauguuuuggaaauacggccguggcuaagugcaacgaaaaacaugacgaggaguucugcgauaugcugcgccuuuuugacuucuguaagcaggccauuagacggcugaaaaccccugcgcagaugagcauccagcucauuaauaaggccguuaacgcucugaucaaugaucaacuuauuaugaagaaccaucugcgcgacaucaugggcauccccuauugcaauuacucuaaauauuguuaccucaaccacacagugaccgggaagacaucccugccuagaugcugucuggucagcaauggaucuuaccucaacgaaacccacuucagcgacgauauugaacagcaggccgacaauaugaucacggagaugcugcaaaaagaguauauggaucggcagggcaagacaccgcuugggcugguggaccucuuuguguucuccaccucuuuuuaccugauuagcaucuuccugcaccuugucaaaauucccacccaucgccacguuaucggaaagccuugccccaaaccucauagacucaaccacaugggcauuuguuccugcggccuguauaagcaccccggggugccggugaaguggaaacggugaggacuagucccuguucccagagcccacuuuuuuuucuuuuuuugaaauaaaauagccugucuuucagaucuaaaaaaaaaaaaaaaaaaaaaaaaaaaaaaaaaaaaaaaaaaaaaaaaaaaaaaaaaaaaaaaaaaaaaaaaaaaaaaaaaaaaaaaaaaaaaaaaaaaa

SEQ ID NO: 34039 - RNA, 1740 nt, Artificial Sequence
  mRNA product Design a-2 (A100) comprising derived and/or modified sequence from LASV(LASV237-NIG-2010;Clade II)__AIT17638__GPCmut8 (opt5)
aggagaguccgcucagccagguugcagaagcggcuuagcguguguccuaaucuucucucugcguguagguaggccugugccgcaaacaagcuuaccaugggccagaucauuaccuucuuucaagaggugccccacgucaucgaagagguuaugaacauugugcugaucgcccucagccugcuugcuauucugaaggggaucuacaauguggccacaugcggacucuucggccuggucuccuuucuucugcucugugggagaucuugcagcacgaccuauaaaggaguguacgaacugcagacacuggagcucgacauggcgucccugaacauguguaugccucuuucuugcaccaagaauaacagccaucacuauaucaugguuggcaaugaaacagggcuggagcucacccugacaaacaccuccauuaucaaucauaaauucuguaaccuuucugaugcucacaagaaagaccuguacgaucaugcccucaugagcauuaucuccacguuucaccugagcauuccgaauuucaaccaguaugaggccaugucuugcgacuuuaauggaggcaagaucuccgugcaguacaaccugagccacaccuaugcugucgaugccgcuaaucauuguggcacaauugccaacggggugcuccaaaccuucaugcggauggcguggggaggcucuuacaucgcccuggacuccgggaagggaagcugggauugcaucaugacaucuuaccaguaucuuauuauccagaauaccacgugggaagaccacugucaguuuucccgccccagcccuauuggcuaccuggggcuccugucccaaagaacacgggauaucuauauuucucgcagacuucugggaaccuucacauggacccucagcgacuccgagggcaacgaaacccccggcggguacugccugacacgguggaugcugaucgaggcugagcucaaauguuuuggaaacacggccguugcuaagugcaaugaaaaacaugaugaggaguucugcgacaugcugcgccuuuuugauuucuguaagcaggccaucagacggcugaaaaccccugcgcagaugagcauucagcucaucaacaaggccgugaaugcucugauuaacgaccaacuuaucaugaagaaucaucugcgcgacauuaugggcauccccuauugcaacuacucuaaauauuguuaccucaaucacacagucaccgggaagacaucccugccuagaugcugucuggugagcaacggaucuuaccucaaugaaacccacuucagcgaugacaucgaacagcaggccgauaacaugauuacggagcugcuucaaaaagaguauauggaccggcagggcaagacaccgcuggggcucguggaucuguuugucuucuccaccucuuuuuaccugaucagcauuuuccuucaccucaucaaaauucccacccaucgccacaucacaggaaagccuugccccaaaccucauagacugaaucacaugggcauuuguuccugcggccuguauaagcaccccgggguuccggugaaguggaaacggugaggacuagucccuguucccagagcccacuuuuuuuucuuuuuuugaaauaaaauagccugucuuucagaucuaaaaaaaaaaaaaaaaaaaaaaaaaaaaaaaaaaaaaaaaaaaaaaaaaaaaaaaaaaaaaaaaaaaaaaaaaaaaaaaaaaaaaaaaaaaaaaaaaaaa

SEQ ID NO: 34040 - RNA, 1740 nt, Artificial Sequence
  mRNA product Design a-2 (A100) comprising derived and/or modified sequence from LASV(LASV253-NIG-2011;Clade II)__AIT17670__GPCmut8 (opt5)
aggagaguccgcucagccagguugcagaagcggcuuagcguguguccuaaucuucucucugcguguagguaggccugugccgcaaacaagcuuaccaugggccagaucauuaccuucuuucaagaggugccccacgucaucgaagagguuaugaacauugugcugaucgcccucagccugcuugcuauucugaaggggaucuacaauguggccacaugcggacucuucggccuggucuccuuucuucugcucugugggagaucuugcagcacgaccuauaaaggaguguacgaacugcagacacuggagcucgacauggcgucccugaacauguguaugccucuuucuugcaccaagaauaacagccaucacuauaucaugguuggcaaugaaacagggcuggagcucacccugacaaacaccuccauuaucaaucauaaauucuguaaccuuucugaugcucacaagaaaaaucuguacgaccaugcccucaugagcauuaucuccacguuucaccugagcauuccgaacuucaaucaguaugaggccaugucuugcgauuuuaacggaggcaagaucuccgugcaguacaaucugagccacaccuaugcugucgacgccgcuaaccauuguggcacaauugccaauggggugcuccaaaccuucaugcggauggcguggggaggcucuuacaucgcccuggauuccgggaagggaagcugggacugcaucaugacaucuuaccaguaucuuauuauccagaacaccacgugggaagaucacugucaguuuucccgccccagcccuauuggcuaccuggggcuccugucccaaagaacacgggacaucuauauuucucgcagacuucugggaaccuucacauggacccucagcgauuccgagggcaacgaaacccccggcggguacugccugacacgguggaugcugaucgaggcugagcucaaauguuuuggaaauacggccguugcuaagugcaacgaaaaacaugacgaggaguucugcgauaugcugcgccuuuuugacuucuguaagcaggccaucagacggcugaaagcgccugcccagaugagcauucagcucaucaauaaggcugugaacgcccugauuaaugaucaacuuaucaugaagaaccaucugcgcgacauuaugggcauccccuauugcaauuacucuaaauauuguuaccucaaccacaccgucacagggagaaccucccugccucggugcugucuggugagcaauggaucuuaccucaacgaaacacacuucagcgacgauaucgaacagcaggcugacaauaugauuaccgagcugcuucaaaaggaguauaucgaucgccagggcaaaacgccgcuggggcucguggaccuguuugucuucuccacaucuuuuuaccugauuagcaucuuccuucaccucguuaagauucccacccauagacacaucauuggaaaaccuugccccaagccucaucggcugaaccacaugggcaucuguuccugcggccuguauaaacaccccggggugccggugaaguggaagcgcugaggacuagucccuguucccagagcccacuuuuuuuucuuuuuuugaaauaaaauagccugucuuucagaucuaaaaaaaaaaaaaaaaaaaaaaaaaaaaaaaaaaaaaaaaaaaaaaaaaaaaaaaaaaaaaaaaaaaaaaaaaaaaaaaaaaaaaaaaaaaaaaaaaaaa

SEQ ID NO: 34041 - RNA, 1740 nt, Artificial Sequence
  mRNA product Design a-2 (A100) comprising derived and/or modified sequence from LASV(LASV254-NIG-2011;Clade II)__AIT17674__GPCmut8 (opt5)
aggagaguccgcucagccagguugcagaagcggcuuagcguguguccuaaucuucucucugcguguagguaggccugugccgcaaacaagcuuaccaugggccagaucauuaccuucuuucaagaggugccccacgucaucgaagagguuaugaacauugugcugaucgcccucagccugcuugcuauucugaaggggaucuacaauguggccacaugcggacucuucggccuggucuccuuucuucugcucugugggagaucuugcagcacgaccuauaaaggaguguacgaacugcagacacuggagcucgacaugaccaaccugaauauguguaugccucuuuccugcacaaagaacaauucucaucacuauaucaugguuggcaacgaaaccgggcuggagcucacacugaccaauacgagcauuaucaaccauaaauucuguaaucuuuccgaugcgcacaagaaaaaccuguacaaucaugcucucaugucuauuaucagcaccuuucaccuguccauuccgaacuucaaucaguaugaggccaugagcugcgacuuuaacggaggcaagaucucugugcaguacaaucugucccacagcuaugccgucgaugcugccaaccauuguggcacaauugcuaacggggugcuccaaaccuucaugcggauggccuggggaggcucuuacaucgcgcuggacuccgggaagggaaauugggauugcaucaugacaagcuaccaguaucuuauuauccagaacaccacgugggaagaccacugucaguuuucucgccccuccccuauuggcuaccuggggcuccugagccaaagaacacgggauaucuauauuucccgcagacuucugggaaccuucacauggacccucucugacagcgagggcaaugaaacccccggcggguacugccugacacgguggaugcugaucgaggccgagcucaaauguuuuggaaacacggcuguugccaagugcaaugaaaaacaugaugaggaguucugcgacaugcugcgccuuuuugauuucuguaagcaggcuaucagacggcugaaaaccccugcccaggcgaacauucagcucaucaauaaggccgugaacgcucugauuaaugaccaacuuaucaugaagaaccaucugcgcgauauuaugggcauccccuauugcaauuacuccaaauauuguuaccucaaccacacagucaccgggaagacaagccugccuagaugcugucuggugucuaauggauccuaccucaacgaaacccacuucagcgacgacaucgaacagcaggccgauaauaugauuacggagcugcuucaaaaagaguauauggaccggcagggcaagacaccgcuggggcucguggaucuguuugucuucucuaccagcuuuuaccugaucuccauuuuccuucaccucguuaaaauccccacccaucgccacgugauuggaaagccuugccccaaaccucauagacugaaccacaugggcaucuguucuugcggccuguauaagcaccccggggugccggucaaguggaaacggugaggacuagucccuguucccagagcccacuuuuuuuucuuuuuuugaaauaaaauagccugucuuucagaucuaaaaaaaaaaaaaaaaaaaaaaaaaaaaaaaaaaaaaaaaaaaaaaaaaaaaaaaaaaaaaaaaaaaaaaaaaaaaaaaaaaaaaaaaaaaaaaaaaaaa

SEQ ID NO: 34042 - RNA, 1740 nt, Artificial Sequence
  mRNA product Design a-2 (A100) comprising derived and/or modified sequence from LASV(Nig08-A19;Clade III)__ADU56618__GPCmut8 (opt5)
aggagaguccgcucagccagguugcagaagcggcuuagcguguguccuaaucuucucucugcguguagguaggccugugccgcaaacaagcuuaccaugggccagaucgugaccuucuuucaagaggucccccacguuauugaagaggugaugaacaucgugcugauugcccucagcauccuggcuauucuuaaggggcuguacaauaucgccacaugcggacucaucggccuggucacguuccuucugcucuccgggagaucuuguagcaugaccuauaaaggaguguacgaacugcagacacuggagcucaacaugaauacccugaacaugugcaugccucuuuccuguacaaagaauaacucucaucacuauauuaugguuggcaaugaaaccgggcuggagcucacacugaccaacacgagccuucugcaucacaaauuuugcaaucucuccgacgcgcauaagaaaaaccuguacgaucacacccugaugucuaucauuagcacauuccaccucuccaucccgaauuuuaaccaguaugaggcuaugagcugugacuucaauggaggcaagauuaccgugcaguacaaccugucucauuccuaugccaucgaugccgcuaaucacugcggcacagucgccaacggggugcuucaaaccuuuaugcggauggcuuggggaggcagcuacauugcccuggacucugggcgcggaaagugggauuguaucaugacguccuaccaguaucucaucauucagaacacaaccugggaagaccauugccaguucagcagacccucuccuaucggcuaccuggggcuucugucccaacggacacgcgauauuuauaucagcagacggcuccugggaaccuuuaccuggacacuguccgacucugagggcaaugaaacgcccggcggguacugucucacccgcuggaugcugauugaggcggagcuuaaaugcuucggaaacacagccguugcuaaguguaaugaaaaacacgaugaggaauuuugcgacaugcugagacucuucgauuuuugcaagcaggccauccggcgccugaaagcuccugcccagaugagcauccagcuuauuaacaaggcggugaaugcccugaucaacgaccaacucauuaugaagaaucaccugagagauaucaugggcauucccuauuguaacuacuccaaauauugcuaccugaaucauaccagcacagggcggaccucucucccucgcuguugccuggucuccaacggaagcuaccuuaaugagacgcacuucucugacgacaucgaacagcaggcugauaacaugaucacagagaugcugcaaaaggaguaucucgacagacagggcaaaaccccgcuggggcugguggaucuuuucguguuuagcaccuccuucuaccucauuucuaucuuucugcaucuggucaagauucccacacaccggcauaucguuggaaaaccuugucccaagccucaccgccucaaucacaugggcauuugcagcuguggccuguauaaacagcccggggugccggugagauggaagcggugaggacuagucccuguucccagagcccacuuuuuuuucuuuuuuugaaauaaaauagccugucuuucagaucuaaaaaaaaaaaaaaaaaaaaaaaaaaaaaaaaaaaaaaaaaaaaaaaaaaaaaaaaaaaaaaaaaaaaaaaaaaaaaaaaaaaaaaaaaaaaaaaaaaaa

SEQ ID NO: 34043 - RNA, 1743 nt, Artificial Sequence
  mRNA product Design a-2 (A100) comprising derived and/or modified sequence from LASV(G1180-SLE-2010;Clade IV)__AIT17168__GPCmut8 (opt5)
aggagaguccgcucagccagguugcagaagcggcuuagcguguguccuaaucuucucucugcguguagguaggccugugccgcaaacaagcuuaccaugggccagaucgugaccuucuuucaagaggucccccacguuauugaagaggugaugaacaucgugcugauugcccucagcauccuggcuguccuuaaggggcuguacaauuucgccacaugcggacucgugggccugcuuacguuucugcuccugugugggagauccugcaccgcgucucgguauaaaggaguuuacgaacugcagacacucgagcugaacauggaaacccuuaauauguguaugccucugagcugcacaaagaacaauucccaucacuauauuauggugggcaacgagaccgggcucgagcugacacuuaccaauacgucuaucaucaaccauaaauucuguaaucugagcgacgcucacaagaaaaaccucuacgaucaugcccugauguccauuaucucuaccuuucaccugagcauuccgaauuucaaccaguaugaagccauguccugcgacuuuaauggaggcaagaucagcguccaguacaaccucucucacuccuaugcuggcgaugccgcuaaucauugugggacaguggccaacggaguucugcaaaccuucaugcgcauggcguggggcgggagcuacauugcccuugacucuggacacggcuccugggauugcaucaugacaagcuaccaguaucugauuauccagaacaccacgugggaggaccauugucaguuuucuagacccuccccuaucggguaccucggacugcuuagccaacggacacgcgauauuuauaucuccagacggcugcucggcaccuucacauggacccugucugacagcgaaggcaaggauacccccgggggauacugccugacacgcuggaugcucauugaggcugagcugaaauguuuuggcaauacggccguggcuaagugcaacgaaaaacacgacgaggaguucugcgauaugcuuagacuguuugacuucuguaagcaggccauccagcggcucaaagcgccugcccagauguccauucaacugaucaauaaggcugucaacgcccuuaucaaugaucagcugauuaugaagaaccaccuccgcgacaucauggggauucccuauugcaauuacagcaaauauuguuaccugaaccauaccacaaccggaaagacaucucugccuaaaugcugucucguguccaauggcagcuaccugaacgaaacccacuucucugacgauaucgaacagcaagcugacaauaugauuacggagaugcuucagaaggaguauauggaaagacaggggaaaacaccgcugggacucguggaucuguuugucuucagcaccuccuuuuaccugaucucuaucuuccuucaucucguuaagauucccacccaccggcauaucgugggcaaaagcugcccuaagccccaccgccugaaccacaugggcauuuguuccugcgggcuguauaagcagccuggagugcccgucaaauggaagagaugaggacuagucccuguucccagagcccacuuuuuuuucuuuuuuugaaauaaaauagccugucuuucagaucuaaaaaaaaaaaaaaaaaaaaaaaaaaaaaaaaaaaaaaaaaaaaaaaaaaaaaaaaaaaaaaaaaaaaaaaaaaaaaaaaaaaaaaaaaaaaaaaaaaaa

SEQ ID NO: 34044 - RNA, 1743 nt, Artificial Sequence
  mRNA product Design a-2 (A100) comprising derived and/or modified sequence from LASV(G1442-SLE-2011;Clade IV)__AIT17180__GPCmut8 (opt5)
aggagaguccgcucagccagguugcagaagcggcuuagcguguguccuaaucuucucucugcguguagguaggccugugccgcaaacaagcuuaccaugggccagaucgugaccuucuuucaagaggucccccacguuauugaagaggugaugaacaucgugcugauugcccucagcauccuggcuguccuuaaggggcuguacaauguggccacaugcggacucauuggccugguuacguuccuucugcucugugggagauccugcaccacaacccuguauaaaggaguguacgaacugcagacacucgagcugaacauggaaacccuuaauauguguaugccucugucuugcacaaagaacaauagccaucacuauauccgggucggcaacgagaccgggcucgagcugacgcuuaccaauacauccaucauuaaccauaaauuuuguaaucugucugacgcgcacaagaaaaaccucuacgaucaugcucugaugagcaucauuuccaccuuccaccugucuaucccgaauuuuaaccaguaugaagccaugagcugcgacuucaauggaggcaagauuuccgugcaguacaaccucagccacucuuaugccggcgaugcugccaaucauugugggacaguugcuaacggagugcugcaaaccuuuaugcgcauggccuggggcggguccuacaucgcgcuugacagcggaagaggcaacugggauugcauuaugacgucuuaccaguaucugaucauccagaauacaaccugggacgaucacugucaguucucccggcccagcccuauuggguaccucggacugcuuucucaacgcacaagagacgucuauaucucccggcgccugcucggcaccuuuaccuggacacugagcgauuccgagggcaaggacacgcccgggggauacugccugaccagauggaugcucauugaagccgagcugaaauguuucggcaacacagcuguggccaagugcaaugagaaacaugaugaagaguuuugcgacaugcuucggcuguucgauuuuuguaagcaggcuauccagcgccucaaagccccugcgcagaugucuauucaacugaucaacaaggccgugaaugcucuuaucaacgaccagcugauuaugaagaaucaccucagagacaucauggggauucccuauugcaacuacagcaaauauuguuaccugaauaacaccgccacaggaaagaccucccugccuaaaugcugucucaucagcaauggcucuuaccugaacgaaacgcacuucuccgaugacauugagcaggaagcugauaauaugaucacagagaugcuucaaaaggaguauauggaacggcaggggaaaaccccgcugggacucgucgaccuguucguuuuuagcaccucuuucuaccugaucagcauuuuucuucaucucgugaagauccccacacaccgccauauugugggcaaauccugcccuaagccccacagacugaaccauaugggcaucuguucuugcgggcuguauaagcagccuggaguccccgugcgguggaaacgcugaggacuagucccuguucccagagcccacuuuuuuuucuuuuuuugaaauaaaauagccugucuuucagaucuaaaaaaaaaaaaaaaaaaaaaaaaaaaaaaaaaaaaaaaaaaaaaaaaaaaaaaaaaaaaaaaaaaaaaaaaaaaaaaaaaaaaaaaaaaaaaaaaaaaa

SEQ ID NO: 34045 - RNA, 1743 nt, Artificial Sequence
  mRNA product Design a-2 (A100) comprising derived and/or modified sequence from LASV(G3010-SLE-2013;Clade IV)__AIT17344__GPCmut8 (opt5)
aggagaguccgcucagccagguugcagaagcggcuuagcguguguccuaaucuucucucugcguguagguaggccugugccgcaaacaagcuuaccaugggccagaucgugaccuucuuucaagaggucccccacguuauugaagaggugaugaacaucgugcugauugcccucagcauccuggcuguccuuaaggggcuguacaauuucgccacaugcggacucgugggccugguuacguuucuucugcucugugggagauccugcaccacaucucuguauaaaggaguguacgaacugcagacccucgagcugaacauggaaacacuuaauauguguaugccucugagcugcaccaagaacaauucccaucacuauauuauggucggcaacgagacagggcucgagcugacccuuacgaauaccucuaucaucaaccauaaauucuguaaucugagcgacgcgcacaagaaaaaccucuacaaucaugcucugauguccauuaucucuacauuucaccugagcauuccgaacuucaaucaguaugaagccauguccugcgauuuuaacggaggcaagaucagcgugcaguacaaucucucucacuccuaugccggcgacgcugccagccauugugggaccguugcuaacggagugcugcaaacauucaugcggauggccuggggcgggucuuacauugcgcuugauuccggauacggcaagugggacugcaucaugaccagcuaucaguaccugauuauccagaacacgacaugggaggaucacugucaguuuucucgccccuccccuaucggguaucucggacugcuuagccaaagaacccgggacauuuacaucucccgcagacugcucggcacauucaccuggacccugucugauagcgaaggcaaagacacacccgggggauauugccugacgcgguggaugcucauugaggccgagcugaaguguuuuggcaauaccgcugucgccaaaugcaacgaaaagcaugaugaggaguucugcgacaugcuucgccuguuugauuucuguaaacaggcuauccagagacucaagaccccugcccagauguccauucaacugaucaauaaggcggugaacgcccuuaucaaugaccagcugauuaugaaaaaccaccuccgggauaucauggggauucccuacugcaauuauagcaaguacuguuaccugaaccacacaacaaccggaaaaacgucucugccuaagugcugucucguguccaauggcagcuaucugaacgaaacacauuucucugacgacaucgaacagcaagcugauaauaugauuaccgagaugcuucagaaagaguacauggaacgccaggggaagaccccgcugggacucgucgaccuguuuguuuucagcacauccuuuuaucugaucucuaucuuccuucaccucgugaaaauucccacccauagacacaucgugggcaagagcugcccuaagccccaucggcugaaccacaugggcauuuguuccugcgggcuguacaaacagccuggaguccccgugcgcuggaagagaugaggacuagucccuguucccagagcccacuuuuuuuucuuuuuuugaaauaaaauagccugucuuucagaucuaaaaaaaaaaaaaaaaaaaaaaaaaaaaaaaaaaaaaaaaaaaaaaaaaaaaaaaaaaaaaaaaaaaaaaaaaaaaaaaaaaaaaaaaaaaaaaaaaaaa

SEQ ID NO: 34046 - RNA, 1743 nt, Artificial Sequence
  mRNA product Design a-2 (A100) comprising derived and/or modified sequence from LASV(G502-SLE-2009;Clade IV)__AIT17126__GPCmut8 (opt5)
aggagaguccgcucagccagguugcagaagcggcuuagcguguguccuaaucuucucucugcguguagguaggccugugccgcaaacaagcuuaccaugggccagaucgugaccuucuuucaagaggucccccacguuauugaagaggugaugaacaucgugcugauugcccucagcauccuggcuguccuuaaggggcuguacaauuucgccacaugcggacucgugggccugcuuacguuucugcuccugugugggagauccugcaccacaggacuguauaaaggcguuuacgaacuccagacccuggagcuuaacauggaaacacugaauauguguaugccucucucuugcaccaagaacaauagccaucacuauauuaugguggggaacgagacaggacuggagcuuacccugacgaauaccuccaucaucaaccauaaauucuguaaucucucugacgcgcacaagaaaaaccuguacgaucaugcucugaugagcauuaucuccacauuucaccucucuauuccgaauuucaaccaguaugaagccaugagcugcgacuuuaauggcggcaagaucuccguccaguacaaccugagccacucuuaugccggggaugcugccgaccauuguggaaccguggcuaauggcguucuucaaacauucaugcggauggccuggggaggguccuacauugcgcuggauagcggccgcgggagaugggacugcaucaugaccucuuaccaguaucucauuauccagaacacgacaugggaggaucacugucaguuuucccggcccagcccuaucggauaccugggccuucugucucaacgcaccagagacauuuauaucucccggcgccuccugggcacauucaccuggacccugagcgauuccgaagggaaggacacacccggaggcuacugccucacgagauggaugcugauugaggccgagcuuaaauguuuugggaacaccgcuguggccaagugcaaugaaaaacaugaugaggaguucugcgacaugcugcggcucuuugauuucuguaagcaggcuauccagcgccugaaagccccugcgcagaugucuauucaacuuaucaacaaggccgucaaugcucugaucaacgaccagcucgugaugaagaaucaccugagagacauuaugggaauccccuauugcaacuacagccgguauuguuaccugaaucacacaaccacaggccgcaccucccucccuaaaugcugucuggugagcaacgggucuuaccuuaaugaaacgcauuucuccgaugacauugaacagcaagccgauaacaugaucacagagaugcugcagaaggaguauauggaaagacagggaaaaaccccgcucggccuggucgaccuguuuguuuucagcaccucuuuuuaccuuauuagcaucuuccuccaccuggugaagauccccacacaucggcacauugugggcaaauccugcccuaagccccaucgccugaaucacauggggaucuguucuugcggacucuauaaacagccuggcguccccgugaaguggaagagaugaggacuagucccuguucccagagcccacuuuuuuuucuuuuuuugaaauaaaauagccugucuuucagaucuaaaaaaaaaaaaaaaaaaaaaaaaaaaaaaaaaaaaaaaaaaaaaaaaaaaaaaaaaaaaaaaaaaaaaaaaaaaaaaaaaaaaaaaaaaaaaaaaaaaa

SEQ ID NO: 34047 - RNA, 1743 nt, Artificial Sequence
  mRNA product Design a-2 (A100) comprising derived and/or modified sequence from LASV(G733-SLE-2010;Clade IV)__AIT17154__GPCmut8 (opt5)
aggagaguccgcucagccagguugcagaagcggcuuagcguguguccuaaucuucucucugcguguagguaggccugugccgcaaacaagcuuaccaugggccagaucgugaccuucuuucaagaggucccccacguuauugaagaggugaugaacaucgugcugauugcccucagcauccuggcuguccuuaaggggcuguacaauuucgccacaugcggaauugugggccucguuuccuuucugcuucugugugggagaucuugcacgaccagccucuauaaaggaguguacgaacugcagacacuggagcucaacauggaaacccugaauauguguaugccucuuuccugcacaaagaacaauucucaucacuauaucauggucggcaacgagaccgggcuggagcucacacugaccaauacgagcaucauuaaccauaaauucuguaaucuuuccgacgcgcacaagaaaaaccuguacgaucaugcucucaugucuaucauuagcaccuuucaccuguccaucccgaauuucaaccaguaugaagccaugagcugcgacuuuaauggaggcaagauuucugugcaguacaaccugucccacagcuaugccggcgaugcugccaaucauugugggacaaucgcuaacggaguucuccaaaccuucaugcggauggccuggggcgggucuuacauugcgcuggacuccggacgcgauagaugggacugcaucaugacaagcuaccaguaucuuaucauucagaacaccacgugggaggaucacugucaguuuucucggcccuccccuaucggcuaccuggggcuccugagccaacgcacaagagacauuuauaucucccggcgccuucugggaaccuucacauggacccucucugauagcgaaggcaaggacacccccggcggguacugccugacaagauggaugcugauugaggccgagcucaaauguuuuggaaauacggcuguggccaagugcaacgaaaaacaugaugaggaguucugcgacaugcugcggcuuuuugauuucuguaagcaggcuauccagcgccugaaagccccugcgcagauguccauccaacucauuaauaaggccgucaacgcucugaucaaugaccagcuuauuaugaagaaccaccugagagacaucaugggcauucccuauugcaauuacagcaaauauuguuaccucaaccacaccacaaccgggaagacaucucugccuaaaugcugucugguguccaauggaagcuaccucaacgaaacccauuucucugaugacaucgaacagcaagccgauaauaugaucacggagaugcugcagaaggaguauauggaacggcagggcaaaacaccgcuugggcugguggaccucuuugucuucagcaccuccuuuuaccugauuucuaucuuccugcaccuuguuaagauucccacccaucgccacguggugggaaaaagcugcccuaagccccauagacucaaccacaugggcaucuguuccugcggccuguaugggcagccuggaguccccgugaaguggaaacggugaggacuagucccuguucccagagcccacuuuuuuuucuuuuuuugaaauaaaauagccugucuuucagaucuaaaaaaaaaaaaaaaaaaaaaaaaaaaaaaaaaaaaaaaaaaaaaaaaaaaaaaaaaaaaaaaaaaaaaaaaaaaaaaaaaaaaaaaaaaaaaaaaaaaa

SEQ ID NO: 34048 - RNA, 1743 nt, Artificial Sequence
  mRNA product Design a-2 (A100) comprising derived and/or modified sequence from MOPV/LASV reassortant(IGS-1;Clade IV)__AFY05576__GPCmut8 (opt5)
aggagaguccgcucagccagguugcagaagcggcuuagcguguguccuaaucuucucucugcguguagguaggccugugccgcaaacaagcuuaccaugggccagaucgugaccuucuuucaagaggucccccacguuauugaagaggugaugaacaucgugcugauugcccucagcguccuggcugugcuuaaggggcuguacaauuucgccacaugcggacucguuggccuggugacguuucuucugcucugugggagauccugcaccacaucucuguauaaaggagucuacgaacugcagacccucgagcugaacauggaaacacuuaauauguguaugccucugagcugcaccaagaacaauucccaucacuauaucauggugggcaacgagacagggcucgagcugacccuuacgaauaccucuauuaucaaccauaaauucuguaaucugagcgacgcgcacaagaaaaaccucuacgaucaugcucugauguccaucauuucuacauuucaccugagcaucccgaauuucaaccaguaugaagccauguccugcgacuuuaauggaggcaagauuagcguucaguacaaccucucucacuccuaugccggcgaugcugccaaucauugugggaccguggcuaacggaguccugcaaacauucaugcggauggccuggggcgggagcuacaucgcgcuugacucuggacgcggcaacugggauugcauuaugaccuccuaccaguaucugaucauucagaauacgacaugggaggaccacugucaguuuagcagacccucuccuaucggguaccucggacugcuuucccaacggacccgcgauaucuauauuagcagacggcugcucggcacauucaccuggacccuguccgacucugaaggcgaggauacacccgggggauacugccugacgcgcuggaugcucaucgaggccgaacugaaguguuuuggcaacaccgcuguggccaaaugcaaugagaagcaugacgaagaguucugcgauaugcuuagacuguuugacuucuguaaacaggcuauucagcggcucaaggccccugcgcagaugagcauccaacugauuaacaaagccgugaaugcucuuaucaacgaucagcugaucaugaagaaucaccuccgcgacauuauggggauccccuauugcaacuacuccaaguauuguuaccugaaucacacaaccacaggaagaaccagccugccuaaaugcugucucgucucuaacggcuccuaccugaaugaaacgcauuucagcgacgauauugagcagcaagccgacaacaugaucacagagaugcuucagaaggaauauauggagcggcaggggaaaaccccgcugggacucguugaucuguuuguguucucuaccagcuuuuaccugauuuccaucuuccuucaccucgugaagauccccacacaucgccacauugucggcaaaucuugcccuaagccccauagacugaaucacaugggcaucuguagcugcgggcuguauaaacagccuggagugcccguuaaguggaagcggugaggacuagucccuguucccagagcccacuuuuuuuucuuuuuuugaaauaaaauagccugucuuucagaucuaaaaaaaaaaaaaaaaaaaaaaaaaaaaaaaaaaaaaaaaaaaaaaaaaaaaaaaaaaaaaaaaaaaaaaaaaaaaaaaaaaaaaaaaaaaaaaaaaaaa

SEQ ID NO: 34049 - RNA, 1743 nt, Artificial Sequence
  mRNA product Design a-2 (A100) comprising derived and/or modified sequence from LASV(LM765-SLE-2012;Clade IV)__AIT17814__GPCmut8 (opt5)
aggagaguccgcucagccagguugcagaagcggcuuagcguguguccuaaucuucucucugcguguagguaggccugugccgcaaacaagcuuaccaugggccagaucgugaccuucuuucaagaggucccccacguuauugaagaggugaugaacaucgugcugauugcccucagcauccuggcuguccuuaaggggcuguacaauuucgccacaugcggacucgugggccugguuacguuucuucugcucugugggagauccugcaccacaucucuguauaaaggaguguacgaacugcagacccucgagcugaacauggaaacacuuaauauguguaugccucugagcugcaccaagaacaauucccaucacuauauuauggucggcaacgagacagggcucgagcugacccuuacgaauaccucuaucaucgaccauaaauucuguaaccugagcgaugcgcaccggaagaaucucuacgaccaugcucugauguccauuaucucuacauuucaccugagcauuccgaacuucaaucaguaugaagccauguccugcgauuuuaacggaggcaaaaucagcgugcaguacaaucucucucacuccuaugccaaggacgcugccgaucauuguggcaccguugcuaacggggugcugcaaacauucaugcgcauggccuggggaggcagcuacauugcgcuugacucugggagaggacggugggauugcaucaugaccuccuaccaguaucugauuauccagaauacgacaugggaggaccacugucaguuuagccgccccucuccuaucggcuaccucgggcugcuuucccaaagaacccgggauauuuauaucagccgcagacugcucggaacauucaccuggacccuguccgacucugaaggcaaggauacacccggcggguacugccugacgcgguggaugcucauugaggccgagcugaaauguuuuggaaacaccgcugucgccaagugcaacgaaaaacaugacgaggaguucugcgauaugcuucgccuguuugacuucuguaagcaggcuauccagagacucaaagccccugcgcagaugagcauucaacugaucaauaaggccgugaacgcucuuaucaaugaccagcugauuaugaagaaccaccuccgggauaucaugggcauucccuauugcaauuacuccaaauauuguuaccugaaccacacaaccacagggaagaccagccugccuaaaugcugucucgugucuaauggauccuaccugaacgaaacgcauuucagcgacgauaucgaacagcaagccgacaauaugauuacagagaugcuucagaaggaguauauggaacgccagggcaaaaccccgcuggggcucgucgaucuguuuguuuucucuaccagcuuuuaccugaucuccaucuuccuucaccucgugaagauucccacacauagacacaucgugggaaaaccuugccccaagccucaucggcugaaccacaugggcauuuguucuugcggccuguauaagcagcccggggucccggugaaauggaagcgcugaggacuagucccuguucccagagcccacuuuuuuuucuuuuuuugaaauaaaauagccugucuuucagaucuaaaaaaaaaaaaaaaaaaaaaaaaaaaaaaaaaaaaaaaaaaaaaaaaaaaaaaaaaaaaaaaaaaaaaaaaaaaaaaaaaaaaaaaaaaaaaaaaaaaa

SEQ ID NO: 34050 - RNA, 1743 nt, Artificial Sequence
  mRNA product Design a-2 (A100) comprising derived and/or modified sequence from LASV(LM776-SLE-2012;Clade IV)__AIT17824__GPCmut8 (opt5)
aggagaguccgcucagccagguugcagaagcggcuuagcguguguccuaaucuucucucugcguguagguaggccugugccgcaaacaagcuuaccaugggccagaucgugaccuucuuucaagaggucccccacguuauugaagaggugaugaacaucgugcugauugcccucagcauccuggcuguccuuaaggggcuguacaauuucgccacaugcggacucgugggccugguuacguuucuucugcucugugggagauccugcaccacaucuguguauaaaggagucuacgaacugcagacccuggagcucaacauggaaacacugaauauguguaugccucuuagcugcaccaagaacaauucccaucacuauauuauggugggcaacgagacagggcuggagcucacccugacgaauaccucuaucaucaaccauaaauucuguaaucuuagcgacgcgcacaagaaaaaccuguacgaucaugcucucauguccauuaucucuacauuucaccugagcauuccgaauuucaaccaguaugaagccauguccugcgacuuuaauggaggcaagaucagcguucaguacaaccugucucacuccuaugccggcgaugcugccaaucauugugggaccguggcuaacggaguccuccaaacauucaugcggauggccuggggcgggagcuacauugcgcuggacucuggacacggcaagugggauugcaucaugaccuccuaccaguaucuuauuauccagaacacgacaugggaggaccauugucaguuuagccgccccucuccuaucggguaccugggacuccugucccaaagaacccgggauauuuauaucagccgcagacuucugggcacauucaccuggacccucuccgacucugaaggcaaagauacacccgggggauacugccugacgcgguggaugcugauugaggccgagcucaaguguuuuggcaauaccgcuguggccaaaugcaacgaaaagcacgacgaggaguucugcgauaugcugcgccuuuuugacuucuguaaacaggcuauccagagacugaaggccccugcgcagaugagcauucaacucaucaauaaggccgugaacgcucugaucaaugaucagcuuauuaugaaaaaccaucugcgggacaucauggggauucccuauugcaauuacuccaaguauuguuaccucaaccacacaaccacaggaaaaaccagccugccuaagugcugucuggucucuaauggcuccuaccucaacgaaacgcacuucagcgacgauaucgaacagcaagccgacaauaugauuacagagaugcugcagaaagaguauauggaacgccaggggaagaccccgcuuggacugguugaucucuuuguguucucuaccagcuuuuaccugaucuccaucuuccugcaucuugugaaaauucccacacacagacauaucgucggcaagucuugcccuaagccccaccggcucaaccacaugggcauuuguagcugcgggcuguauaaacagccuggagugcccguucgcuggaagagaugaggacuagucccuguucccagagcccacuuuuuuuucuuuuuuugaaauaaaauagccugucuuucagaucuaaaaaaaaaaaaaaaaaaaaaaaaaaaaaaaaaaaaaaaaaaaaaaaaaaaaaaaaaaaaaaaaaaaaaaaaaaaaaaaaaaaaaaaaaaaaaaaaaaaa

SEQ ID NO: 34051 - RNA, 1743 nt, Artificial Sequence
  mRNA product Design a-2 (A100) comprising derived and/or modified sequence from LASV(Mad39;Clade IV)__ANH09722__GPCmut8 (opt5)
aggagaguccgcucagccagguugcagaagcggcuuagcguguguccuaaucuucucucugcguguagguaggccugugccgcaaacaagcuuaccaugggccagaucgugaccuucuuucaagaggucccccacguuauugaagaggugaugaacaucgugcugauugcccucagcauccuggcuguccuuaaggggcuguacaauguggccacaugcggacucauuggccugguuacguuccuucugcucugugggagauccugcaccacaacccuguauaaaggaguguacgaacugcaggcgcucgagcugaacauggaaacacuuaauauguguaugccucugucuugcaccaagaacaauagccaucacuauauccgggucggcaacgagacagggcucgagcugacccuuacgaauaccucccugaucaaccauaaauuuuguaaucucucugacgcucacaagaaaaaccuguacgaucaugcccugaugagcauuaucuccacauuccaccucucuauuccgaauuuuaaccaguaugaagccaugagcugcgacuucaaugauggaaagaucuccgugcaguacaaccugagccacaccuaugcuggcgacacagccaaucauuguggcaccguugcuaacggggugcuucaaacguuuaugcgcauggccuggggaggcucuuacauugcgcuggauuccgggagaggaggcugggacugcaucaugacaagcuaccaguaucucauuauccagaacaccacaugggaggaucacugucaguucucucggcccuccccuaucggguaccugggacuucugagccaacgcaccagagacauuuauaucucucggcgccuccugggcaccuuuacauggacgcuguccgauagcgaaggcaaggacacccccgggggauacugccucacaagauggaugcugauugaggccgagcuuaaauguuucggcaauaccgcugucgccaagugcaacgaaaaacaugaugaggaauuuugcgacaugcugcgccucuucgauuuuuguaagcaggcuauccagcggcugaaagccccugcgcagauguccauucaacuuaucaauaaggccgugaacgcucugaucaaugaccagcucauuaugaagaaccaccugagagacaucauggggauucccuauugcaauuacucuaaauauuguuaccugaaccacacagugaccggaaagacgagccucccuaaaugcugucuggucuccaauggcagcuaccuuaacgagacacauuucucugaugacaucgaacagcaagccgauaauaugauuaccgagaugcugcagaaggaguauauggaacggcaggggaaaaccccgcucggacugguugaccuguucguguuuuccaccagcuucuaccuuaucucuaucuuucuccaccuggugaagauucccacacaucgccacgucgugggcaaaccuugccccaagccucauagacugaaccacaugggcaucuguagcugcggguucuauaagcagcccggaguuccggugcgguggaaacgcugaggacuagucccuguucccagagcccacuuuuuuuucuuuuuuugaaauaaaauagccugucuuucagaucuaaaaaaaaaaaaaaaaaaaaaaaaaaaaaaaaaaaaaaaaaaaaaaaaaaaaaaaaaaaaaaaaaaaaaaaaaaaaaaaaaaaaaaaaaaaaaaaaaaaa

SEQ ID NO: 34052 - RNA, 1743 nt, Artificial Sequence
  mRNA product Design a-2 (A100) comprising derived and/or modified sequence from LASV(Z0947-SLE-2011;Clade IV)__AIT17840__GPCmut8 (opt5)
aggagaguccgcucagccagguugcagaagcggcuuagcguguguccuaaucuucucucugcguguagguaggccugugccgcaaacaagcuuaccaugggccagaucgugaccuucuuucaagaggucccccacguuauugaagaggugaugaacaucgugcugauugcccucagcauccuggcuguccuuaaggggcuguacaauuucgccacaugcggacucgugggccugguuacguuucuucugcucugugggagauccugcaccauuucucuguauaaaggaguguacgaacugcagacacucgagcugaacauggaaacccuuaauauguguaugccucugagcugcacaaagaacaauucccaucacuauaucauggucggcaacgagaccgggcucgagcugacacuuaccaauacgucuaucauuaaccauaaauucuguaaucugagcgacgcgcacaagaaaaaccucuacgaucaugcucugauguccaucauuucuaccuuucaccugagcaucccgaauuucaaccaguaugaagccauguccugcgacuuuaauggaggcaagauuagcgugcaguacaaccucucucacuccuaugccggcgaugcugccaaucauugugggacaguugcuaacggagugcugcaaaccuucaugcggauggccuggggcgggagcuacaucgcgcuugacucuggacgcgauagaugggacugcauuaugacauccuaccaguaucugaucauccagaacaccacgugggaggaucacugucaguuuagccggcccucuccuauuggcuaccucgggcugcuuucccaacgcacaagagacaucuauauuagccggcgccugcucggaaccuucacauggacccuguccgauucugaaggcaaggacacccccggcggguacugccugacaagauggaugcucaucgaggccgagcugaaauguuuuggaaauacggcugucgccaagugcaacgaaaaacaugaugaggaguucugcgacaugcuucggcuguuugauuucuguaagcaggcuauucagcgccucaaagccccugcgcagaugagcauccaacugaucaauaaggccgugaacgcucuuauuaaugaccagcugaucaugaagaaccaccucagagacauuaugggcauccccuauugcaauuacuccaaauauuguuaccugaaccacaccacaaccgggaagacaagccugccuaaaugcugucucgugucuaauggauccuaccugaacgaaacccauuucagcgaugacauugaacagcaagccgauaauaugaucacggagaugcuucagaaggaguauauggaacggcagggcaaaacaccgcuggggcucgucgaccuguuuguuuucucuaccagcuuuuaccugaucuccauuuuccuucaccucgugaagauccccacccaucgccacauugugggaaaaccuugccccaagccucauagacugaaccacaugggcaucuguucuugcggccuguauaagcagcccggggucccggugaaauggaagcggugaggacuagucccuguucccagagcccacuuuuuuuucuuuuuuugaaauaaaauagccugucuuucagaucuaaaaaaaaaaaaaaaaaaaaaaaaaaaaaaaaaaaaaaaaaaaaaaaaaaaaaaaaaaaaaaaaaaaaaaaaaaaaaaaaaaaaaaaaaaaaaaaaaaaa

SEQ ID NO: 34053 - RNA, 1781 nt, Artificial Sequence
  mRNA product Design b-4 (hSL-A64-N5) comprising derived and/or modified sequence from LASV(Josiah;Clade IV)__NP_694870__GPCmut8 (opt1)
aggagagucccgcagucggcguccagcggcucugcuuguucgugugugugucguugcaggccuuauucaagcuuaccaugggccagaucgugaccuucuuccaggaggucccccacgugaucgaggaggugaugaacaucguccugaucgcccucagcgugcuggccgugcugaaggggcucuacaacuucgcgaccugcggccuggucgggcuggugacguuccuccugcugugcggccgcuccugcaccaccagccucuacaaggggguguacgagcugcagacccuggagcucaacauggagacgcugaacaugugcaugccgcuguccugcaccaagaacaacagccaccacuacaucauggucggcaacgagaccggccucgagcugacgcugaccaacaccuccaucaucaaccacaaguucugcaaccucagcgacgcccacaagaagaaccuguacgaccacgcccugauguccaucaucagcaccuuccaccucuccauccccaacuucaaccaguacgaggccaugagcugcgacuucaacgggggcaagaucuccgugcaguacaaccugagccacuccuacgccggggacgcggccaaccacugcggcacgguggccaacgggguccugcagaccuucaugcggauggccuggggcggcagcuacaucgcgcucgacuccgggcgcggcaacugggacugcaucaugaccagcuaccaguaccugaucauccagaacaccacgugggaggaccacugccaguucucccggcccagccccaucggguaccugggccuccugucccagcgcacccgggacaucuacaucagccgccggcugcucggcaccuucaccuggacgcugagcgacuccgaggggaaggacaccccgggcggguacugccugacccgcuggaugcucaucgaggccgagcugaagugcuucggcaacaccgccguggccaagugcaacgagaagcacgacgaggaguucugcgacaugcugcggcuguucgacuucugcaagcaggccauccagcgccugaaggcgcccgcccagaugagcauccagcugaucaacaaggccgugaacgcccucaucaacgaccagcugaucaugaagaaccaccuccgggacaucauggggauccccuacugcaacuacuccaaguacugcuaccucaaccacacgaccaccggccgcaccagccugcccaagugcugccuggucuccaacggcagcuaccucaacgagacgcacuucuccgacgacaucgagcagcaggccgacaacaugaucaccgagaugcugcagaaggaguacauggagcggcaggggaagacgccccugggccucguggaccuguucguguucagcaccuccuucuaccugaucagcaucuuccugcaccucgucaagaucccgacccaccgccacaucguggggaaguccugccccaagccccaccggcugaaccacaugggcaucugcagcugcgggcuguacaagcagcccggcgugccggucaaguggaagcgcugaggacuaguaauaaggaaacuguaugaaugucugugggcaggaagugaagagauccuucuguaaagguuuuuggaauuaugucugcugaauaauaaacuuuuuugaaauaauaaaucugguagaaaaaugagaucucaaaggcucuuuucagagccaccaaaaaaaaaaaaaaaaaaaaaaaaaaaaaaaaaaaaaaaaaaaaaaaaaaaaaaaaaaaaaaaaagaauu

SEQ ID NO: 34054 - RNA, 1778 nt, Artificial Sequence
  mRNA product Design b-4 (hSL-A64-N5) comprising derived and/or modified sequence from LASV(LP;Clade I)__AAF86701__GPCmut8 (opt1)
aggagagucccgcagucggcguccagcggcucugcuuguucgugugugugucguugcaggccuuauucaagcuuaccaugggccagaucaucaccuucuuccaggaggugccccacgucaucgaggaggugaugaacaucgugcugaucgcccucagccugcuggccauccucaaggggcuguacaacaucgcgaccugcggcaucaucgggcuggucgccuuccucuuccugugcggcaaguccugcagccugacgcucaagggcggguacgagcugcagacccuggagcucaacauggagacccugaacaugugcaugccgcuguccugcacgaagaacagcucccaccacuacauccgcgugggcaacgagaccgggcucgagcugacccugaccaacacgagcaucaucaaccacaaguucugcaaccucuccgacgcccacaagaagaaccuguacgaccacgcccugaugagcaucaucuccaccuuccaccucagcauccccaacuucaaccaguacgaggccauguccugcgacuucaacggcgggaagaucagcgugcaguacaaccugucccacagcuacgcgggcgacgccgccgagcacugcgggaccgucgccaacggcgugcugcagaccuucaugcggauggcguggggcgggcgcuacaucgcccucgacuccggcaaggggaacugggacugcaucaugacgagcuaccaguaccugaucauccagaacaccaccugggaggaccacugccaguucucccggcccagccccaucggcuaccugggccuccugucccagcgcacccgggacaucuacaucagccgccggcugcucgggacguucaccuggacccugagcgacuccgagggcaacgagacccccgggggcuacugccugacgcgcuggaugcucaucgaggccgagcugaagugcuucgggaacaccgccguggccaagugcaacgagaagcacgacgaggaguucugcgacaugcugcggcuguucgacuucugcaagcaggcgauccgccggcugaaggcccccgcccagaugagcauccagcugaucaacaaggccgucaacgcccucaucaacgaccagcugaucaugaagaaccaccuccgcgacaucaugggcauccccuacugcaacuacuccaaguacugcuaccucaaccacaccagcuccggccggaccagccugcccaagugcugccugaucuccaacgggagcuaccucaacgagacgcaguucuccgacgacaucgagcagcaggcggacaacaugaucaccgagaugcugcagaaggaguacaucgagcgccagggcaagaccccgcuggggcucguggacaucuucaucuucagcaccuccuucuaccugaucagcaucuuccugcaccugaucaagaucccgacgcaccggcacaucgugggcaagcccugccccaagccccaccgccucaaccacaugggggucugcuccugcggccuguacaagcacccgggcgugcccaccaaguggaagcggugaggacuaguaauaaggaaacuguaugaaugucugugggcaggaagugaagagauccuucuguaaagguuuuuggaauuaugucugcugaauaauaaacuuuuuugaaauaauaaaucugguagaaaaaugagaucucaaaggcucuuuucagagccaccaaaaaaaaaaaaaaaaaaaaaaaaaaaaaaaaaaaaaaaaaaaaaaaaaaaaaaaaaaaaaaaaagaauu

SEQ ID NO: 34055 - RNA, 1778 nt, Artificial Sequence
  mRNA product Design b-4 (hSL-A64-N5) comprising derived and/or modified sequence from LASV(803213;Clade II)__AAF86703__GPCmut8 (opt1)
aggagagucccgcagucggcguccagcggcucugcuuguucgugugugugucguugcaggccuuauucaagcuuaccaugggccagaucaucaccuucuuccaggaggugccccacgucaucgaggaggugaugaacaucgugcugaucgcccucagccugcuggccauccucaaggggaucuacaacgucgcgaccugcggccuguucgggcugaucuccuuccuccugcugugcggccgcagcugcuccgugacguacaaggggguguacgagcuccagacccuggagcugaacauggccaaccucaacaugugcaugccgcugagcugcaccaagaacaacucccaccacuacaucauggucggcaacgagacgggccuggagcucacccugaccaacaccagcaucaucaaccacaaguucugcaaccuguccgacgcccacaagaagaaccucuacgaccacgcccugaugagcaucaucuccacguuccaccugagcauccccaacuucaaccaguacgaggccauguccugcgacuucaacgggggcaagaucagcgugcaguacaaccucucccacagcuucgcgguggacgccgccaaccacugcgggaccaucgccaacggcguccugcagaccuucaugcggauggcguggggcggguccuacaucgcccuggacagcggcaaggggaacugggacugcaucaugaccuccuaccaguaccucaucauccagaacacgaccugggaggaccacugccaguucagccgccccucccccaucggcuaccuggggcugcucagccagcggacccgcgacaucuacaucagccggcgccugcugggcaccuucacguggacccucuccgacagcgagggcaacgaggcccccgggggcuacugccugacccgguggaugcugaucgaggccgagcucaagugcuucgggaacaccgccguggcgaagugcaacgagaagcacgacgaggaguucugcgacaugcugcgccuguucgacuucugcaagcaggccaucaagcggcucaagacgcccgcccagauguccauccagcugaucaacaaggccgugaacgcccugaucaacgaccagcucaucaugaagaaccaccuccgcgacaucaugggcauccccuacugcaacuacagccgguacugcuaccugaaccacaccgucaccgggaagaccucccugccccgcugcugccuggugagcaacggcuccuaccugaacgagacgcacuucagcgacgacaucgagcagcaggcggacaacaugaucaccgagaugcuccagaaggaguacauggaccggcagggcaagaccccgcuggggcugguggaccucuucgucuucuccaccagcuucuaccugaucuccaucuuccugcaccuggugaagaucccgacgcaccgccacaucgugggcaagcccugccccaagccccaccggcucaaccacauggggaucugcagcugcggccuguacaagcacccggggguccccgugaaguggaagcgcugaggacuaguaauaaggaaacuguaugaaugucugugggcaggaagugaagagauccuucuguaaagguuuuuggaauuaugucugcugaauaauaaacuuuuuugaaauaauaaaucugguagaaaaaugagaucucaaaggcucuuuucagagccaccaaaaaaaaaaaaaaaaaaaaaaaaaaaaaaaaaaaaaaaaaaaaaaaaaaaaaaaaaaaaaaaaagaauu

SEQ ID NO: 34056 - RNA, 1778 nt, Artificial Sequence
  mRNA product Design b-4 (hSL-A64-N5) comprising derived and/or modified sequence from LASV(GA391;Clade III)__CAA36645__GPCmut8 (opt1)
aggagagucccgcagucggcguccagcggcucugcuuguucgugugugugucguugcaggccuuauucaagcuuaccaugggccagaucgugaccuucuuccaggaggucccccacgugaucgaggaggugaugaacaucguccugaucgcccucagcauccuggccauccugaaggggcucuacaacguggcgaccugcggccugaucgggcuggugacguuccuccugcuguccggccgcagcugcucccucaucuacaaggggaccuacgagcugcagacccuggagcucaacauggagacccugaacaugugcaugccgcugagcugcaccaagaacaacucccaccacuacauccgggucggcaacgagaccggccucgagcugacccugacgaacaccagcauccucaaccacaaguucugcaaccuguccgacgcccacaagcgcaaccuguacgaccacagccucauguccaucaucagcaccuuccaccuguccauccccaacuucaaccaguacgaggccaugagcugcgacuucaacgggggcaagaucaccgugcaguacaaccugucccacagcuucgccguggacgccgcggggcacugcggcacgcucgccaacgggguccugcagaccuucaugcggauggccuggggcggcuccuacaucgcccuggacagcgggcgcggcaacugggacugcaucaugaccuccuaccaguaccucaucauccagaacaccacgugggacgaccacugccaguucagccggcccucccccaucggguaccugggccugcucagccagcgcacccgggacaucuacaucagccgccggcugcugggcaccuucaccuggacgcucuccgacagcgaggggaacgagaccccgggcggguacugccugacccgcuggaugcugaucgaggcggagcucaagugcuucggcaacaccgccguggccaagugcaacgagaagcacgacgaggaguucugcgacaugcugcggcuguucgacuucugcaagcaggccauccgccggcucaagacgcccgcccagauguccauccagcugaucaacaaggcggugaacgcccugaucaacgaccagcucaucaugaagaaccaccuccgcgacaucauggggauccccuacugcaacuacagccgguacugcuaccugaaccacaccuccaccggcaagaccagccugccccgcugcugccugaucuccaacggcagcuaccugaacgagacgaaguucuccgacgacaucgagcagcaggccgacaacaugaucaccgagaugcuccagaaggaguacaucgaccggcaggggaagacgccccugggccuggucgaccuguucguguucagcaccuccuucuaccucaucagcaucuuccugcaccuggugaagaucccgacccaccgccacaucgucgggaagcccugccccaagccccaccggcucaaccacaugggcaucugcuccugcgggcuguacaagcagccgggcgugcccgugcgcuggaagcggugaggacuaguaauaaggaaacuguaugaaugucugugggcaggaagugaagagauccuucuguaaagguuuuuggaauuaugucugcugaauaauaaacuuuuuugaaauaauaaaucugguagaaaaaugagaucucaaaggcucuuuucagagccaccaaaaaaaaaaaaaaaaaaaaaaaaaaaaaaaaaaaaaaaaaaaaaaaaaaaaaaaaaaaaaaaaagaauu

SEQ ID NO: 34057 - RNA, 1781 nt, Artificial Sequence
  mRNA product Design b-4 (hSL-A64-N5) comprising derived and/or modified sequence from LASV(AV;Clade V)__CCA30314__GPCmut8 (opt1)
aggagagucccgcagucggcguccagcggcucugcuuguucgugugugugucguugcaggccuuauucaagcuuaccaugggccagaucgugaccuucuuccaggaggucccccacgugaucgaggaggugaugaacaucguccugaucgcccucagcauccuggccgugcugaaggggcucuacaacaucgcgaccugcggccugaucgggcugaucacguuccuccugcugugcggccgcuccugcagcuccaaccucuacaaggggguguacgagcugcagagccuggaccucaacauggagacccugaacaugugcaugccgcuguccugcaccaagaacaacagccaccacuacauccgggucggcaacgacacgggccucgagcugacccugaccaacaccuccauccucaaccacaaguucugcaaccugagcgacgcccacaagaaggaccuguacgaccacgcccucauguccaucaucagcacguuccaccuguccauccccaacuucaaccaguacgaggccaugagcugcgacuucaacgggggcaagaucuccgugcaguacaaccugagccacuccuacgccaucgacgcggccaaccacugcgggaccguggccaacggcauccuccagaccuucaugcgcauggccuggggcgggagcuacaucgcgcuggacuccggccgggggaacugggacugcaucaugaccagcuaccaguaccugaucauccagaacacgaccugggagaaccacugccaguucucccgccccagccccaucggcuaccucgggcugcugagccagcggacccgcgacaucuacaucucccggcgccuccugggcaccuucacguggacccugagcgacuccgagggcaacgccacccccgggggcuacugccucacccgguggaugcugaucgaggccgagcugaagugcuucgggaacacggccgucgccaagugcaacgagaagcacgacgaggaguucugcgacaugcuccgccuguucgacuucugcaagcaggcgaucagccggcugaagucccccgcccagaugagcauccagcucaucaacaaggccgugaacgcccugaucaacgaccagcugaucaugaagaaccaccuccgcgacaucaugggcauccccuacugcaacuacuccaaguacugcuaccugaaccacaccaucaccgggaagaccagccugcccaagugcugccucguguccaacggcagcuaccugaacgagacgcacuucuccgacgacaucgagcagcaggccgacaacaugaucaccgagaugcugcagaaggaguacauggagcggcagggcaagaccccgcucgggcuggucgaccuguucguguucagcaccuccuucuaccugaucagcaucuuccuccgccuggugaagaucccgacgcaccggcacaucgucggcaagcccugccccaagccccaccgccugaaccacauggggaucugcuccugcggccucuacaagcagccgggggugcccgugcgguggaagcgcugaggacuaguaauaaggaaacuguaugaaugucugugggcaggaagugaagagauccuucuguaaagguuuuuggaauuaugucugcugaauaauaaacuuuuuugaaauaauaaaucugguagaaaaaugagaucucaaaggcucuuuucagagccaccaaaaaaaaaaaaaaaaaaaaaaaaaaaaaaaaaaaaaaaaaaaaaaaaaaaaaaaaaaaaaaaaagaauu

SEQ ID NO: 34058 - RNA, 1778 nt, Artificial Sequence
  mRNA product Design b-4 (hSL-A64-N5) comprising derived and/or modified sequence from LASV(Togo/2016/7082;Clade VI)__AMR44577__GPCmut8 (opt1)
aggagagucccgcagucggcguccagcggcucugcuuguucgugugugugucguugcaggccuuauucaagcuuaccaugggccagaucaucaccuucuuccaggaggugccccacgucaucgaggaggugaugaacaucgugcugaucgcccucagccugcuggccauccucaagggggucuacaacguggcgaccugcggcaucaucgggcuggugacguuccuguuccucugcggccgcuccugcagccugaucuacaagggguccuacgagcugcagacccucgagcugaacauggagacccugaacaugugcaugccgcucagcugcacgaagaacuccagccaccacuacauccgggucggcaacgagaccggccuggagcugacccucaccaacacguccaucaucaaccacaaguucugcaaccugagcgacgcccacaagcgcaaccuguacgaccacgcccucauguccauccugagcaccuuccaccuguccauccccaacuucaaccaguacgaggccaugagcugcgacuucaacgggggcaagaucuccgugcaguacaaccucagccacgccuacgcgguggacgccgccgagcacugcgggaccgucgccaacggcgugcugcagaccuucaugcggauggcguggggcggguccuacaucgcccuggacagcggccgcgggaacugggacugcaucaugacguccuaccaguaccucaucauccagaacaccaccugggaggaccacugccaguucagccggcccucccccaucggcuaccuggggcugcucagccagcgcacccgggacaucuacaucagccgccggcugcugggcacguucaccuggacccucuccgacagcgagggcaacgagacccccgggggcuacugccugacgcgcuggaugcugaucgaggccgagcucaagugcuucgggaacaccgccguggccaagugcaacgagaagcacgacgaggaguucugcgacaugcugcggcuguucgacuucugcaagcaggcgauccagcgccucaagucccccgcccagaugagcauccagcugaucaacaaggccgucaacgcccugaucaacgaccagcucaucaugaagaaccaccuccgggacaugaugggcauccccuacugcaacuacuccaaguacugcuaccugaaccacaccagcuccgggcgcaccagccugcccaagugcugccugguguccaacggcagcuaccugaacgagacgcacuucuccgacgacaucgagcagcaggccgacaacaugaucaccgagaugcuccagaaggaguacaucgaccggcagggcaagaccccgcuggggcugguggaccucuucgucuucagcaccuccuucuaccugaucagcaucuuccugcaccugaucaagaucccgacgcaccgccacaucgugggcaagcccugccccaagccccaccggcucaaccacauggggaucugcuccugcggccuguacaagcagccgggggugcccacccgcuggaagcggugaggacuaguaauaaggaaacuguaugaaugucugugggcaggaagugaagagauccuucuguaaagguuuuuggaauuaugucugcugaauaauaaacuuuuuugaaauaauaaaucugguagaaaaaugagaucucaaaggcucuuuucagagccaccaaaaaaaaaaaaaaaaaaaaaaaaaaaaaaaaaaaaaaaaaaaaaaaaaaaaaaaaaaaaaaaaagaauu

SEQ ID NO: 34059 - RNA, 1778 nt, Artificial Sequence
  mRNA product Design b-4 (hSL-A64-N5) comprising derived and/or modified sequence from LASV(KAK-428;Clade n.d. (VII))__ANH09740__GPCmut8 (opt1)
aggagagucccgcagucggcguccagcggcucugcuuguucgugugugugucguugcaggccuuauucaagcuuaccaugggccagaucgugaccuucuuccaggaggucccccacgugaucgaggaggugaugaacaucguccugaucgcccucagccugcuggccauccucaaggggcuguacaacuucgcgaccugcggcgugaucgggcugaucacguuccuccugcugugcggccgcuccugcagcgccaccuacaaggggcaguacgagcuccagacccuggagcugaacauggagucccucaacaugugcaugccgcugagcugcacgaagaacaacucccaccacuacauccgggccggcaacaacaccggccuggagcucacccugaccaacacgagcaucaucucccacaaguucugcaaccugagcgacgcccacaagaagaaccucuacgaccacacccugauguccaucaucaccaccuuccaccugagcauccccaacuucaaccaguacgaggccauguccugcgacuucaacgggggcaagaucagcauccaguacaaccucucccacagcuacgcgggggacgccgcccagcacugcggcacgguggccaacgggguccugcagaccuucaugcgcauggcguggggcggcuccuaccuggcccucgacagcgggcggcgcggcugggacugcaucaucuccagcuaccaguaccugaucauccagaacaccaccugggacgaccacugccaguucucccggcccagccccaucggguaccugggcuucgugagccagaagacgcgcgacaucuacaucucccggcgccuccugggcaccuucaccuggacccugagcgacuccgaggggcacgacaugccgggcggguacugccucacgcgguggaugcugaucgaggccgaccugaagugcuucggcaacaccgccguggccaagugcaacgagaagcacgacgaggaguucugcgacauguggcgccucuucgacuucugcaagcaggcgauccagcggcugaaggcccccgcccagaugaacauccagcugaucaacaaggccgucaacgcccucaucaacgaccagcugaugaugaagaaccaccuccgcgacaucauggggauccccuacugcaacuacagcaaguucugcuaccugaacaacaccaccacgggccggaccucccugccccgcugcugccugaucagcaacggcuccuaccucaacgagacccacuucagcgacgacaucgagcagcaggcggacaacaugaucaccgagaugcugcagaaggaguacauggaccggcaggggaagacgccccugggccucguggaccuguucguguucuccaccagcuucuaccugaucaccaucuuccuccaccuggucaagaucccgacccaccgccacaucguggggaagcccugccccaagccccaccggcugaaccacaugggcaucugcuccugcgggcuguacaagcagccgggcgugcccguccgcuggaagcggugaggacuaguaauaaggaaacuguaugaaugucugugggcaggaagugaagagauccuucuguaaagguuuuuggaauuaugucugcugaauaauaaacuuuuuugaaauaauaaaucugguagaaaaaugagaucucaaaggcucuuuucagagccaccaaaaaaaaaaaaaaaaaaaaaaaaaaaaaaaaaaaaaaaaaaaaaaaaaaaaaaaaaaaaaaaaagaauu

SEQ ID NO: 34060 - RNA, 1778 nt, Artificial Sequence; identical to SEQ ID NO: 34054
  mRNA product Design b-4 (hSL-A64-N5) comprising derived and/or modified sequence from LASV(Pinneo-NIG-1969;Clade I)__AIT17836__GPCmut8 (opt1)

SEQ ID NO: 34061 - RNA, 1778 nt, Artificial Sequence
  mRNA product Design b-4 (hSL-A64-N5) comprising derived and/or modified sequence from LASV(ISTH0009-NIG-2011;Clade II)__AIT17404__GPCmut8 (opt1)
aggagagucccgcagucggcguccagcggcucugcuuguucgugugugugucguugcaggccuuauucaagcuuaccaugggccagaucaucaccuucuuccaggaggugccccacgucaucgaggaggugaugaacaucgugcugaucgcccucagccugcuggccauccucaaggggaucuacaacgucgcgaccugcggccuguucgggcugguguccuuccuccugcugugcggccgcagcugcuccacgaccuacaaggggguguacgagcuccagacccuggagcuggacauggccagccucaacaugugcaugccgcuguccugcacgaagaacaacagccaccacuacaucauggucggcaacgagaccggccuggagcucacccugaccaacacguccaucaucaaccacaaguucugcaaccugagcgacgcccacaagaagaaccucuacgaccacgcccugauguccaucaucagcaccuuccaccuguccauccccaacuucaaccaguacgaggccaugagcugcgacuucaacgggggcaagaucuccgugcaguacaaccucagccacgcguacgccguggacgccgccaaccacugcgggaccaucgcgaacggcguccugcagaccuucaugcggauggccuggggcggguccuacaucgcccuggacagcggcaagggguccugggacugcaucaugacgagcuaccaguaccucaucauccagaacaccaccugggaggaccacugccaguucucccgccccagccccaucggcuaccuggggcugcucagccagcggacccgcgacaucuacaucucccggcgccugcugggcacguucaccuggacccucagcgacuccgagggcaacgagacccccgggggcuacugccugacgcgguggaugcugaucgaggccgagcucaagugcuucgggaacaccgccguggcgaagugcaacgagaagcacgacgaggaguucugcgacaugcugcgccuguucgacuucugcaagcaggccauccggcgccucaagacccccgcccagaugagcauccagcugaucaacaaggccgugaacgcccugaucaacgaccagcucaucaugaagaaccaccuccgggacaucaugggcaucccguacugcaacuacuccaaguacugcuaccugaaccacaccgucacggggaagaccagccugccccgcugcugccugguguccaacggcagcuaccugaacgagacccacuucuccgacgacaucgagcagcaggcggacaacaugaucaccgagcuccugcagaaggaguacauggaccggcagggcaagacgccccuggggcucguggaccuguucgucuucagcaccuccuucuaccugaucagcaucuuccugcaccucaucaagaucccgacccaccgccacaucaccggcaagcccugccccaagccccaccggcugaaccacauggggaucugcuccugcggccuguacaagcacccgggggugcccgugaaguggaagcgcugaggacuaguaauaaggaaacuguaugaaugucugugggcaggaagugaagagauccuucuguaaagguuuuuggaauuaugucugcugaauaauaaacuuuuuugaaauaauaaaucugguagaaaaaugagaucucaaaggcucuuuucagagccaccaaaaaaaaaaaaaaaaaaaaaaaaaaaaaaaaaaaaaaaaaaaaaaaaaaaaaaaaaaaaaaaaagaauu

SEQ ID NO: 34062 - RNA, 1778 nt, Artificial Sequence
  mRNA product Design b-4 (hSL-A64-N5) comprising derived and/or modified sequence from LASV(ISTH2010-NIG-2012;Clade II)__AIT17482__GPCmut8 (opt1)
aggagagucccgcagucggcguccagcggcucugcuuguucgugugugugucguugcaggccuuauucaagcuuaccaugggccagaucaucaccuucuuccaggaggugccccacgucaucgaggaggugaugaacaucgugcugaucgcccucagccugcuggccauccucaaggggaucuacaacgucgcgaccugcggccuguucgggcugguguccuuccuccugcugugcggccgcagcugcuccacgaccuacaaggggguguacgagcuccagacccuggagcuggacauggccagccucaacaugugcaugccgcuguccugcacgaagaacaacagccaccacuacaucauggucggcaacgagaccggccuggagcucacccugaccaacacguccaucaucaaccacaaguucugcaaccugagcgacgcccacaagaagaaccucuacgaccacgcccugauguccaucaucagcaccuuccaccuguccauccccaacuucaaccaguacgaggccaugagcugcgacuucaacgggggcaagaucuccgugcaguacaaccucagccacgcguacgccguggacgccgccaaccacugcgggaccaucgcgaacggcguccugcagaccuucaugcggauggccuggggcggguccuacaucgcccuggacagcggcaagggguccugggacugcaucaugacgagcuaccaguaccucaucauccagaacaucaccugggaggaccacugccaguucucccgccccagccccaucggcuaccuggggcugcucagccagcggacccgcgacaucuacaucucccggcgccugcugggcaccuucacguggacccucagcgacuccgagggcaacgagacccccgggggcuacugccugacccgguggaugcugaucgaggccgagcucaagugcuucgggaacacggccguggcgaagugcaacgagaagcacgacgaggaguucugcgacaugcugcgccuguucgacuucugcaagcaggccauccggcgccucaagacccccgcccagaugagcauccagcugaucaacaaggccgugaacgcccugaucaacgaccagcucaucaugaagaaccaccuccgggacaucaugggcauccccuacugcaacuacuccaaguacugcuaccugaaccacaccgucaccgggaagacgagccugccccgcugcugccugguguccaacggcagcuaccugaacgagacccacuucuccgacgacaucgagcagcaggcggacaacaugaucaccgagcuccugcagaaggaguacaucgaccggcagggcaagaccccgcuggggcucguggaccuguucgucuucagcacguccuucuaccugaucagcaucuuccugcaccucgugaagaucccgacccaccgccacguggucggcaagcccugccccaagccccaccggcugaaccacauggggaucugcuccugcggccuguacaagcacccgggggugcccgugaaguggaagcgcugaggacuaguaauaaggaaacuguaugaaugucugugggcaggaagugaagagauccuucuguaaagguuuuuggaauuaugucugcugaauaauaaacuuuuuugaaauaauaaaucugguagaaaaaugagaucucaaaggcucuuuucagagccaccaaaaaaaaaaaaaaaaaaaaaaaaaaaaaaaaaaaaaaaaaaaaaaaaaaaaaaaaaaaaaaaaagaauu

SEQ ID NO: 34063 - RNA, 1778 nt, Artificial Sequence
  mRNA product Design b-4 (hSL-A64-N5) comprising derived and/or modified sequence from LASV(Lassa virus/H.sapiens-wt/NGA/2015/ISTH_0543;Clade II)__AVO03639__GPCmut8 (opt1)
aggagagucccgcagucggcguccagcggcucugcuuguucgugugugugucguugcaggccuuauucaagcuuaccaugggccagaucaucaccuucuuccaggaggugccccacgucaucgaggaggugaugaacaucgugcugaucgcccucagccugcuggccauccucaaggggaucuacaacgucgcgaccugcggccuguucgggcugguguccuuccuccugcugugcggccgcagcugcuccacgaccuacaaggggguguacgagcuccagacccuggagcuggacauggccaaccucaacaugugcaugccgcugagcugcacgaagaacaacucccaccacuacaucauggucggcaacgagaccggccuggagcucacccugaccaacacgagcaucaucaaccacaaguucugcaaccuguccgacgcccacaagaagaaccucuacgaccacgcccugaugagcaucaucuccaccuuccaccugagcauccccaacuucaaccaguacgaggccauguccugcgacuucaacgggggcaagaucagcgugcaguacaaccucucccacaccuacgcgguggacgccgccaaccacugcgggaccaucgccaacggcguccugcagacguucaugcggauggcguggggcgggagcuacaucgcccuggacuccggcaaggggagcugggacugcaucaugaccuccuaccaguaccucgugauccagaacaccaccugggaggaccacugccaguucagccgccccucccccaucggcuaccuggggcugcucagccagcggacgcgcgacaucuacaucagccggcgccugcugggcaccuucaccuggacccucuccgacagcgagggcaacgagacgcccgggggcuacugccugacccgguggaugcugaucgaggccgagcucaagugcuucgggaacaccgccguggccaagugcaacgagaagcacgacgaggaguucugcgacaugcugcgccuguucgacuucugcaagcaggcgauccggcgccucaagacccccgcccagauguccauccagcugaucaacaaggccgucaacgcccugaucaacgaccagcucaucaugaagaaccaccuccgggacaucaugggcauccccuacugcaacuacagcaaguacugcuaccugaaccacacggugaccgggaagaccucccugccccgcugcugccuggugagcaacggcuccuaccugaacgagacccacuucagcgacgacaucgagcagcaggccgacaacaugaucacggagcuccugcagaaggaguacaucgaccggcagggcaagaccccgcuggggcucgucgaccuguucguguucuccaccagcuucuaccugaucuccaucuuccugcaccucgugaagaucccgacccaccgccacaucacgggcaagcccugccccaagccccaccggcugaaccacauggggaucugcagcugcggccuguacaagcacccggggguccccgugaaguggaagcgcugaggacuaguaauaaggaaacuguaugaaugucugugggcaggaagugaagagauccuucuguaaagguuuuuggaauuaugucugcugaauaauaaacuuuuuugaaauaauaaaucugguagaaaaaugagaucucaaaggcucuuuucagagccaccaaaaaaaaaaaaaaaaaaaaaaaaaaaaaaaaaaaaaaaaaaaaaaaaaaaaaaaaaaaaaaaaagaauu

SEQ ID NO: 34064 - RNA, 1778 nt, Artificial Sequence
  mRNA product Design b-4 (hSL-A64-N5) comprising derived and/or modified sequence from LASV(Lassa virus/H.sapiens-wt/NGA/2016/ISTH_0009;Clade II)__AVO03571__GPCmut8 (opt1)
aggagagucccgcagucggcguccagcggcucugcuuguucgugugugugucguugcaggccuuauucaagcuuaccaugggccagaucaucaccuucuuccaggaggugccccacgucaucgaggaggugaugaacaucgugcugaucgcccucagccugcuggccauccucaaggggaucuacaacgucgcgaccugcggccugcuggggcucguguccuuccugcugcucugcggccgcagcugcuccacgaccuacaaggggguguacgagcugcagacccuggagcucgacauggccagccugaacaugugcaugccgcuguccugcacgaagaacaacagccaccacuacaucauggucggcaacgagaccggccucgagcugacccugaccaacacguccaucaucaaccacaaguucugcaaccucagcgacgcccacaagaagaaccuguacgaccacgcccugauguccaucaucagcaccuuccaccucuccauccccaacuucaaccaguacgaggccaugagcugcgacuucaacgggggccggaucuccgugcaguacaaccugagccacuccuacgcgguggacgccgccaaccacugcgggaccaucgccaacggcguccugcagaccuucaugcgcauggcguggggcgggagcuacaucgcccucgacuccggcaaggggagcugggacugcaucaugacguccuaccaguaccugaucauccagaacaccaccugggaggaccacugccaguucagccggcccagccccaucggcuaccuggggcuccugucccagcgcacccgggacaucuacaucagccgccggcugcucggcacguucaccuggacccuguccgacagcgagggcaacgagacccccgggggcuacugccugacgcgcuggaugcucaucgaggccgagcugaagugcuucgggaacaccgccguggccaagugcaacgagaagcacgacgaggaguucugcgacaugcugcggcuguucgacuucugcaagcaggcgauccgccggcugaagacccccgcccagauguccauccagcugaucaacaaggccgugaacgcccucaucaacgaccagcugaucaugaagaaccaccuccgcgacaucaugggcaucccguacugcaacuacagcaaguacugcuaccucaaccacaccgucacggggaagaccucccugccccggugcugccuggugagcaacggcuccuaccucaacgagacccacuucagcgacgacaucgagcagcaggccgacaacaugaucaccgagcugcugcagaaggaguacaucgaccgccagggcaagacgccccucgggcugguggaccuguucgucuucuccaccagcuucuaccugaucuccaucuuccuccaccuggugaagaucccgacccaccggcacaucaccggcaagcccugccccaagccccaccgccugaaccacauggggaucugcagcugcggccucuacaaccacccgggggugcccgucaaguggaagcggugaggacuaguaauaaggaaacuguaugaaugucugugggcaggaagugaagagauccuucuguaaagguuuuuggaauuaugucugcugaauaauaaacuuuuuugaaauaauaaaucugguagaaaaaugagaucucaaaggcucuuuucagagccaccaaaaaaaaaaaaaaaaaaaaaaaaaaaaaaaaaaaaaaaaaaaaaaaaaaaaaaaaaaaaaaaaagaauu

SEQ ID NO: 34065 - RNA, 1778 nt, Artificial Sequence
  mRNA product Design b-4 (hSL-A64-N5) comprising derived and/or modified sequence from LASV(Lassa virus/H.sapiens-wt/NGA/2016/ISTH_0017;Clade II)__AVO03567__GPCmut8 (opt1)
aggagagucccgcagucggcguccagcggcucugcuuguucgugugugugucguugcaggccuuauucaagcuuaccaugggccagaucaucaccuucuuccaggaggugccccacgucaucgaggaggugaugaacaucgugcugaucgcccucagccugcuggccauccucaaggggaucuacaacgucgcgaccugcggccuguucgggcugguguccuuccuccugcugugcggccgcagcugcuccacgaccuacaaggggguguacgagcuccagacccuggagcuggacauggccagccucaacaugugcaugccgcuguccugcacgaagaacaacagccaccacuacaucauggucggcaacgagaccggccuggagcucacccugaccaacacguccaucaucaaccacaaguucugcaaccugagcgacgcccacaagaagaaccucuacgaccacgcccugauguccaucaucagcaccuuccaccuguccauccccaacuucaaccaguacgaggccaugagcugcgacuucaacgggggcaagaucuccgugcaguacaaccucagccacaccuacgcgaucgacgccgccaaccacugcgggaccaucgccaacggcgugcugcagacguucaugcggauggcguggggcggguccuacaucgcccuggacagcggcaagggguccugggacugcaucaugaccagcuaccaguaccucaucauccagaacaccaccugggaggaccacugccaguucucccgccccagccccaucggcuaccuggggcugcucagccagcggacgcgcgacaucuacaucucccggcgccugcugggcaccuucaccuggacccucagcgacuccgagggcaacgagacgcccgggggcuacugccugacccgguggaugcugaucgaggccgagcucaagugcuucgggaacaccgccgucgccaagugcaacgagaagcacgacgaggaguucugcgacaugcugcgccuguucgacuucugcaagcaggcgauccggcgccucaagacccccgcccagaugagcauccagcugaucaacaaggccgugaacgcccugaucaacgaccagcucaucaugaagaaccaccuccgggacaucaugggcauccccuacugcaacuacuccaaguacugcuaccugaaccacacggugaccgggaagaccagccugccccgcugcugccuggucuccaacggcagcuaccugaacgagacccacuucuccgacgacaucgagcagcaggccgacaacaugaucacggagcuccugcagaaggaguacauggaccggcagggcaagaccccgcuggggcucguggaccuguucguguucagcaccuccuucuaccugaucagcaucuuccugcaccucguccgcaucccgacccaccggcacgugaucggcaagcccugccccaagccccaccgccugaaccacauggggaucugcuccugcggccuguacaagcacccgggggugcccgucaaguggaagcggugaggacuaguaauaaggaaacuguaugaaugucugugggcaggaagugaagagauccuucuguaaagguuuuuggaauuaugucugcugaauaauaaacuuuuuugaaauaauaaaucugguagaaaaaugagaucucaaaggcucuuuucagagccaccaaaaaaaaaaaaaaaaaaaaaaaaaaaaaaaaaaaaaaaaaaaaaaaaaaaaaaaaaaaaaaaaagaauu

SEQ ID NO: 34066 - RNA, 1778 nt, Artificial Sequence
  mRNA product Design b-4 (hSL-A64-N5) comprising derived and/or modified sequence from LASV(Lassa virus/H.sapiens-wt/NGA/2018/ISTH_0959;Clade II)__AVV65099__GPCmut8 (opt1)
aggagagucccgcagucggcguccagcggcucugcuuguucgugugugugucguugcaggccuuauucaagcuuaccaugggccagaucaucaccuucuuccaggaggugccccacgucaucgaggaggugaugaacaucgugcugaucgcccucagccugcuggccauccucaaggggaucuacaacgucgugaccugcggccuguucgggcugguguccuuccuccugcugugcggccgcagcugcuccacgaccuacaagggggucuacgagcuccagacccuggagcuggacauggcgagccucaacaugugcaugccgcuguccugcacgaagaacaacagccaccacuacaucauggugggcaacgagaccggccuggagcucacccugaccaacacguccaucaucaaccacaaguucugcaaccugagcgacgcccacaagaagaaccucuacgaccacgcccugauguccaucaucagcaccuuccaccuguccauccccaacuucaaccaguacgaggccaugagcugcgacuucaacgggggcaagaucuccgugcaguacaaccucagccacgccuacgcgaucgacgccgccaaccacugcgggaccaucgccaacggcguccugcagaccuucaugcggauggcguggggcggguccuacaucgcccuggacagcggcaagggguccugggacugcaucaugacgagcuaccaguaccucaucauccagaacaccaccugggaggaccacugccaguucucccgccccagccccaucggcuaccuggggcugcucagccagcggacccgcgacaucuacaucucccggcgccugcugggcacguucaccuggacccucagcgacuccgagggcaacgagacccccgggggcuacugccugacgcgguggaugcugaucgaggccgagcucaagugcuucgggaacaccgccguggccaagugcaacgagaagcacgacgaggaguucugcgacaugcugcgccuguucgacuucugcaagcaggcgauccggcgccucaagacccccgcccagaugagcauccagcugaucaacaaggccgugaacgcccugaucaacgaccagcucaucaugaagaaccaccuccgggacaucaugggcaucccguacugcaacuacuccaaguacugcuaccugaaccacaccgucacggggaagaccagccugccccgcugcugccugguguccaacggcagcuaccugaacgagacccacuucuccgacgacaucgagcagcaggccgacaacaugaucaccgagcuccugcagaaggaguacaucgaccggcagggcaagacgccccuggggcucguggaccuguucgucuucagcaccuccuucuaccugaucagcaucuuccugcaccucgugaagaucccgacccaccgccacgugaucggcaagcccugccccaagccccaccggcugaaccacauggggaucugcuccugcggccuguacaagcacccggggguccccgugaaguggaagcgcugaggacuaguaauaaggaaacuguaugaaugucugugggcaggaagugaagagauccuucuguaaagguuuuuggaauuaugucugcugaauaauaaacuuuuuugaaauaauaaaucugguagaaaaaugagaucucaaaggcucuuuucagagccaccaaaaaaaaaaaaaaaaaaaaaaaaaaaaaaaaaaaaaaaaaaaaaaaaaaaaaaaaaaaaaaaaagaauu

SEQ ID NO: 34067 - RNA, 1778 nt, Artificial Sequence
  mRNA product Design b-4 (hSL-A64-N5) comprising derived and/or modified sequence from LASV(LASV003-NIG-2008;Clade II)__AIT17580__GPCmut8 (opt1)
aggagagucccgcagucggcguccagcggcucugcuuguucgugugugugucguugcaggccuuauucaagcuuaccaugggccagaucaucaccuucuuccaggaggugccccacgucaucgaggaggugaugaacaucgugcugaucgcccucagccugcuggccauccucaaggggaucuacaacgucgcgaccugcggccuguucgggcugguguccuuccuccugcugugcggccgcagcugcuccacgaccuacaaggggguguacgagcuccagacccuggagcuggacauggccagccucaacaugugcaugccgcuguccugcacgaagaacaacagccaccacuacaucauggucggcaacgagaccggccuggagcucacccugaccaacacguccaucaucaaccacaaguucugcaaccugagcgacgcccacaagaagaaccucuacgaccacgcccugauguccaucaucagcaccuuccaccuguccauccccaacuucaaccaguacgaggccaugagcugcgacuucaacgggggcaagaucuccgugcaguacaaccucagccacaccuacgcgguggacgccgccaaccacugcgggaccaucgccaacggcguccugcagacguucaugcggauggcguggggcggguccuacaucgcccuggacagcggcaagggguccugggacugcaucaugaccagcuaccaguaccucaucauccagaacaccaccugggaggaccacugccaguucucccgccccagccccaucggcuaccuggggcugcucagccagcggacgcgcgacaucuacaucucccggcgccugcugggcaccuucaccuggacccucagcgacuccgagagcaacgagacgccgggcggguacugccugacccgguggaugcugaucgaggccgagcucaagugcuucggcaacaccgccguggccaagugcaacgagaagcacgacgaggaguucugcgacaugcugcgccuguucgacuucugcaagcaggcgauccggcgccucaaggcccccgcccagauguccauccagcugaucaacaaggccgugaacgcccugaucaacgaccagcucaucaugaagaaccaccuccgggacaucauggggauccccuacugcaacuacagcaaguacugcuaccugaaccacaccgucacgggccgcaccucccugccccggugcugccuggugagcaacggguccuaccugaacgagacccacuucagcgacgacaucgagcagcaggcggacaacaugaucaccgagcuccugcagaaggaguacauggaccgccagggcaagacgccccugggccucguggaccuguucgucuucuccaccagcuucuaccugaucuccaucuuccugcaccucgugaagaucccgacccaccggcacgugaucgggaagcccugccccaagccccaccgccugaaccacaugggcaucugcagcugcgggcuguacaagcacccgggcguccccgugaaguggaagcggugaggacuaguaauaaggaaacuguaugaaugucugugggcaggaagugaagagauccuucuguaaagguuuuuggaauuaugucugcugaauaauaaacuuuuuugaaauaauaaaucugguagaaaaaugagaucucaaaggcucuuuucagagccaccaaaaaaaaaaaaaaaaaaaaaaaaaaaaaaaaaaaaaaaaaaaaaaaaaaaaaaaaaaaaaaaaagaauu

SEQ ID NO: 34068 - RNA, 1778 nt, Artificial Sequence
  mRNA product Design b-4 (hSL-A64-N5) comprising derived and/or modified sequence from LASV(LASV035-NIG-2009;Clade II)__AIT17588__GPCmut8 (opt1)
aggagagucccgcagucggcguccagcggcucugcuuguucgugugugugucguugcaggccuuauucaagcuuaccaugggccagaucaucaccuucuuccaggaggugccccacgucaucgaggaggugaugaacaucgugcugaucgcccucagccugcuggccauccucaaggggaucuacaacgucgcgaccugcggccuguucgggcugguguccuuccuccugcugugcggccgcagcugcuccacgaccuacaaggggguguacgagcuccagacccuggagcuggacauggccagccucaacaugugcaugccgcuguccugcacgaagaacaacagccaccacuacaucauggucggcaacgagaccggccuggagcucacccugaccaacacguccaucaucaaccacaaguucugcaaccugagcgacgcccacaagaagaaccucuacgaccacgcccugauguccaucaucagcaccuuccaccuguccauccccaacuucaaccaguacgaggccaugagcugcgacuucaacgggggcaagaucuccgugcaguacaaccucagccacgcguacgccguggacgccgccaaccacugcgggaccaucgcgaacggcguccugcagaccuucaugcggauggccuggggcggguccuacaucgcccuggacagcggcaagggguccugggacugcaucaugacgagcuaccaguaccucaucauccagaacaccaccugggaggaccacugccaguucucccgccccagccccaucggcuaccuggggcugcucagccagcggacccgcgacaucuacaucucccggcgccugcugggcacguucaccuggacccucagcgacuccgagggcaacgagacccccgggggcuacugccugacgcgguggaugcugaucgaggccgagcucaagugcuucgggaacaccgccguggcgaagugcaacgagaagcacgacgaggaguucugcgacaugcugcgccuguucgacuucugcaagcaggccauccggcgccucaaggcccccgcccagaugagcauccagcugaucaacaaggccgugaacgcgcugaucaacgaccagcucaucaugaagaaccaccuccgggacaucaugggcauccccuacugcaacuacuccaaguacugcuaccugaaccacaccgucaccgggaagacgagccugccccgcugcugccugguguccaacggcagcuaccugaacgagacccacuucuccgacgacaucgagcagcaggccgacaacaugaucaccgagcuccugcagaaggaguacaucgaccggcagggcaagaccccgcuggggcucguggaccuguucgucuucagcacguccuucuaccugaucagcaucuuccugcaccucgugaagaucccgacccaccgccacgugaucggcaagcccugccccaagccccaccggcugaaccacauggggaucugcuccugcggccuguacaagcacccggggguccccgugaaguggaagcgcugaggacuaguaauaaggaaacuguaugaaugucugugggcaggaagugaagagauccuucuguaaagguuuuuggaauuaugucugcugaauaauaaacuuuuuugaaauaauaaaucugguagaaaaaugagaucucaaaggcucuuuucagagccaccaaaaaaaaaaaaaaaaaaaaaaaaaaaaaaaaaaaaaaaaaaaaaaaaaaaaaaaaaaaaaaaaagaauu

SEQ ID NO: 34069 - RNA, 1778 nt, Artificial Sequence
  mRNA product Design b-4 (hSL-A64-N5) comprising derived and/or modified sequence from LASV(LASV1000-NIG-2009;Clade II)__AIT17782__GPCmut8 (opt1)
aggagagucccgcagucggcguccagcggcucugcuuguucgugugugugucguugcaggccuuauucaagcuuaccaugggccagaucaucaccuucuuccaggaggugccccacgucaucgaggaggugaugaacaucgugcugaucgcccucagccugcuggccauccucaaggggaucuacaacgucgcgaccugcggccuguucgggcugguguccuuccuccugcugugcggccgcagcugcuccacgaccuacaaggggguguacgagcuccagacccuggagcuggacauggccagccucaacaugugcaugccgcuguccugcacgaagaacaacagccaccacuacaucauggucggcaacgagaccggccuggagcucacccugaccaacacguccaucaucaaccacaaguucugcaaccugagcgacgcccacaagaagaaccucuacgaccacgcccugauguccaucaucagcaccuuccaccuguccauccccaacuucaaccaguacgaggccaugagcugcgacuucaacgggggcaagaucuccgugcaguacaaccucagccacaccuacgcgguggacgccgccaaccacugcgggaccaucgccaacggcguccugcagacguucaugcggauggcguggggcggguccuacaucgcccuggacagcggcaagggguccugggacugcaucaugaccagcuaccaguaccucaucauccagaacaccaccugggaggaccacugccaguucucccgccccagccccaucggcuaccuggggcugcucagccagcggacgcgcgacaucuacaucucccggcgccugcugggcaccuucaccuggacccucagcgacuccgagggcaacgagacgcccgggggcuacugccugacccgguggaugcugaucgaggccgagcucaagugcuucgggaacaccgccguggccaagugcaacgagaagcacgacgaggaguucugcgacaugcugcgccuguucgacuucugcaagcaggcgaucaagcggcucaagacccccgcccagaugagcauccagcugaucaacaaggccgugaacgcccugaucaacgaccagcucaucaugaagaaccaccuccgcgacaucaugggcauccccuacugcaacuacuccaaguacugcuaccugaaccacacggucaccgggaagaccagccugccccggugcugccugguguccaacggcagcuaccugaacgagacccacuucuccgacgacaucgagcagcaggccgacaacaugaucacggagcuccugcagaaggaguacaucgaccgccagggcaagaccccgcuggggcucguggaccuguucgucuucagcaccuccuucuaccugaucagcaucuuccugcaccucgugaagaucccgacccaccggcacguggucggcaagcccugccccaagccccaccgccugaaccacauggggaucugcuccugcggccuguacaagcacccgggggugcccgugaaguggaagcggugaggacuaguaauaaggaaacuguaugaaugucugugggcaggaagugaagagauccuucuguaaagguuuuuggaauuaugucugcugaauaauaaacuuuuuugaaauaauaaaucugguagaaaaaugagaucucaaaggcucuuuucagagccaccaaaaaaaaaaaaaaaaaaaaaaaaaaaaaaaaaaaaaaaaaaaaaaaaaaaaaaaaaaaaaaaaagaauu

SEQ ID NO: 34070 - RNA, 1778 nt, Artificial Sequence
  mRNA product Design b-4 (hSL-A64-N5) comprising derived and/or modified sequence from LASV(LASV221-NIG-2010;Clade II)__AIT17624__GPCmut8 (opt1)
aggagagucccgcagucggcguccagcggcucugcuuguucgugugugugucguugcaggccuuauucaagcuuaccaugggccagaucaucaccuucuuccaggaggugccccacgucaucgaggaggugaugaacaucgugcugaucgcccucagccugcuggccauccucaaggggaucuacaacgucgcgaccugcggccuguucgggcugguguccuuccuccugcugugcggccgcagcugcuccacgaccuacaaggggguguacgagcuccagacccuggagcuggacauggccagccucaacaugugcaugccgcuguccugcacgaagaacaacagccaccacuacaucauggucggcaacgagaccggccuggagcucacccugaccaacacguccaucaucaaccacaaguucugcaaccugagcgacgcccacaagaagaaccucuacgaccacgcccugauguccaucaucagcaccuuccaccuguccauccccaacuucaaccaguacgaggccaugagcugcgacuucaacgggggcaagaucuccgugcaguacaaccucagccacaccuacgcgaucgacgccgccaaccacugcgggaccaucgccaacggcgugcugcagacguucaugcggauggcguggggcggguccuacaucgcccuggacagcggcaagggguccugggacugcaucaugaccagcuaccaguaccucaucauccagaacaccaccugggaggaccacugccaguucucccgccccagccccaucggcuaccuggggcugcucagccagcggacgcgcgacaucuacaucucccggcgccugcugggcaccuucaccuggacccucagcgacuccgagggcaacgagacgcccgggggcuacugccugacccgguggaugcugaucgaggccgagcucaagugcuucgggaacaccgccgucgccaagugcaacgagaagcacgacgaggaguucugcgacaugcugcgccuguucgacuucugcaagcaggcgauccggcgccucaagacccccgcccagaugagcauccagcugaucaacaaggccgugaacgcccugaucaacgaccagcucaucaugaagaaccaccuccgggacaucaugggcauccccuacugcaacuacuccaaguacugcuaccugaaccacacggugaccgggaagaccagccugccccgcugcugccuggucuccaacggcagcuaccugaacgagacccacuucuccgacgacaucgagcagcaggccgacaacaugaucacggagaugcuccagaaggaguacauggaccggcagggcaagaccccgcuggggcugguggaccucuucguguucagcaccuccuucuaccugaucagcaucuuccugcaccuggucaagaucccgacccaccgccacgugaucggcaagcccugccccaagccccaccggcucaaccacauggggaucugcuccugcggccuguacaagcacccgggggugcccgucaaguggaagcgcugaggacuaguaauaaggaaacuguaugaaugucugugggcaggaagugaagagauccuucuguaaagguuuuuggaauuaugucugcugaauaauaaacuuuuuugaaauaauaaaucugguagaaaaaugagaucucaaaggcucuuuucagagccaccaaaaaaaaaaaaaaaaaaaaaaaaaaaaaaaaaaaaaaaaaaaaaaaaaaaaaaaaaaaaaaaaagaauu

SEQ ID NO: 34071 - RNA, 1778 nt, Artificial Sequence
  mRNA product Design b-4 (hSL-A64-N5) comprising derived and/or modified sequence from LASV(LASV237-NIG-2010;Clade II)__AIT17638__GPCmut8 (opt1)
aggagagucccgcagucggcguccagcggcucugcuuguucgugugugugucguugcaggccuuauucaagcuuaccaugggccagaucaucaccuucuuccaggaggugccccacgucaucgaggaggugaugaacaucgugcugaucgcccucagccugcuggccauccucaaggggaucuacaacgucgcgaccugcggccuguucgggcugguguccuuccuccugcugugcggccgcagcugcuccacgaccuacaaggggguguacgagcuccagacccuggagcuggacauggccagccucaacaugugcaugccgcuguccugcacgaagaacaacagccaccacuacaucauggucggcaacgagaccggccuggagcucacccugaccaacacguccaucaucaaccacaaguucugcaaccugagcgacgcccacaagaaggaccucuacgaccacgcccugauguccaucaucagcaccuuccaccuguccauccccaacuucaaccaguacgaggccaugagcugcgacuucaacgggggcaagaucuccgugcaguacaaccucagccacaccuacgcgguggacgccgccaaccacugcgggaccaucgccaacggcguccugcagacguucaugcggauggcguggggcggguccuacaucgcccuggacagcggcaagggguccugggacugcaucaugaccagcuaccaguaccucaucauccagaacaccaccugggaggaccacugccaguucucccgccccagccccaucggcuaccuggggcugcucagccagcggacgcgcgacaucuacaucucccggcgccugcugggcaccuucaccuggacccucagcgacuccgagggcaacgagacgcccgggggcuacugccugacccgguggaugcugaucgaggccgagcucaagugcuucgggaacaccgccguggccaagugcaacgagaagcacgacgaggaguucugcgacaugcugcgccuguucgacuucugcaagcaggcgauccggcgccucaagacccccgcccagaugagcauccagcugaucaacaaggccgugaacgcccugaucaacgaccagcucaucaugaagaaccaccuccgggacaucaugggcauccccuacugcaacuacuccaaguacugcuaccugaaccacacggucaccgggaagaccagccugccccgcugcugccugguguccaacggcagcuaccugaacgagacccacuucuccgacgacaucgagcagcaggccgacaacaugaucacggagcuccugcagaaggaguacauggaccggcagggcaagaccccgcuggggcucguggaccuguucgucuucagcaccuccuucuaccugaucagcaucuuccugcaccucaucaagaucccgacccaccgccacaucacgggcaagcccugccccaagccccaccggcugaaccacauggggaucugcuccugcggccuguacaagcacccgggggugcccgugaaguggaagcgcugaggacuaguaauaaggaaacuguaugaaugucugugggcaggaagugaagagauccuucuguaaagguuuuuggaauuaugucugcugaauaauaaacuuuuuugaaauaauaaaucugguagaaaaaugagaucucaaaggcucuuuucagagccaccaaaaaaaaaaaaaaaaaaaaaaaaaaaaaaaaaaaaaaaaaaaaaaaaaaaaaaaaaaaaaaaaagaauu

SEQ ID NO: 34072 - RNA, 1778 nt, Artificial Sequence
  mRNA product Design b-4 (hSL-A64-N5) comprising derived and/or modified sequence from LASV(LASV253-NIG-2011;Clade II)__AIT17670__GPCmut8 (opt1)
aggagagucccgcagucggcguccagcggcucugcuuguucgugugugugucguugcaggccuuauucaagcuuaccaugggccagaucaucaccuucuuccaggaggugccccacgucaucgaggaggugaugaacaucgugcugaucgcccucagccugcuggccauccucaaggggaucuacaacgucgcgaccugcggccuguucgggcugguguccuuccuccugcugugcggccgcagcugcuccacgaccuacaaggggguguacgagcuccagacccuggagcuggacauggccagccucaacaugugcaugccgcuguccugcacgaagaacaacagccaccacuacaucauggucggcaacgagaccggccuggagcucacccugaccaacacguccaucaucaaccacaaguucugcaaccugagcgacgcccacaagaagaaccucuacgaccacgcccugauguccaucaucagcaccuuccaccuguccauccccaacuucaaccaguacgaggccaugagcugcgacuucaacgggggcaagaucuccgugcaguacaaccucagccacaccuacgcgguggacgccgccaaccacugcgggaccaucgccaacggcguccugcagacguucaugcggauggcguggggcggguccuacaucgcccuggacagcggcaagggguccugggacugcaucaugaccagcuaccaguaccucaucauccagaacaccaccugggaggaccacugccaguucucccgccccagccccaucggcuaccuggggcugcucagccagcggacgcgcgacaucuacaucucccggcgccugcugggcaccuucaccuggacccucagcgacuccgagggcaacgagacgcccgggggcuacugccugacccgguggaugcugaucgaggccgagcucaagugcuucgggaacaccgccguggccaagugcaacgagaagcacgacgaggaguucugcgacaugcugcgccuguucgacuucugcaagcaggcgauccggcgccucaaggcccccgcccagaugagcauccagcugaucaacaaggccgugaacgcccugaucaacgaccagcucaucaugaagaaccaccuccgggacaucaugggcaucccguacugcaacuacuccaaguacugcuaccugaaccacaccgucacggggcgcaccagccugccccggugcugccugguguccaacggcagcuaccugaacgagacccacuucuccgacgacaucgagcagcaggcggacaacaugaucaccgagcuccugcagaaggaguacaucgaccgccagggcaagacgccccuggggcucguggaccuguucgucuucagcaccuccuucuaccugaucagcaucuuccugcaccucgugaagaucccgacccaccggcacaucaucggcaagcccugccccaagccccaccgccugaaccacauggggaucugcuccugcggccuguacaagcacccgggggugcccgucaaguggaagcggugaggacuaguaauaaggaaacuguaugaaugucugugggcaggaagugaagagauccuucuguaaagguuuuuggaauuaugucugcugaauaauaaacuuuuuugaaauaauaaaucugguagaaaaaugagaucucaaaggcucuuuucagagccaccaaaaaaaaaaaaaaaaaaaaaaaaaaaaaaaaaaaaaaaaaaaaaaaaaaaaaaaaaaaaaaaaagaauu

SEQ ID NO: 34073 - RNA, 1778 nt, Artificial Sequence
  mRNA product Design b-4 (hSL-A64-N5) comprising derived and/or modified sequence from LASV(LASV254-NIG-2011;Clade II)__AIT17674__GPCmut8 (opt1)
aggagagucccgcagucggcguccagcggcucugcuuguucgugugugugucguugcaggccuuauucaagcuuaccaugggccagaucaucaccuucuuccaggaggugccccacgucaucgaggaggugaugaacaucgugcugaucgcccucagccugcuggccauccucaaggggaucuacaacgucgcgaccugcggccuguucgggcugguguccuuccuccugcugugcggccgcagcugcuccacgaccuacaaggggguguacgagcuccagacccuggagcuggacaugaccaaccucaacaugugcaugccgcugagcugcaccaagaacaacucccaccacuacaucauggucggcaacgagaccggccuggagcucacccugacgaacaccagcaucaucaaccacaaguucugcaaccuguccgacgcccacaagaagaaccucuacaaccacgcccugaugagcaucaucuccaccuuccaccugagcauccccaacuucaaccaguacgaggccauguccugcgacuucaacgggggcaagaucagcgugcaguacaaccucucccacagcuacgccguggacgcggccaaccacugcgggaccaucgccaacggcguccugcagacguucaugcggauggccuggggcggguccuacaucgcgcuggacagcggcaaggggaacugggacugcaucaugaccuccuaccaguaccucaucauccagaacaccaccugggaggaccacugccaguucagccgccccucccccaucggcuaccuggggcugcucagccagcggacgcgcgacaucuacaucagccggcgccugcugggcaccuucaccuggacccucuccgacagcgagggcaacgagacgcccgggggcuacugccugacccgguggaugcugaucgaggccgagcucaagugcuucgggaacaccgccguggccaagugcaacgagaagcacgacgaggaguucugcgacaugcugcgccuguucgacuucugcaagcaggccauccggcgccucaagacccccgcgcaggccaacauccagcugaucaacaaggccgugaacgcccugaucaacgaccagcucaucaugaagaaccaccuccgggacaucaugggcauccccuacugcaacuacuccaaguacugcuaccugaaccacacggucaccgggaagaccagccugccccgcugcugccugguguccaacggcagcuaccugaacgagacccacuucuccgacgacaucgagcagcaggccgacaacaugaucacggagcuccugcagaaggaguacauggaccggcagggcaagaccccgcuggggcucguggaccuguucgucuucagcaccuccuucuaccugaucagcaucuuccugcaccucgugaagaucccgacccaccgccacgugaucggcaagcccugccccaagccccaccggcugaaccacauggggaucugcuccugcggccuguacaagcacccggggguccccgugaaguggaagcgcugaggacuaguaauaaggaaacuguaugaaugucugugggcaggaagugaagagauccuucuguaaagguuuuuggaauuaugucugcugaauaauaaacuuuuuugaaauaauaaaucugguagaaaaaugagaucucaaaggcucuuuucagagccaccaaaaaaaaaaaaaaaaaaaaaaaaaaaaaaaaaaaaaaaaaaaaaaaaaaaaaaaaaaaaaaaaagaauu

SEQ ID NO: 34074 - RNA, 1778 nt, Artificial Sequence
  mRNA product Design b-4 (hSL-A64-N5) comprising derived and/or modified sequence from LASV(Nig08-A19;Clade III)__ADU56618__GPCmut8 (opt1)
aggagagucccgcagucggcguccagcggcucugcuuguucgugugugugucguugcaggccuuauucaagcuuaccaugggccagaucgugaccuucuuccaggaggucccccacgugaucgaggaggugaugaacaucguccugaucgcccucagcauccuggccauccugaaggggcucuacaacaucgcgaccugcggccugaucgggcuggugacguuccuccugcuguccggccgcagcugcuccaugaccuacaaggggguguacgagcuccagacccuggagcugaacaugaacacccucaacaugugcaugccgcugagcugcaccaagaacaacucccaccacuacaucauggucggcaacgagaccggccuggagcucacccugacgaacaccagccugcuccaccacaaguucugcaaccuguccgacgcccacaagaagaaccuguacgaccacacccucaugagcaucaucuccaccuuccaccugagcauccccaacuucaaccaguacgaggccauguccugcgacuucaacgggggcaagaucacggugcaguacaaccugagccacuccuacgccaucgacgccgcgaaccacugcgggaccguggccaacggcguccuccagaccuucaugcggauggccuggggcgggagcuacaucgcccuggacuccggccgcgggaagugggacugcaucaugaccagcuaccaguaccugaucauccagaacacgaccugggaggaccacugccaguucucccggcccagccccaucggcuaccucgggcugcugucccagcgcacccgggacaucuacaucagccgccggcuccugggcaccuucacguggacccugagcgacuccgagggcaacgagacccccgggggcuacugccucacccgcuggaugcugaucgaggcggagcugaagugcuucgggaacacggccguggccaagugcaacgagaagcacgacgaggaguucugcgacaugcuccggcuguucgacuucugcaagcaggccauccgccggcugaaggcccccgcgcagaugagcauccagcucaucaacaaggccgugaacgcccugaucaacgaccagcugaucaugaagaaccaccuccgcgacaucaugggcauccccuacugcaacuacuccaaguacugcuaccugaaccacaccagcaccgggcggaccucccugccccgcugcugccucgucagcaacggcuccuaccugaacgagacgcacuucagcgacgacaucgagcagcaggccgacaacaugaucaccgagaugcugcagaaggaguaccucgaccggcagggcaagaccccgcuggggcugguggaccuguucguguucuccaccagcuucuaccucaucuccaucuuccugcaccuggucaagaucccgacgcaccgccacaucgugggcaagcccugccccaagccccaccggcucaaccacauggggaucugcagcugcggccuguacaagcagccgggggugcccguccgcuggaagcggugaggacuaguaauaaggaaacuguaugaaugucugugggcaggaagugaagagauccuucuguaaagguuuuuggaauuaugucugcugaauaauaaacuuuuuugaaauaauaaaucugguagaaaaaugagaucucaaaggcucuuuucagagccaccaaaaaaaaaaaaaaaaaaaaaaaaaaaaaaaaaaaaaaaaaaaaaaaaaaaaaaaaaaaaaaaaagaauu

SEQ ID NO: 34075 - RNA, 1781 nt, Artificial Sequence
  mRNA product Design b-4 (hSL-A64-N5) comprising derived and/or modified sequence from LASV(G1180-SLE-2010;Clade IV)__AIT17168__GPCmut8 (opt1)
aggagagucccgcagucggcguccagcggcucugcuuguucgugugugugucguugcaggccuuauucaagcuuaccaugggccagaucgugaccuucuuccaggaggucccccacgugaucgaggaggugaugaacaucguccugaucgcccucagcauccuggccgugcugaaggggcucuacaacuucgcgaccugcggccugguggggcugcucaccuuccugcugcucugcggccgcuccugcaccgccagccgguacaagggggucuacgagcugcagacccuggagcucaacauggagacccugaacaugugcaugccgcuguccugcaccaagaacaacagccaccacuacaucauggugggcaacgagaccggccucgagcugacccugacgaacaccuccaucaucaaccacaaguucugcaaccucagcgacgcccacaagaagaaccuguacgaccacgcccugauguccaucaucagcaccuuccaccucuccauccccaacuucaaccaguacgaggccaugagcugcgacuucaacgggggcaagaucuccgugcaguacaaccugagccacuccuacgcgggggacgccgccaaccacugcggcaccgucgccaacggggugcugcagacguucaugcgcauggcguggggcggcagcuacaucgcccucgacuccgggcacggcagcugggacugcaucaugaccuccuaccaguaccugaucauccagaacaccaccugggaggaccacugccaguucagccggcccucccccaucggguaccugggccuccugagccagcgcacgcgggacaucuacaucagccgccggcugcucggcaccuucaccuggacccuguccgacagcgaggggaaggacacgccgggcggguacugccugacccgcuggaugcucaucgaggccgagcugaagugcuucggcaacaccgccguggccaagugcaacgagaagcacgacgaggaguucugcgacaugcugcggcuguucgacuucugcaagcaggcgauccagcgccugaaggcccccgcccagauguccauccagcugaucaacaaggccgucaacgcccucaucaacgaccagcugaucaugaagaaccaccuccgggacaucauggggauccccuacugcaacuacagcaaguacugcuaccucaaccacaccacgaccggcaagaccucccugcccaagugcugccuggugagcaacggcuccuaccucaacgagacccacuucagcgacgacaucgagcagcaggcggacaacaugaucacggagaugcugcagaaggaguacauggagcgccaggggaagacgccccugggccucguggaccuguucgucuucuccaccagcuucuaccugaucuccaucuuccugcaccucgugaagaucccgacccaccggcacaucgugggcaagagcugccccaagccccaccgccugaaccacauggggaucugcuccugcgggcuguacaagcagcccggcgucccggugaaguggaagcggugaggacuaguaauaaggaaacuguaugaaugucugugggcaggaagugaagagauccuucuguaaagguuuuuggaauuaugucugcugaauaauaaacuuuuuugaaauaauaaaucugguagaaaaaugagaucucaaaggcucuuuucagagccaccaaaaaaaaaaaaaaaaaaaaaaaaaaaaaaaaaaaaaaaaaaaaaaaaaaaaaaaaaaaaaaaaagaauu

SEQ ID NO: 34076 - RNA, 1781 nt, Artificial Sequence
  mRNA product Design b-4 (hSL-A64-N5) comprising derived and/or modified sequence from LASV(G1442-SLE-2011;Clade IV)__AIT17180__GPCmut8 (opt1)
aggagagucccgcagucggcguccagcggcucugcuuguucgugugugugucguugcaggccuuauucaagcuuaccaugggccagaucgugaccuucuuccaggaggucccccacgugaucgaggaggugaugaacaucguccugaucgcccucagcauccuggccgugcugaaggggcucuacaacguggcgaccugcggccugaucgggcuggucacguuccuccugcugugcggccgcuccugcaccaccacccucuacaaggggguguacgagcugcagacgcuggagcucaacauggagacccugaacaugugcaugccgcugagcugcaccaagaacaacucccaccacuacauccgggugggcaacgagacgggccucgagcugacccugaccaacaccagcaucaucaaccacaaguucugcaaccucuccgacgcccacaagaagaaccuguacgaccacgcccugaugagcaucaucuccacguuccaccucagcauccccaacuucaaccaguacgaggccauguccugcgacuucaacgggggcaagaucagcguccaguacaaccugucccacagcuacgccggggacgcggccaaccacugcggcaccguggccaacggggugcugcagaccuucaugcgcauggccuggggcggcuccuacaucgcgcucgacagcgggcggggcaacugggacugcaucaugaccuccuaccaguaccugaucauccagaacacgaccugggacgaccacugccaguucagccgccccucccccaucggguaccugggccuccugagccagcggacccgcgacgucuacaucucccggcgccugcucggcaccuucacguggacccugagcgacagcgaggggaaggacaccccgggcggguacugccugacccgguggaugcucaucgaggccgagcugaagugcuucggcaacacggccguggccaagugcaacgagaagcacgacgaggaguucugcgacaugcugcgccucuucgacuucugcaagcaggccauccagcggcugaaggcgcccgcccagauguccauccagcugaucaacaaggccgugaacgcccucaucaacgaccagcugaucaugaagaaccaccuccgcgacaucauggggauccccuacugcaacuacagcaaguacugcuaccugaacaacaccgccaccggcaagaccucccugcccaagugcugccugaucagcaacggcuccuaccucaacgagacgcacuucagcgacgacaucgagcaggaggcggacaacaugaucaccgagaugcugcagaaggaguacauggagcggcaggggaagacgccccugggccucgucgaccuguucguguucuccaccagcuucuaccugaucuccaucuuccugcaccucgugaagaucccgacccaccgccacaucgucggcaagagcugccccaagccccaccggcugaaccacauggggaucugcuccugcgggcuguacaagcagcccggcgugccggugcgcuggaagcggugaggacuaguaauaaggaaacuguaugaaugucugugggcaggaagugaagagauccuucuguaaagguuuuuggaauuaugucugcugaauaauaaacuuuuuugaaauaauaaaucugguagaaaaaugagaucucaaaggcucuuuucagagccaccaaaaaaaaaaaaaaaaaaaaaaaaaaaaaaaaaaaaaaaaaaaaaaaaaaaaaaaaaaaaaaaaagaauu

SEQ ID NO: 34077 - RNA, 1781 nt, Artificial Sequence
  mRNA product Design b-4 (hSL-A64-N5) comprising derived and/or modified sequence from LASV(G3010-SLE-2013;Clade IV)__AIT17344__GPCmut8 (opt1)
aggagagucccgcagucggcguccagcggcucugcuuguucgugugugugucguugcaggccuuauucaagcuuaccaugggccagaucgugaccuucuuccaggaggucccccacgugaucgaggaggugaugaacaucguccugaucgcccucagcauccuggccgugcugaaggggcucuacaacuucgcgaccugcggccugguggggcuggucacguuccuccugcugugcggccgcuccugcaccaccagccucuacaaggggguguacgagcugcagacccuggagcucaacauggagacgcugaacaugugcaugccgcuguccugcaccaagaacaacagccaccacuacaucauggugggcaacgagaccggccucgagcugacgcugaccaacaccuccaucaucaaccacaaguucugcaaccucagcgacgcccacaagaagaaccuguacaaccacgcccugauguccaucaucagcaccuuccaccucuccauccccaacuucaaccaguacgaggccaugagcugcgacuucaacgggggcaagaucuccguccaguacaaccugagccacuccuacgccggggacgcggccagccacugcggcacgguggccaacggggugcugcagaccuucaugcggauggccuggggcggcuccuacaucgcgcucgacagcggguacggcaagugggacugcaucaugaccuccuaccaguaccugaucauccagaacaccacgugggaggaccacugccaguucagccgccccucccccaucggguaccugggccuccugagccagcggacccgcgacaucuacaucagccggcgccugcucggcaccuucaccuggacgcuguccgacagcgaggggaaggacaccccgggcggguacugccugacccgguggaugcucaucgaggccgagcugaagugcuucggcaacaccgccgucgccaagugcaacgagaagcacgacgaggaguucugcgacaugcugcgccucuucgacuucugcaagcaggccauccagcggcugaagacgcccgcgcagauguccauccagcugaucaacaaggccgugaacgcccucaucaacgaccagcugaucaugaagaaccaccuccgcgacaucauggggauccccuacugcaacuacagcaaguacugcuaccugaaccacaccaccaccggcaagacgucccugcccaagugcugccuggugagcaacggcuccuaccucaacgagacccacuucagcgacgacaucgagcagcaggccgacaacaugaucaccgagaugcugcagaaggaguacauggagcggcaggggaagacgccccugggccucgucgaccuguucguguucuccaccagcuucuaccugaucuccaucuuccugcaccucgugaagaucccgacccaccgccacaucgucggcaagagcugccccaagccccaccggcugaaccacauggggaucugcuccugcgggcuguacaagcagcccggcgugccggugcgcuggaagcggugaggacuaguaauaaggaaacuguaugaaugucugugggcaggaagugaagagauccuucuguaaagguuuuuggaauuaugucugcugaauaauaaacuuuuuugaaauaauaaaucugguagaaaaaugagaucucaaaggcucuuuucagagccaccaaaaaaaaaaaaaaaaaaaaaaaaaaaaaaaaaaaaaaaaaaaaaaaaaaaaaaaaaaaaaaaaagaauu

SEQ ID NO: 34078 - RNA, 1781 nt, Artificial Sequence
  mRNA product Design b-4 (hSL-A64-N5) comprising derived and/or modified sequence from LASV(G502-SLE-2009;Clade IV)__AIT17126__GPCmut8 (opt1)
aggagagucccgcagucggcguccagcggcucugcuuguucgugugugugucguugcaggccuuauucaagcuuaccaugggccagaucgugaccuucuuccaggaggucccccacgugaucgaggaggugaugaacaucguccugaucgcccucagcauccuggccgugcugaaggggcucuacaacuucgcgaccugcggccugguggggcugcucacguuccugcugcucugcggccgcuccugcaccaccgggcuguacaagggcgucuacgagcugcagacccucgagcugaacauggagacgcugaacaugugcaugccgcucagcugcaccaagaacaacucccaccacuacaucauggugggcaacgagaccgggcuggagcugacgcucaccaacaccagcaucaucaaccacaaguucugcaaccuguccgacgcccacaagaagaaccuguacgaccacgcccucaugagcaucaucuccaccuuccaccugagcauccccaacuucaaccaguacgaggccauguccugcgacuucaacggcgggaagaucagcgugcaguacaaccugucccacagcuacgccggcgacgcggccgaccacugcgggacggucgccaacggcgugcuccagaccuucaugcggauggccuggggcggguccuacaucgcgcuggacagcggccgcgggcggugggacugcaucaugaccuccuaccaguaccugaucauccagaacaccacgugggaggaccacugccaguucagccgccccucccccaucggcuaccucggccugcugagccagcggacccgcgacaucuacaucucccggcgccuccuggggaccuucaccuggacgcugagcgacagcgagggcaaggacacccccgggggcuacugccucacccgguggaugcugaucgaggccgagcugaagugcuucgggaacaccgccguggccaagugcaacgagaagcacgacgaggaguucugcgacaugcuccgccuguucgacuucugcaagcaggccauccagcggcugaaggcgcccgcccagauguccauccagcucaucaacaaggccgucaacgcccugaucaacgaccagcuggugaugaagaaccaccuccgcgacaucaugggcauccccuacugcaacuacagccgguacugcuaccugaaccacacgaccaccggccgcaccucccugcccaagugcugccucgugagcaacggguccuaccugaacgagacgcacuucagcgacgacaucgagcagcaggccgacaacaugaucaccgagaugcugcagaaggaguacauggagcggcagggcaagaccccgcucgggcuggucgaccuguucguguucuccaccagcuucuaccugaucuccaucuuccuccaccuggugaagaucccgacgcaccgccacaucgucggcaagagcugccccaagccccaccggcugaaccacauggggaucugcuccugcggccucuacaagcagcccggcgugccggugaaguggaagcgcugaggacuaguaauaaggaaacuguaugaaugucugugggcaggaagugaagagauccuucuguaaagguuuuuggaauuaugucugcugaauaauaaacuuuuuugaaauaauaaaucugguagaaaaaugagaucucaaaggcucuuuucagagccaccaaaaaaaaaaaaaaaaaaaaaaaaaaaaaaaaaaaaaaaaaaaaaaaaaaaaaaaaaaaaaaaaagaauu

SEQ ID NO: 34079 - RNA, 1781 nt, Artificial Sequence
  mRNA product Design b-4 (hSL-A64-N5) comprising derived and/or modified sequence from LASV(G733-SLE-2010;Clade IV)__AIT17154__GPCmut8 (opt1)
aggagagucccgcagucggcguccagcggcucugcuuguucgugugugugucguugcaggccuuauucaagcuuaccaugggccagaucgugaccuucuuccaggaggucccccacgugaucgaggaggugaugaacaucguccugaucgcccucagcauccuggccgugcugaaggggcucuacaacuucgcgaccugcggcaucguggggcuggucuccuuccugcuccugugcggccgcagcugcacgaccucccuguacaaggggguguacgagcuccagacccuggagcugaacauggagacccucaacaugugcaugccgcugagcugcaccaagaacaacucccaccacuacaucauggugggcaacgagaccggccuggagcucacccugacgaacaccagcaucaucaaccacaaguucugcaaccuguccgacgcccacaagaagaaccucuacgaccacgcccugaugagcaucaucuccaccuuccaccugagcauccccaacuucaaccaguacgaggccauguccugcgacuucaacgggggcaagaucagcguccaguacaaccucucccacagcuacgccggggacgcggccaaccacugcggcaccaucgccaacggggugcugcagacguucaugcggauggccuggggcggcuccuacaucgcgcuggacagcgggcgcgaccggugggacugcaucaugaccuccuaccaguaccucaucauccagaacaccaccugggaggaccacugccaguucagccgccccucccccaucggcuaccuggggcugcucagccagcggacgcgcgacaucuacaucagccggcgccugcugggcaccuucaccuggacccucuccgacagcgagggcaaggacacgcccgggggcuacugccugacccgguggaugcugaucgaggccgagcucaagugcuucgggaacaccgccguggccaagugcaacgagaagcacgacgaggaguucugcgacaugcugcgccuguucgacuucugcaagcaggccauccagcggcucaaggcgcccgcccagauguccauccagcugaucaacaaggccgucaacgcccugaucaacgaccagcucaucaugaagaaccaccuccgcgacaucaugggcauccccuacugcaacuacagcaaguacugcuaccugaaccacaccacgaccgggaagaccucccugcccaagugcugccuggugagcaacggcuccuaccugaacgagacccacuucagcgacgacaucgagcagcaggccgacaacaugaucacggagaugcuccagaaggaguacauggagcggcagggcaagaccccgcuggggcugguggaccucuucgucuucuccaccagcuucuaccugaucuccaucuuccugcaccuggugaagaucccgacccaccgccacguggucggcaagagcugccccaagccccaccggcucaaccacauggggaucugcuccugcggccuguacgggcagcccggcgugccggugaaguggaagcgcugaggacuaguaauaaggaaacuguaugaaugucugugggcaggaagugaagagauccuucuguaaagguuuuuggaauuaugucugcugaauaauaaacuuuuuugaaauaauaaaucugguagaaaaaugagaucucaaaggcucuuuucagagccaccaaaaaaaaaaaaaaaaaaaaaaaaaaaaaaaaaaaaaaaaaaaaaaaaaaaaaaaaaaaaaaaaagaauu

SEQ ID NO: 34080 - RNA, 1781 nt, Artificial Sequence
  mRNA product Design b-4 (hSL-A64-N5) comprising derived and/or modified sequence from MOPV/LASV reassortant(IGS-1;Clade IV)__AFY05576__GPCmut8 (opt1)
aggagagucccgcagucggcguccagcggcucugcuuguucgugugugugucguugcaggccuuauucaagcuuaccaugggccagaucgugaccuucuuccaggaggucccccacgugaucgaggaggugaugaacaucguccugaucgcccucagcgugcuggccgugcugaaggggcucuacaacuucgcgaccugcggccuggucgggcuggugacguuccuccugcugugcggccgcuccugcaccaccagccucuacaaggggguguacgagcugcagacccuggagcucaacauggagacgcugaacaugugcaugccgcuguccugcaccaagaacaacagccaccacuacaucauggucggcaacgagaccggccucgagcugacgcugaccaacaccuccaucaucaaccacaaguucugcaaccucagcgacgcccacaagaagaaccuguacgaccacgcccugauguccaucaucagcaccuuccaccucuccauccccaacuucaaccaguacgaggccaugagcugcgacuucaacgggggcaagaucuccgugcaguacaaccugagccacuccuacgccggggacgcggccaaccacugcggcacgguggccaacgggguccugcagaccuucaugcggauggccuggggcggcagcuacaucgcgcucgacuccgggcgcggcaacugggacugcaucaugaccagcuaccaguaccugaucauccagaacaccacgugggaggaccacugccaguucucccggcccagccccaucggguaccugggccuccugucccagcgcacccgggacaucuacaucagccgccggcugcucggcaccuucaccuggacgcugagcgacuccgagggggaggacaccccgggcggguacugccugacccgcuggaugcucaucgaggccgagcugaagugcuucggcaacaccgccguggccaagugcaacgagaagcacgacgaggaguucugcgacaugcugcggcuguucgacuucugcaagcaggccauccagcgccugaaggcgcccgcccagaugagcauccagcugaucaacaaggccgugaacgcccucaucaacgaccagcugaucaugaagaaccaccuccgggacaucauggggauccccuacugcaacuacuccaaguacugcuaccucaaccacacgaccaccggccgcaccagccugcccaagugcugccuggucuccaacggcagcuaccucaacgagacgcacuucuccgacgacaucgagcagcaggccgacaacaugaucaccgagaugcugcagaaggaguacauggagcggcaggggaagacgccccugggccucguggaccuguucguguucagcaccuccuucuaccugaucagcaucuuccugcaccucgucaagaucccgacccaccgccacaucguggggaaguccugccccaagccccaccggcugaaccacaugggcaucugcagcugcgggcuguacaagcagcccggcgugccggucaaguggaagcgcugaggacuaguaauaaggaaacuguaugaaugucugugggcaggaagugaagagauccuucuguaaagguuuuuggaauuaugucugcugaauaauaaacuuuuuugaaauaauaaaucugguagaaaaaugagaucucaaaggcucuuuucagagccaccaaaaaaaaaaaaaaaaaaaaaaaaaaaaaaaaaaaaaaaaaaaaaaaaaaaaaaaaaaaaaaaaagaauu

SEQ ID NO: 34081 - RNA, 1781 nt, Artificial Sequence
  mRNA product Design b-4 (hSL-A64-N5) comprising derived and/or modified sequence from LASV(LM765-SLE-2012;Clade IV)__AIT17814__GPCmut8 (opt1)
aggagagucccgcagucggcguccagcggcucugcuuguucgugugugugucguugcaggccuuauucaagcuuaccaugggccagaucgugaccuucuuccaggaggucccccacgugaucgaggaggugaugaacaucguccugaucgcccucagcauccuggccgugcugaaggggcucuacaacuucgcgaccugcggccugguggggcuggucacguuccuccugcugugcggccgcuccugcaccaccagccucuacaaggggguguacgagcugcagacccuggagcucaacauggagacgcugaacaugugcaugccgcuguccugcaccaagaacaacagccaccacuacaucauggugggcaacgagaccggccucgagcugacgcugaccaacaccuccaucaucgaccacaaguucugcaaccucagcgacgcccaccggaagaaccuguacgaccacgcccugauguccaucaucagcaccuuccaccucuccauccccaacuucaaccaguacgaggccaugagcugcgacuucaacgggggcaagaucuccguccaguacaaccugagccacuccuacgccaaggacgcggccgaccacugcgggacgguggccaacggcgugcugcagaccuucaugcgcauggccuggggcgggagcuacaucgcgcucgacuccggccgggggcgcugggacugcaucaugaccagcuaccaguaccugaucauccagaacaccacgugggaggaccacugccaguucucccggcccagccccaucggcuaccuggggcuccugucccagcgcacccgggacaucuacaucagccgccggcugcucggcaccuucaccuggacgcugagcgacuccgagggcaaggacacccccgggggcuacugccugacccgcuggaugcucaucgaggccgagcugaagugcuucgggaacaccgccgucgccaagugcaacgagaagcacgacgaggaguucugcgacaugcugcggcuguucgacuucugcaagcaggccauccagcgccugaaggcgcccgcccagaugagcauccagcugaucaacaaggccgugaacgcccucaucaacgaccagcugaucaugaagaaccaccuccgggacaucaugggcauccccuacugcaacuacuccaaguacugcuaccucaaccacacgaccaccgggaagaccagccugcccaagugcugccugguguccaacggcagcuaccucaacgagacgcacuucuccgacgacaucgagcagcaggccgacaacaugaucaccgagaugcugcagaaggaguacauggagcgccagggcaagaccccgcuggggcucgucgaccuguucguguucagcaccuccuucuaccugaucagcaucuuccugcaccucgugaagaucccgacgcaccggcacaucgucggcaagcccugccccaagccccaccgccugaaccacauggggaucugcuccugcggccuguacaagcagccgggggugcccgugaaguggaagcggugaggacuaguaauaaggaaacuguaugaaugucugugggcaggaagugaagagauccuucuguaaagguuuuuggaauuaugucugcugaauaauaaacuuuuuugaaauaauaaaucugguagaaaaaugagaucucaaaggcucuuuucagagccaccaaaaaaaaaaaaaaaaaaaaaaaaaaaaaaaaaaaaaaaaaaaaaaaaaaaaaaaaaaaaaaaaagaauu

SEQ ID NO: 34082 - RNA, 1781 nt, Artificial Sequence
  mRNA product Design b-4 (hSL-A64-N5) comprising derived and/or modified sequence from LASV(LM776-SLE-2012;Clade IV)__AIT17824__GPCmut8 (opt1)
aggagagucccgcagucggcguccagcggcucugcuuguucgugugugugucguugcaggccuuauucaagcuuaccaugggccagaucgugaccuucuuccaggaggucccccacgugaucgaggaggugaugaacaucguccugaucgcccucagcauccuggccgugcugaaggggcucuacaacuucgcgaccugcggccugguggggcuggucacguuccuccugcugugcggccgcuccugcaccaccagcguguacaaggggguguacgagcuccagacccuggagcugaacauggagacgcucaacaugugcaugccgcuguccugcaccaagaacaacagccaccacuacaucauggucggcaacgagaccggccuggagcucacgcugaccaacaccuccaucaucaaccacaaguucugcaaccugagcgacgcccacaagaagaaccucuacgaccacgcccugauguccaucaucagcaccuuccaccuguccauccccaacuucaaccaguacgaggccaugagcugcgacuucaacgggggcaagaucuccgugcaguacaaccucagccacuccuacgccggggacgcggccaaccacugcggcacgguggccaacgggguccugcagaccuucaugcggauggccuggggcggcagcuacaucgcgcuggacuccgggcacggcaagugggacugcaucaugaccagcuaccaguaccucaucauccagaacaccacgugggaggaccacugccaguucucccgccccagccccaucggguaccugggccugcucucccagcggacccgcgacaucuacaucagccggcgccugcugggcaccuucaccuggacgcucagcgacuccgaggggaaggacaccccgggcggguacugccugacccgguggaugcugaucgaggccgagcucaagugcuucggcaacaccgccguggccaagugcaacgagaagcacgacgaggaguucugcgacaugcugcgccuguucgacuucugcaagcaggccauccagcggcucaaggcgcccgcccagaugagcauccagcugaucaacaaggccgugaacgcccugaucaacgaccagcucaucaugaagaaccaccuccgcgacaucauggggauccccuacugcaacuacuccaaguacugcuaccugaaccacacgaccaccggcaagaccagccugcccaagugcugccuggucuccaacggcagcuaccugaacgagacgcacuucuccgacgacaucgagcagcaggccgacaacaugaucaccgagaugcuccagaaggaguacauggagcggcaggggaagacgccccugggccugguggaccucuucguguucagcaccuccuucuaccugaucagcaucuuccugcaccuggucaagaucccgacccaccgccacaucguggggaaguccugccccaagccccaccggcucaaccacaugggcaucugcagcugcgggcuguacaagcagcccggcgugccgguccgcuggaagcggugaggacuaguaauaaggaaacuguaugaaugucugugggcaggaagugaagagauccuucuguaaagguuuuuggaauuaugucugcugaauaauaaacuuuuuugaaauaauaaaucugguagaaaaaugagaucucaaaggcucuuuucagagccaccaaaaaaaaaaaaaaaaaaaaaaaaaaaaaaaaaaaaaaaaaaaaaaaaaaaaaaaaaaaaaaaaagaauu

SEQ ID NO: 34083 - RNA, 1781 nt, Artificial Sequence
  mRNA product Design b-4 (hSL-A64-N5) comprising derived and/or modified sequence from LASV(Mad39;Clade IV)__ANH09722__GPCmut8 (opt1)
aggagagucccgcagucggcguccagcggcucugcuuguucgugugugugucguugcaggccuuauucaagcuuaccaugggccagaucgugaccuucuuccaggaggucccccacgugaucgaggaggugaugaacaucguccugaucgcccucagcauccuggccgugcugaaggggcucuacaacguggcgaccugcggccugaucgggcuggucacguuccuccugcugugcggccgcuccugcaccaccacccucuacaaggggguguacgagcugcaggcccuggagcucaacauggagacgcugaacaugugcaugccgcugagcugcaccaagaacaacucccaccacuacauccgggugggcaacgagaccggccucgagcugacgcugaccaacaccagccucaucaaccacaaguucugcaaccuguccgacgcccacaagaagaaccuguacgaccacgcccucaugagcaucaucuccaccuuccaccugagcauccccaacuucaaccaguacgaggccauguccugcgacuucaacgacgggaagaucagcguccaguacaaccugucccacacguacgcgggcgacaccgccaaccacugcgggaccguggccaacggcgugcuccagaccuucaugcgcauggccuggggcgggagcuacaucgcgcuggacuccggccgcgggggcugggacugcaucaugacgagcuaccaguaccugaucauccagaacaccaccugggaggaccacugccaguucucccggcccagccccaucggguaccucggccugcugucccagcggacccgcgacaucuacaucagccggcgccuccugggcacguucaccuggacccuguccgacagcgaggggaaggacaccccgggcggguacugccucacgcgguggaugcugaucgaggccgagcugaagugcuucggcaacaccgccgucgccaagugcaacgagaagcacgacgaggaguucugcgacaugcuccgccuguucgacuucugcaagcaggccauccagcggcugaaggcgcccgcccagaugagcauccagcucaucaacaaggccgugaacgcccugaucaacgaccagcugaucaugaagaaccaccuccgcgacaucauggggauccccuacugcaacuacuccaaguacugcuaccugaaccacaccgugaccggcaagacgagccugcccaagugcugccucgucuccaacggcagcuaccugaacgagacccacuucuccgacgacaucgagcagcaggccgacaacaugaucaccgagaugcugcagaaggaguacauggagcggcaggggaagacgccccucggccugguggaccuguucguguucagcaccuccuucuaccugaucagcaucuuccuccaccuggucaagaucccgacccaccgccacgugguggggaagcccugccccaagccccaccggcugaaccacaugggcaucugcuccugcggguucuacaagcagccgggcguccccgugcgcuggaagcggugaggacuaguaauaaggaaacuguaugaaugucugugggcaggaagugaagagauccuucuguaaagguuuuuggaauuaugucugcugaauaauaaacuuuuuugaaauaauaaaucugguagaaaaaugagaucucaaaggcucuuuucagagccaccaaaaaaaaaaaaaaaaaaaaaaaaaaaaaaaaaaaaaaaaaaaaaaaaaaaaaaaaaaaaaaaaagaauu

SEQ ID NO: 34084 - RNA, 1781 nt, Artificial Sequence
  mRNA product Design b-4 (hSL-A64-N5) comprising derived and/or modified sequence from LASV(Z0947-SLE-2011;Clade IV)__AIT17840__GPCmut8 (opt1)
aggagagucccgcagucggcguccagcggcucugcuuguucgugugugugucguugcaggccuuauucaagcuuaccaugggccagaucgugaccuucuuccaggaggucccccacgugaucgaggaggugaugaacaucguccugaucgcccucagcauccuggccgugcugaaggggcucuacaacuucgcgaccugcggccugguggggcuggucacguuccuccugcugugcggccgcuccugcaccaucagccucuacaaggggguguacgagcugcagacccuggagcucaacauggagacccugaacaugugcaugccgcuguccugcaccaagaacaacagccaccacuacaucauggugggcaacgagaccggccucgagcugacccugacgaacaccuccaucaucaaccacaaguucugcaaccucagcgacgcccacaagaagaaccuguacgaccacgcccugauguccaucaucagcaccuuccaccucuccauccccaacuucaaccaguacgaggccaugagcugcgacuucaacgggggcaagaucuccguccaguacaaccugagccacuccuacgccggggacgcggccaaccacugcggcaccguggccaacggggugcugcagacguucaugcggauggccuggggcggcagcuacaucgcgcucgacuccgggcgcgaccggugggacugcaucaugaccagcuaccaguaccugaucauccagaacaccaccugggaggaccacugccaguucucccgccccagccccaucggcuaccuggggcuccugucccagcggacgcgcgacaucuacaucagccggcgccugcucggcaccuucaccuggacccugagcgacuccgagggcaaggacacgcccgggggcuacugccugacccgguggaugcucaucgaggccgagcugaagugcuucgggaacaccgccgucgccaagugcaacgagaagcacgacgaggaguucugcgacaugcugcgccucuucgacuucugcaagcaggccauccagcggcugaaggcgcccgcccagaugagcauccagcugaucaacaaggccgugaacgcccucaucaacgaccagcugaucaugaagaaccaccuccgcgacaucaugggcauccccuacugcaacuacuccaaguacugcuaccugaaccacaccacgaccgggaagaccagccugcccaagugcugccugguguccaacggcagcuaccucaacgagacccacuucuccgacgacaucgagcagcaggccgacaacaugaucacggagaugcugcagaaggaguacauggagcggcagggcaagaccccgcuggggcucgucgaccuguucguguucagcaccuccuucuaccugaucagcaucuuccugcaccucgugaagaucccgacccaccgccacaucgucggcaagcccugccccaagccccaccggcugaaccacauggggaucugcuccugcggccuguacaagcagccgggggugcccgugaaguggaagcgcugaggacuaguaauaaggaaacuguaugaaugucugugggcaggaagugaagagauccuucuguaaagguuuuuggaauuaugucugcugaauaauaaacuuuuuugaaauaauaaaucugguagaaaaaugagaucucaaaggcucuuuucagagccaccaaaaaaaaaaaaaaaaaaaaaaaaaaaaaaaaaaaaaaaaaaaaaaaaaaaaaaaaaaaaaaaaagaauu

SEQ ID NO: 34085 - RNA, 1781 nt, Artificial Sequence
  mRNA product Design b-4 (hSL-A64-N5) comprising derived and/or modified sequence from LASV(Josiah;Clade IV)__NP_694870__GPCmut8 (opt1)
aggagagucccgcagucggcguccagcggcucugcuuguucgugugugugucguugcaggccuuauucaagcuuaccaugggccagaucgugaccuucuuccaggaggucccccacgugaucgaggaggugaugaacaucguccugaucgcccucagcgugcuggccgugcugaaggggcucuacaacuucgcgaccugcggccuggucgggcuggugacguuccuccugcugugcggccgcuccugcaccaccagccucuacaaggggguguacgagcugcagacccuggagcucaacauggagacgcugaacaugugcaugccgcuguccugcaccaagaacaacagccaccacuacaucauggucggcaacgagaccggccucgagcugacccugacgaacaccuccaucaucaaccacaaguucugcaaccucagcgacgcccacaagaagaaccuguacgaccacgcccugauguccaucaucagcaccuuccaccucuccauccccaacuucaaccaguacgaggccaugagcugcgacuucaacgggggcaagaucuccgugcaguacaaccugagccacuccuacgccggggacgcggccaaccacugcggcaccguggccaacgggguccugcagacguucaugcggauggccuggggcggcagcuacaucgcgcucgacuccgggcgcggcaacugggacugcaucaugaccagcuaccaguaccugaucauccagaacaccaccugggaggaccacugccaguucucccggcccagccccaucggguaccugggccuccugucccagcgcacgcgggacaucuacaucagccgccggcugcucggcaccuucaccuggacccugagcgacuccgaggggaaggacacgccgggcggguacugccugacccgcuggaugcucaucgaggccgagcugaagugcuucggcaacaccgccguggccaagugcaacgagaagcacgacgaggaguucugcgacaugcugcggcuguucgacuucugcaagcaggccauccagcgccugaaggcgcccgcccagaugagcauccagcugaucaacaaggccgugaacgcccucaucaacgaccagcugaucaugaagaaccaccuccgggacaucauggggauccccuacugcaacuacuccaaguacugcuaccucaaccacaccacgaccggccgcaccagccugcccaagugcugccuggucuccaacggcagcuaccucaacgagacccacuucuccgacgacaucgagcagcaggccgacaacaugaucacggagaugcugcagaaggaguacauggagcggcaggggaagaccccgcugggccugguggaccucuucguguucagcaccuccuucuaccugaucagcaucuuccugcaccucgucaagauccccacccaccgccacaucguggggaaguccugccccaagccccaccggcugaaccacaugggcaucugcagcugcgggcuguacaagcagccgggcgugcccgucaaguggaagcgcugaggacuaguaauaaggaaacuguaugaaugucugugggcaggaagugaagagauccuucuguaaagguuuuuggaauuaugucugcugaauaauaaacuuuuuugaaauaauaaaucugguagaaaaaugagaucucaaaggcucuuuucagagccaccaaaaaaaaaaaaaaaaaaaaaaaaaaaaaaaaaaaaaaaaaaaaaaaaaaaaaaaaaaaaaaaaagaauu

SEQ ID NO: 34086 - RNA, 1778 nt, Artificial Sequence
  mRNA product Design b-4 (hSL-A64-N5) comprising derived and/or modified sequence from LASV(LP;Clade I)__AAF86701__GPCmut8 (opt1)
aggagagucccgcagucggcguccagcggcucugcuuguucgugugugugucguugcaggccuuauucaagcuuaccaugggccagaucaucaccuucuuccaggaggugccccacgucaucgaggaggugaugaacaucgugcugaucgcccucagccugcuggccauccucaaggggcuguacaacaucgcgaccugcggcaucaucgggcuggucgccuuccucuuccugugcggcaaguccugcagccugacgcucaagggcggguacgagcugcagacccuggagcucaacauggagacccugaacaugugcaugccgcuguccugcaccaagaacagcucccaccacuacauccgcgugggcaacgagacggggcucgagcugacccugaccaacaccagcaucaucaaccacaaguucugcaaccucuccgacgcccacaagaagaaccuguacgaccacgcccugaugagcaucaucuccacguuccaccucagcauccccaacuucaaccaguacgaggccauguccugcgacuucaacggcgggaagaucagcgugcaguacaaccugucccacagcuacgcgggcgacgccgccgagcacugcgggaccgucgccaacggcgugcugcagaccuucaugcggauggcguggggcgggcgcuacaucgcccucgacuccggcaaggggaacugggacugcaucaugaccagcuaccaguaccugaucauccagaacacgaccugggaggaccacugccaguucucccggcccagccccaucggcuaccugggccuccugucccagcgcacccgggacaucuacaucagccgccggcugcucgggaccuucacguggacccugagcgacuccgagggcaacgagacccccgggggcuacugccugacccgcuggaugcucaucgaggccgagcugaagugcuucgggaacacggccguggccaagugcaacgagaagcacgacgaggaguucugcgacaugcugcggcuguucgacuucugcaagcaggcgauccgccggcugaaggccccggcccagaugagcauccagcugaucaacaaggccgucaacgcccucaucaacgaccagcugaucaugaagaaccaccuccgcgacaucaugggcauccccuacugcaacuacuccaaguacugcuaccucaaccacaccagcuccggccggaccagccugcccaagugcugccugaucuccaacgggagcuaccucaacgagacccaguucuccgacgacaucgagcagcaggcggacaacaugaucacggagaugcugcagaaggaguacaucgagcgccagggcaagaccccgcuggggcugguggacaucuucaucuucagcaccuccuucuaccucaucagcaucuuccugcaccugaucaagauccccacccaccggcacaucgugggcaagcccugccccaagccgcaccgccucaaccacaugggggucugcuccugcggccuguacaagcaccccggcgugcccacgaaguggaagcggugaggacuaguaauaaggaaacuguaugaaugucugugggcaggaagugaagagauccuucuguaaagguuuuuggaauuaugucugcugaauaauaaacuuuuuugaaauaauaaaucugguagaaaaaugagaucucaaaggcucuuuucagagccaccaaaaaaaaaaaaaaaaaaaaaaaaaaaaaaaaaaaaaaaaaaaaaaaaaaaaaaaaaaaaaaaaagaauu

SEQ ID NO: 34087 - RNA, 1778 nt, Artificial Sequence
  mRNA product Design b-4 (hSL-A64-N5) comprising derived and/or modified sequence from LASV(803213;Clade II)__AAF86703__GPCmut8 (opt1)
aggagagucccgcagucggcguccagcggcucugcuuguucgugugugugucguugcaggccuuauucaagcuuaccaugggccagaucaucaccuucuuccaggaggugccccacgucaucgaggaggugaugaacaucgugcugaucgcccucagccugcuggccauccucaaggggaucuacaacgucgcgaccugcggccuguucgggcugaucuccuuccuccugcugugcggccgcagcugcuccgugacguacaaggggguguacgagcuccagacccuggagcugaacauggccaaccucaacaugugcaugccgcugagcugcaccaagaacaacucccaccacuacaucauggucggcaacgagaccggccuggagcucacgcugaccaacaccagcaucaucaaccacaaguucugcaaccuguccgacgcccacaagaagaaccucuacgaccacgcccugaugagcaucaucuccaccuuccaccugagcauccccaacuucaaccaguacgaggccauguccugcgacuucaacgggggcaagaucagcgugcaguacaaccucucccacagcuucgcgguggacgccgccaaccacugcgggacgaucgccaacggcguccugcagaccuucaugcggauggcguggggcggguccuacaucgcccuggacagcggcaaggggaacugggacugcaucaugaccuccuaccaguaccucaucauccagaacaccacgugggaggaccacugccaguucagccgccccucccccaucggcuaccuggggcugcucagccagcggacccgcgacaucuacaucagccggcgccugcugggcaccuucaccuggacgcucuccgacagcgagggcaacgaggcccccgggggcuacugccugacccgguggaugcugaucgaggccgagcucaagugcuucgggaacaccgccguggcgaagugcaacgagaagcacgacgaggaguucugcgacaugcugcgccuguucgacuucugcaagcaggccaucaagcggcucaagaccccggcccagauguccauccagcugaucaacaaggccgugaacgcccugaucaacgaccagcucaucaugaagaaccaccuccgcgacaucaugggcauccccuacugcaacuacagccgguacugcuaccugaaccacacggucaccgggaagaccucccugccccgcugcugccuggugagcaacggcuccuaccugaacgagacccacuucagcgacgacaucgagcagcaggcggacaacaugaucacggagaugcuccagaaggaguacauggaccggcagggcaagaccccgcuggggcugguggaccuguucgucuucuccaccagcuucuaccucaucuccaucuuccugcaccuggugaagauccccacccaccgccacaucgugggcaagcccugccccaagccgcaccggcucaaccacauggggaucugcagcugcggccuguacaagcaccccgggguccccgugaaguggaagcgcugaggacuaguaauaaggaaacuguaugaaugucugugggcaggaagugaagagauccuucuguaaagguuuuuggaauuaugucugcugaauaauaaacuuuuuugaaauaauaaaucugguagaaaaaugagaucucaaaggcucuuuucagagccaccaaaaaaaaaaaaaaaaaaaaaaaaaaaaaaaaaaaaaaaaaaaaaaaaaaaaaaaaaaaaaaaaagaauu

SEQ ID NO: 34088 - RNA, 1778 nt, Artificial Sequence
  mRNA product Design b-4 (hSL-A64-N5) comprising derived and/or modified sequence from LASV(GA391;Clade III)__CAA36645__GPCmut8 (opt1)
aggagagucccgcagucggcguccagcggcucugcuuguucgugugugugucguugcaggccuuauucaagcuuaccaugggccagaucgugaccuucuuccaggaggucccccacgugaucgaggaggugaugaacaucguccugaucgcccucagcauccuggccauccugaaggggcucuacaacguggcgaccugcggccugaucgggcuggugacguuccuccugcuguccggccgcagcugcucccucaucuacaaggggaccuacgagcugcagacccuggagcucaacauggagacccugaacaugugcaugccgcugagcugcacgaagaacaacucccaccacuacauccgggucggcaacgagaccggccucgagcugacccugaccaacacgagcauccucaaccacaaguucugcaaccuguccgacgcccacaagcgcaaccuguacgaccacagccucauguccaucaucagcaccuuccaccuguccauccccaacuucaaccaguacgaggccaugagcugcgacuucaacgggggcaagaucaccgugcaguacaaccugucccacagcuucgccguggacgccgcggggcacugcggcacccucgccaacgggguccugcagacguucaugcggauggccuggggcggcuccuacaucgcccuggacagcgggcgcggcaacugggacugcaucaugaccuccuaccaguaccucaucauccagaacaccaccugggacgaccacugccaguucagccggcccucccccaucggguaccugggccugcucagccagcgcacgcgggacaucuacaucagccgccggcugcugggcaccuucaccuggacccucuccgacagcgaggggaacgagacgccgggcggguacugccugacccgcuggaugcugaucgaggcggagcucaagugcuucggcaacaccgccguggccaagugcaacgagaagcacgacgaggaguucugcgacaugcugcggcuguucgacuucugcaagcaggccauccgccggcucaagacccccgcccagauguccauccagcugaucaacaaggcggugaacgcccugaucaacgaccagcucaucaugaagaaccaccuccgcgacaucauggggauccccuacugcaacuacagccgguacugcuaccugaaccacacguccaccggcaagaccagccugccccgcugcugccugaucuccaacggcagcuaccugaacgagaccaaguucuccgacgacaucgagcagcaggccgacaacaugaucacggagaugcugcagaaggaguacaucgaccggcaggggaagaccccgcucggccuggucgaccuguucguguucagcaccuccuucuaccucaucagcaucuuccugcaccuggugaagauccccacccaccgccacaucgucgggaagcccugccccaagccgcaccggcucaaccacaugggcaucugcuccugcgggcuguacaagcagcccggcgugcccgugcgcuggaagcggugaggacuaguaauaaggaaacuguaugaaugucugugggcaggaagugaagagauccuucuguaaagguuuuuggaauuaugucugcugaauaauaaacuuuuuugaaauaauaaaucugguagaaaaaugagaucucaaaggcucuuuucagagccaccaaaaaaaaaaaaaaaaaaaaaaaaaaaaaaaaaaaaaaaaaaaaaaaaaaaaaaaaaaaaaaaaagaauu

SEQ ID NO: 34089 - RNA, 1781 nt, Artificial Sequence
  mRNA product Design b-4 (hSL-A64-N5) comprising derived and/or modified sequence from LASV(AV;Clade V)__CCA30314__GPCmut8 (opt1)
aggagagucccgcagucggcguccagcggcucugcuuguucgugugugugucguugcaggccuuauucaagcuuaccaugggccagaucgugaccuucuuccaggaggucccccacgugaucgaggaggugaugaacaucguccugaucgcccucagcauccuggccgugcugaaggggcucuacaacaucgcgaccugcggccugaucgggcugaucacguuccuccugcugugcggccgcuccugcagcuccaaccucuacaaggggguguacgagcugcagagccuggaccucaacauggagacccugaacaugugcaugccgcuguccugcaccaagaacaacagccaccacuacauccgggucggcaacgacaccggccucgagcugacgcugaccaacaccuccauccucaaccacaaguucugcaaccugagcgacgcccacaagaaggaccuguacgaccacgcccucauguccaucaucagcaccuuccaccuguccauccccaacuucaaccaguacgaggccaugagcugcgacuucaacgggggcaagaucuccgugcaguacaaccugagccacuccuacgccaucgacgcggccaaccacugcgggacgguggccaacggcauccuccagaccuucaugcgcauggccuggggcgggagcuacaucgcgcuggacuccggccgggggaacugggacugcaucaugaccagcuaccaguaccugaucauccagaacaccacgugggagaaccacugccaguucucccgccccagccccaucggcuaccucgggcugcugagccagcggacccgcgacaucuacaucucccggcgccuccugggcaccuucaccuggacgcugagcgacuccgagggcaacgccacccccgggggcuacugccucacccgguggaugcugaucgaggccgagcugaagugcuucgggaacaccgccgucgccaagugcaacgagaagcacgacgaggaguucugcgacaugcuccgccuguucgacuucugcaagcaggcgaucagccggcugaaguccccggcccagaugagcauccagcucaucaacaaggccgugaacgcccugaucaacgaccagcugaucaugaagaaccaccuccgcgacaucaugggcauccccuacugcaacuacuccaaguacugcuaccugaaccacacgaucaccgggaagaccagccugcccaagugcugccucguguccaacggcagcuaccugaacgagacccacuucuccgacgacaucgagcagcaggccgacaacaugaucacggagaugcugcagaaggaguacauggagcggcagggcaagaccccgcuggggcucgucgaccuguucguguucagcaccuccuucuaccugaucagcaucuuccuccgccuggugaagauccccacccaccggcacaucgucggcaagcccugccccaagccgcaccgccugaaccacauggggaucugcuccugcggccucuacaagcagcccggggugcccgugcgguggaagcgcugaggacuaguaauaaggaaacuguaugaaugucugugggcaggaagugaagagauccuucuguaaagguuuuuggaauuaugucugcugaauaauaaacuuuuuugaaauaauaaaucugguagaaaaaugagaucucaaaggcucuuuucagagccaccaaaaaaaaaaaaaaaaaaaaaaaaaaaaaaaaaaaaaaaaaaaaaaaaaaaaaaaaaaaaaaaaagaauu

SEQ ID NO: 34090 - RNA, 1778 nt, Artificial Sequence
  mRNA product Design b-4 (hSL-A64-N5) comprising derived and/or modified sequence from LASV(Togo/2016/7082;Clade VI)__AMR44577__GPCmut8 (opt1)
aggagagucccgcagucggcguccagcggcucugcuuguucgugugugugucguugcaggccuuauucaagcuuaccaugggccagaucaucaccuucuuccaggaggugccccacgucaucgaggaggugaugaacaucgugcugaucgcccucagccugcuggccauccucaagggggucuacaacguggcgaccugcggcaucaucgggcuggugacguuccuguuccucugcggccgcuccugcagccugaucuacaagggguccuacgagcugcagacccucgagcugaacauggagacccugaacaugugcaugccgcucagcugcaccaagaacuccagccaccacuacauccgggucggcaacgagacgggccuggagcugacccucaccaacaccuccaucaucaaccacaaguucugcaaccugagcgacgcccacaagcgcaaccuguacgaccacgcccucauguccauccugagcacguuccaccuguccauccccaacuucaaccaguacgaggccaugagcugcgacuucaacgggggcaagaucuccgugcaguacaaccucagccacgccuacgcgguggacgccgccgagcacugcgggaccgucgccaacggcgugcugcagaccuucaugcggauggcguggggcggguccuacaucgcccuggacagcggccgcgggaacugggacugcaucaugaccuccuaccaguaccucaucauccagaacacgaccugggaggaccacugccaguucagccggcccucccccaucggcuaccuggggcugcucagccagcgcacccgggacaucuacaucagccgccggcugcugggcaccuucacguggacccucuccgacagcgagggcaacgagacccccgggggcuacugccugacccgcuggaugcugaucgaggccgagcucaagugcuucgggaacacggccguggccaagugcaacgagaagcacgacgaggaguucugcgacaugcugcggcuguucgacuucugcaagcaggcgauccagcgccucaaguccccggcccagaugagcauccagcugaucaacaaggccgucaacgcccugaucaacgaccagcucaucaugaagaaccaccuccgggacaugaugggcauccccuacugcaacuacuccaaguacugcuaccugaaccacaccagcuccgggcgcaccagccugcccaagugcugccugguguccaacggcagcuaccugaacgagacccacuucuccgacgacaucgagcagcaggccgacaacaugaucacggagaugcuccagaaggaguacaucgaccggcagggcaagaccccgcuggggcugguggaccuguucgucuucagcaccuccuucuaccucaucagcaucuuccugcaccugaucaagauccccacccaccgccacaucgugggcaagcccugccccaagccgcaccggcucaaccacauggggaucugcuccugcggccuguacaagcagcccggggugcccacgcgcuggaagcggugaggacuaguaauaaggaaacuguaugaaugucugugggcaggaagugaagagauccuucuguaaagguuuuuggaauuaugucugcugaauaauaaacuuuuuugaaauaauaaaucugguagaaaaaugagaucucaaaggcucuuuucagagccaccaaaaaaaaaaaaaaaaaaaaaaaaaaaaaaaaaaaaaaaaaaaaaaaaaaaaaaaaaaaaaaaaagaauu

SEQ ID NO: 34091 - RNA, 1778 nt, Artificial Sequence
  mRNA product Design b-4 (hSL-A64-N5) comprising derived and/or modified sequence from LASV(KAK-428;Clade n.d. (VII))__ANH09740__GPCmut8 (opt1)
aggagagucccgcagucggcguccagcggcucugcuuguucgugugugugucguugcaggccuuauucaagcuuaccaugggccagaucgugaccuucuuccaggaggucccccacgugaucgaggaggugaugaacaucguccugaucgcccucagccugcuggccauccucaaggggcuguacaacuucgcgaccugcggcgugaucgggcugaucacguuccuccugcugugcggccgcuccugcagcgccaccuacaaggggcaguacgagcuccagacccuggagcugaacauggagucccucaacaugugcaugccgcugagcugcaccaagaacaacucccaccacuacauccgggccggcaacaacacgggccuggagcucacccugaccaacaccagcaucaucucccacaaguucugcaaccugagcgacgcccacaagaagaaccucuacgaccacacgcugauguccaucaucaccaccuuccaccugagcauccccaacuucaaccaguacgaggccauguccugcgacuucaacgggggcaagaucagcauccaguacaaccucucccacagcuacgcgggggacgccgcccagcacugcggcaccguggccaacgggguccugcagacguucaugcgcauggcguggggcggcuccuaccuggcccucgacagcgggcggcgcggcugggacugcaucaucuccagcuaccaguaccugaucauccagaacaccaccugggacgaccacugccaguucucccggcccagccccaucggguaccugggcuucgugagccagaagacccgcgacaucuacaucucccggcgccuccugggcacguucaccuggacccugagcgacuccgaggggcacgacaugccgggcggguacugccucacccgguggaugcugaucgaggccgaccugaagugcuucggcaacacggccguggccaagugcaacgagaagcacgacgaggaguucugcgacauguggcgccucuucgacuucugcaagcaggcgauccagcggcugaaggcccccgcccagaugaacauccagcugaucaacaaggccgucaacgcccucaucaacgaccagcugaugaugaagaaccaccuccgcgacaucauggggauccccuacugcaacuacagcaaguucugcuaccugaacaacaccaccaccggccggacgucccugccccgcugcugccugaucagcaacggcuccuaccucaacgagacccacuucagcgacgacaucgagcagcaggcggacaacaugaucaccgagaugcugcagaaggaguacauggaccggcaggggaagaccccgcugggccucguggaccuguucguguucuccacgagcuucuaccugaucaccaucuuccugcaccucgucaagauccccacccaccgccacaucguggggaagcccugccccaagccgcaccggcugaaccacaugggcaucugcuccugcgggcuguacaagcagcccggcgugcccguccgcuggaagcggugaggacuaguaauaaggaaacuguaugaaugucugugggcaggaagugaagagauccuucuguaaagguuuuuggaauuaugucugcugaauaauaaacuuuuuugaaauaauaaaucugguagaaaaaugagaucucaaaggcucuuuucagagccaccaaaaaaaaaaaaaaaaaaaaaaaaaaaaaaaaaaaaaaaaaaaaaaaaaaaaaaaaaaaaaaaaagaauu

SEQ ID NO: 34092 - RNA, 1778 nt, Artificial Sequence; identical to SEQ ID NO: 34086
  mRNA product Design b-4 (hSL-A64-N5) comprising derived and/or modified sequence from LASV(Pinneo-NIG-1969;Clade I)__AIT17836__GPCmut8 (opt1)

SEQ ID NO: 34093 - RNA, 1778 nt, Artificial Sequence
  mRNA product Design b-4 (hSL-A64-N5) comprising derived and/or modified sequence from LASV(ISTH0009-NIG-2011;Clade II)__AIT17404__GPCmut8 (opt1)
aggagagucccgcagucggcguccagcggcucugcuuguucgugugugugucguugcaggccuuauucaagcuuaccaugggccagaucaucaccuucuuccaggaggugccccacgucaucgaggaggugaugaacaucgugcugaucgcccucagccugcuggccauccucaaggggaucuacaacgucgcgaccugcggccuguucgggcugguguccuuccuccugcugugcggccgcagcugcuccacgaccuacaaggggguguacgagcuccagacccuggagcuggacauggccagccucaacaugugcaugccgcuguccugcaccaagaacaacagccaccacuacaucauggucggcaacgagacgggccuggagcucacccugaccaacaccuccaucaucaaccacaaguucugcaaccugagcgacgcccacaagaagaaccucuacgaccacgcccugauguccaucaucagcacguuccaccuguccauccccaacuucaaccaguacgaggccaugagcugcgacuucaacgggggcaagaucuccgugcaguacaaccucagccacgcguacgccguggacgccgccaaccacugcgggaccaucgcgaacggcguccugcagaccuucaugcggauggccuggggcggguccuacaucgcccuggacagcggcaagggguccugggacugcaucaugaccagcuaccaguaccucaucauccagaacacgaccugggaggaccacugccaguucucccgccccagccccaucggcuaccuggggcugcucagccagcggacccgcgacaucuacaucucccggcgccugcugggcaccuucacguggacccucagcgacuccgagggcaacgagacccccgggggcuacugccugacccgguggaugcugaucgaggccgagcucaagugcuucgggaacacggccguggcgaagugcaacgagaagcacgacgaggaguucugcgacaugcugcgccuguucgacuucugcaagcaggccauccggcgccucaagaccccggcccagaugagcauccagcugaucaacaaggccgugaacgcccugaucaacgaccagcucaucaugaagaaccaccuccgggacaucaugggcauccccuacugcaacuacuccaaguacugcuaccugaaccacaccgucaccgggaagacgagccugccccgcugcugccugguguccaacggcagcuaccugaacgagacccacuucuccgacgacaucgagcagcaggcggacaacaugaucaccgagcuccugcagaaggaguacauggaccggcagggcaagaccccgcuggggcugguggaccucuucgucuucagcacguccuucuaccugaucagcaucuuccugcaccucaucaagauccccacccaccgccacaucaccggcaagcccugccccaagccgcaccggcugaaccacauggggaucugcuccugcggccuguacaagcaccccggggugcccgugaaguggaagcgcugaggacuaguaauaaggaaacuguaugaaugucugugggcaggaagugaagagauccuucuguaaagguuuuuggaauuaugucugcugaauaauaaacuuuuuugaaauaauaaaucugguagaaaaaugagaucucaaaggcucuuuucagagccaccaaaaaaaaaaaaaaaaaaaaaaaaaaaaaaaaaaaaaaaaaaaaaaaaaaaaaaaaaaaaaaaaagaauu

SEQ ID NO: 34094 - RNA, 1778 nt, Artificial Sequence
  mRNA product Design b-4 (hSL-A64-N5) comprising derived and/or modified sequence from LASV(ISTH2010-NIG-2012;Clade II)__AIT17482__GPCmut8 (opt1)
aggagagucccgcagucggcguccagcggcucugcuuguucgugugugugucguugcaggccuuauucaagcuuaccaugggccagaucaucaccuucuuccaggaggugccccacgucaucgaggaggugaugaacaucgugcugaucgcccucagccugcuggccauccucaaggggaucuacaacgucgcgaccugcggccuguucgggcugguguccuuccuccugcugugcggccgcagcugcuccacgaccuacaaggggguguacgagcuccagacccuggagcuggacauggccagccucaacaugugcaugccgcuguccugcaccaagaacaacagccaccacuacaucauggucggcaacgagacgggccuggagcucacccugaccaacaccuccaucaucaaccacaaguucugcaaccugagcgacgcccacaagaagaaccucuacgaccacgcccugauguccaucaucagcacguuccaccuguccauccccaacuucaaccaguacgaggccaugagcugcgacuucaacgggggcaagaucuccgugcaguacaaccucagccacgcguacgccguggacgccgccaaccacugcgggaccaucgcgaacggcguccugcagaccuucaugcggauggccuggggcggguccuacaucgcccuggacagcggcaagggguccugggacugcaucaugaccagcuaccaguaccucaucauccagaacaucacgugggaggaccacugccaguucucccgccccagccccaucggcuaccuggggcugcucagccagcggacccgcgacaucuacaucucccggcgccugcugggcaccuucaccuggacgcucagcgacuccgagggcaacgagacccccgggggcuacugccugacccgguggaugcugaucgaggccgagcucaagugcuucgggaacaccgccguggcgaagugcaacgagaagcacgacgaggaguucugcgacaugcugcgccuguucgacuucugcaagcaggccauccggcgccucaagacgccggcccagaugagcauccagcugaucaacaaggccgugaacgcccugaucaacgaccagcucaucaugaagaaccaccuccgggacaucaugggcauccccuacugcaacuacuccaaguacugcuaccugaaccacaccgucaccgggaagaccagccugccccgcugcugccugguguccaacggcagcuaccugaacgagacgcacuucuccgacgacaucgagcagcaggcggacaacaugaucaccgagcuccugcagaaggaguacaucgaccggcagggcaagaccccgcuggggcugguggaccucuucgucuucagcaccuccuucuaccugaucagcaucuuccugcaccucgugaagauccccacgcaccgccacguggucggcaagcccugccccaagccgcaccggcugaaccacauggggaucugcuccugcggccuguacaagcaccccggggugcccgugaaguggaagcgcugaggacuaguaauaaggaaacuguaugaaugucugugggcaggaagugaagagauccuucuguaaagguuuuuggaauuaugucugcugaauaauaaacuuuuuugaaauaauaaaucugguagaaaaaugagaucucaaaggcucuuuucagagccaccaaaaaaaaaaaaaaaaaaaaaaaaaaaaaaaaaaaaaaaaaaaaaaaaaaaaaaaaaaaaaaaaagaauu

SEQ ID NO: 34095 - RNA, 1778 nt, Artificial Sequence
  mRNA product Design b-4 (hSL-A64-N5) comprising derived and/or modified sequence from LASV(Lassa virus/H.sapiens-wt/NGA/2015/ISTH_0543;Clade II)__AVO03639__GPCmut8 (opt1)
aggagagucccgcagucggcguccagcggcucugcuuguucgugugugugucguugcaggccuuauucaagcuuaccaugggccagaucaucaccuucuuccaggaggugccccacgucaucgaggaggugaugaacaucgugcugaucgcccucagccugcuggccauccucaaggggaucuacaacgucgcgaccugcggccuguucgggcugguguccuuccuccugcugugcggccgcagcugcuccacgaccuacaaggggguguacgagcuccagacccuggagcuggacauggccaaccucaacaugugcaugccgcugagcugcaccaagaacaacucccaccacuacaucauggucggcaacgagacgggccuggagcucacccugaccaacaccagcaucaucaaccacaaguucugcaaccuguccgacgcccacaagaagaaccucuacgaccacgcccugaugagcaucaucuccacguuccaccugagcauccccaacuucaaccaguacgaggccauguccugcgacuucaacgggggcaagaucagcgugcaguacaaccucucccacaccuacgcgguggacgccgccaaccacugcgggaccaucgccaacggcguccugcagaccuucaugcggauggcguggggcgggagcuacaucgcccuggacuccggcaaggggagcugggacugcaucaugacguccuaccaguaccucgugauccagaacaccaccugggaggaccacugccaguucagccgccccucccccaucggcuaccuggggcugcucagccagcggacccgcgacaucuacaucagccggcgccugcugggcacguucaccuggacccucuccgacagcgagggcaacgagacccccgggggcuacugccugacgcgguggaugcugaucgaggccgagcucaagugcuucgggaacaccgccguggccaagugcaacgagaagcacgacgaggaguucugcgacaugcugcgccuguucgacuucugcaagcaggcgauccggcgccucaagaccccggcccagauguccauccagcugaucaacaaggccgucaacgcccugaucaacgaccagcucaucaugaagaaccaccuccgggacaucaugggcauccccuacugcaacuacagcaaguacugcuaccugaaccacaccgugacggggaagaccucccugccccgcugcugccuggugagcaacggcuccuaccugaacgagacccacuucagcgacgacaucgagcagcaggccgacaacaugaucaccgagcuccugcagaaggaguacaucgaccggcagggcaagacgccgcuggggcuggucgaccucuucguguucuccaccagcuucuaccugaucuccaucuuccugcaccucgugaagauccccacccaccgccacaucaccggcaagcccugccccaagccgcaccggcugaaccacauggggaucugcagcugcggccuguacaagcaccccgggguccccgugaaguggaagcgcugaggacuaguaauaaggaaacuguaugaaugucugugggcaggaagugaagagauccuucuguaaagguuuuuggaauuaugucugcugaauaauaaacuuuuuugaaauaauaaaucugguagaaaaaugagaucucaaaggcucuuuucagagccaccaaaaaaaaaaaaaaaaaaaaaaaaaaaaaaaaaaaaaaaaaaaaaaaaaaaaaaaaaaaaaaaaagaauu

SEQ ID NO: 34096 - RNA, 1778 nt, Artificial Sequence
  mRNA product Design b-4 (hSL-A64-N5) comprising derived and/or modified sequence from LASV(Lassa virus/H.sapiens-wt/NGA/2016/ISTH_0009;Clade II)__AVO03571__GPCmut8 (opt1)
aggagagucccgcagucggcguccagcggcucugcuuguucgugugugugucguugcaggccuuauucaagcuuaccaugggccagaucaucaccuucuuccaggaggugccccacgucaucgaggaggugaugaacaucgugcugaucgcccucagccugcuggccauccucaaggggaucuacaacgucgcgaccugcggccugcuggggcucguguccuuccugcugcucugcggccgcagcugcuccacgaccuacaaggggguguacgagcugcagacccuggagcucgacauggccagccugaacaugugcaugccgcuguccugcaccaagaacaacagccaccacuacaucauggucggcaacgagacgggccucgagcugacccugaccaacaccuccaucaucaaccacaaguucugcaaccucagcgacgcccacaagaagaaccuguacgaccacgcccugauguccaucaucagcacguuccaccucuccauccccaacuucaaccaguacgaggccaugagcugcgacuucaacgggggccggaucuccgugcaguacaaccugagccacuccuacgcgguggacgccgccaaccacugcgggaccaucgccaacggcguccugcagaccuucaugcgcauggcguggggcgggagcuacaucgcccucgacuccggcaaggggagcugggacugcaucaugaccuccuaccaguaccugaucauccagaacacgaccugggaggaccacugccaguucagccggcccagccccaucggcuaccuggggcuccugucccagcgcacccgggacaucuacaucagccgccggcugcucggcaccuucacguggacccuguccgacagcgagggcaacgagacccccgggggcuacugccugacccgcuggaugcucaucgaggccgagcugaagugcuucgggaacacggccguggccaagugcaacgagaagcacgacgaggaguucugcgacaugcugcggcuguucgacuucugcaagcaggcgauccgccggcugaagaccccggcccagauguccauccagcugaucaacaaggccgugaacgcccucaucaacgaccagcugaucaugaagaaccaccuccgcgacaucaugggcauccccuacugcaacuacagcaaguacugcuaccucaaccacaccgucaccgggaagacgucccugccccggugcugccuggugagcaacggcuccuaccucaacgagacccacuucagcgacgacaucgagcagcaggccgacaacaugaucaccgagcugcugcagaaggaguacaucgaccgccagggcaagaccccgcuggggcucguggaccuguucgucuucuccacgagcuucuaccugaucuccaucuuccuccaccuggugaagauccccacccaccggcacaucaccggcaagcccugccccaagccgcaccgccugaaccacauggggaucugcagcugcggccucuacaaccaccccggggugcccgucaaguggaagcggugaggacuaguaauaaggaaacuguaugaaugucugugggcaggaagugaagagauccuucuguaaagguuuuuggaauuaugucugcugaauaauaaacuuuuuugaaauaauaaaucugguagaaaaaugagaucucaaaggcucuuuucagagccaccaaaaaaaaaaaaaaaaaaaaaaaaaaaaaaaaaaaaaaaaaaaaaaaaaaaaaaaaaaaaaaaaagaauu

SEQ ID NO: 34097 - RNA, 1778 nt, Artificial Sequence
  mRNA product Design b-4 (hSL-A64-N5) comprising derived and/or modified sequence from LASV(Lassa virus/H.sapiens-wt/NGA/2016/ISTH_0017;Clade II)__AVO03567__GPCmut8 (opt1)
aggagagucccgcagucggcguccagcggcucugcuuguucgugugugugucguugcaggccuuauucaagcuuaccaugggccagaucaucaccuucuuccaggaggugccccacgucaucgaggaggugaugaacaucgugcugaucgcccucagccugcuggccauccucaaggggaucuacaacgucgcgaccugcggccuguucgggcugguguccuuccuccugcugugcggccgcagcugcuccacgaccuacaaggggguguacgagcuccagacccuggagcuggacauggccagccucaacaugugcaugccgcuguccugcaccaagaacaacagccaccacuacaucauggucggcaacgagacgggccuggagcucacccugaccaacaccuccaucaucaaccacaaguucugcaaccugagcgacgcccacaagaagaaccucuacgaccacgcccugauguccaucaucagcacguuccaccuguccauccccaacuucaaccaguacgaggccaugagcugcgacuucaacgggggcaagaucuccgugcaguacaaccucagccacaccuacgcgaucgacgccgccaaccacugcgggaccaucgccaacggcgugcugcagaccuucaugcggauggcguggggcggguccuacaucgcccuggacagcggcaagggguccugggacugcaucaugacgagcuaccaguaccucaucauccagaacaccaccugggaggaccacugccaguucucccgccccagccccaucggcuaccuggggcugcucagccagcggacccgcgacaucuacaucucccggcgccugcugggcacguucaccuggacccucagcgacuccgagggcaacgagacccccgggggcuacugccugacgcgguggaugcugaucgaggccgagcucaagugcuucgggaacaccgccgucgccaagugcaacgagaagcacgacgaggaguucugcgacaugcugcgccuguucgacuucugcaagcaggcgauccggcgccucaagaccccggcccagaugagcauccagcugaucaacaaggccgugaacgcccugaucaacgaccagcucaucaugaagaaccaccuccgggacaucaugggcauccccuacugcaacuacuccaaguacugcuaccugaaccacaccgugacggggaagaccagccugccccgcugcugccuggucuccaacggcagcuaccugaacgagacccacuucuccgacgacaucgagcagcaggccgacaacaugaucaccgagcuccugcagaaggaguacauggaccggcagggcaagacgccgcuggggcugguggaccucuucguguucagcaccuccuucuaccugaucagcaucuuccugcaccucguccgcauccccacccaccggcacgugaucggcaagcccugccccaagccgcaccgccugaaccacauggggaucugcuccugcggccuguacaagcaccccggggugcccgucaaguggaagcggugaggacuaguaauaaggaaacuguaugaaugucugugggcaggaagugaagagauccuucuguaaagguuuuuggaauuaugucugcugaauaauaaacuuuuuugaaauaauaaaucugguagaaaaaugagaucucaaaggcucuuuucagagccaccaaaaaaaaaaaaaaaaaaaaaaaaaaaaaaaaaaaaaaaaaaaaaaaaaaaaaaaaaaaaaaaaagaauu

SEQ ID NO: 34098 - RNA, 1778 nt, Artificial Sequence
  mRNA product Design b-4 (hSL-A64-N5) comprising derived and/or modified sequence from LASV(Lassa virus/H.sapiens-wt/NGA/2018/ISTH_0959;Clade II)__AVV65099__GPCmut8 (opt1)
aggagagucccgcagucggcguccagcggcucugcuuguucgugugugugucguugcaggccuuauucaagcuuaccaugggccagaucaucaccuucuuccaggaggugccccacgucaucgaggaggugaugaacaucgugcugaucgcccucagccugcuggccauccucaaggggaucuacaacgucgugaccugcggccuguucgggcugguguccuuccuccugcugugcggccgcagcugcuccacgaccuacaagggggucuacgagcuccagacccuggagcuggacauggcgagccucaacaugugcaugccgcuguccugcaccaagaacaacagccaccacuacaucauggugggcaacgagacgggccuggagcucacccugaccaacaccuccaucaucaaccacaaguucugcaaccugagcgacgcccacaagaagaaccucuacgaccacgcccugauguccaucaucagcacguuccaccuguccauccccaacuucaaccaguacgaggccaugagcugcgacuucaacgggggcaagaucuccgugcaguacaaccucagccacgccuacgcgaucgacgccgccaaccacugcgggaccaucgccaacggcguccugcagaccuucaugcggauggcguggggcggguccuacaucgcccuggacagcggcaagggguccugggacugcaucaugaccagcuaccaguaccucaucauccagaacacgaccugggaggaccacugccaguucucccgccccagccccaucggcuaccuggggcugcucagccagcggacccgcgacaucuacaucucccggcgccugcugggcaccuucacguggacccucagcgacuccgagggcaacgagacccccgggggcuacugccugacccgguggaugcugaucgaggccgagcucaagugcuucgggaacacggccguggccaagugcaacgagaagcacgacgaggaguucugcgacaugcugcgccuguucgacuucugcaagcaggcgauccggcgccucaagaccccggcccagaugagcauccagcugaucaacaaggccgugaacgcccugaucaacgaccagcucaucaugaagaaccaccuccgggacaucaugggcauccccuacugcaacuacuccaaguacugcuaccugaaccacaccgucaccgggaagacgagccugccccgcugcugccugguguccaacggcagcuaccugaacgagacccacuucuccgacgacaucgagcagcaggccgacaacaugaucaccgagcuccugcagaaggaguacaucgaccggcagggcaagaccccgcuggggcugguggaccucuucgucuucagcacguccuucuaccugaucagcaucuuccugcaccucgugaagauccccacccaccgccacgugaucggcaagcccugccccaagccgcaccggcugaaccacauggggaucugcuccugcggccuguacaagcaccccgggguccccgugaaguggaagcgcugaggacuaguaauaaggaaacuguaugaaugucugugggcaggaagugaagagauccuucuguaaagguuuuuggaauuaugucugcugaauaauaaacuuuuuugaaauaauaaaucugguagaaaaaugagaucucaaaggcucuuuucagagccaccaaaaaaaaaaaaaaaaaaaaaaaaaaaaaaaaaaaaaaaaaaaaaaaaaaaaaaaaaaaaaaaaagaauu

SEQ ID NO: 34099 - RNA, 1778 nt, Artificial Sequence
  mRNA product Design b-4 (hSL-A64-N5) comprising derived and/or modified sequence from LASV(LASV003-NIG-2008;Clade II)__AIT17580__GPCmut8 (opt1)
aggagagucccgcagucggcguccagcggcucugcuuguucgugugugugucguugcaggccuuauucaagcuuaccaugggccagaucaucaccuucuuccaggaggugccccacgucaucgaggaggugaugaacaucgugcugaucgcccucagccugcuggccauccucaaggggaucuacaacgucgcgaccugcggccuguucgggcugguguccuuccuccugcugugcggccgcagcugcuccacgaccuacaaggggguguacgagcuccagacccuggagcuggacauggccagccucaacaugugcaugccgcuguccugcaccaagaacaacagccaccacuacaucauggucggcaacgagacgggccuggagcucacccugaccaacaccuccaucaucaaccacaaguucugcaaccugagcgacgcccacaagaagaaccucuacgaccacgcccugauguccaucaucagcacguuccaccuguccauccccaacuucaaccaguacgaggccaugagcugcgacuucaacgggggcaagaucuccgugcaguacaaccucagccacaccuacgcgguggacgccgccaaccacugcgggaccaucgccaacggcguccugcagaccuucaugcggauggcguggggcggguccuacaucgcccuggacagcggcaagggguccugggacugcaucaugacgagcuaccaguaccucaucauccagaacaccaccugggaggaccacugccaguucucccgccccagccccaucggcuaccuggggcugcucagccagcggacccgcgacaucuacaucucccggcgccugcugggcacguucaccuggacccucagcgacuccgagagcaacgagaccccgggcggguacugccugacgcgguggaugcugaucgaggccgagcucaagugcuucggcaacaccgccguggccaagugcaacgagaagcacgacgaggaguucugcgacaugcugcgccuguucgacuucugcaagcaggcgauccggcgccucaaggcccccgcccagauguccauccagcugaucaacaaggccgugaacgcccugaucaacgaccagcucaucaugaagaaccaccuccgggacaucauggggauccccuacugcaacuacagcaaguacugcuaccugaaccacaccgucaccggccgcacgucccugccccggugcugccuggugagcaacggguccuaccugaacgagacccacuucagcgacgacaucgagcagcaggcggacaacaugaucaccgagcuccugcagaaggaguacauggaccgccagggcaagaccccgcugggccugguggaccucuucgucuucuccacgagcuucuaccugaucuccaucuuccugcaccucgugaagauccccacccaccggcacgugaucgggaagcccugccccaagccgcaccgccugaaccacaugggcaucugcagcugcgggcuguacaagcaccccggcguccccgugaaguggaagcggugaggacuaguaauaaggaaacuguaugaaugucugugggcaggaagugaagagauccuucuguaaagguuuuuggaauuaugucugcugaauaauaaacuuuuuugaaauaauaaaucugguagaaaaaugagaucucaaaggcucuuuucagagccaccaaaaaaaaaaaaaaaaaaaaaaaaaaaaaaaaaaaaaaaaaaaaaaaaaaaaaaaaaaaaaaaaagaauu

SEQ ID NO: 34100 - RNA, 1778 nt, Artificial Sequence
  mRNA product Design b-4 (hSL-A64-N5) comprising derived and/or modified sequence from LASV(LASV035-NIG-2009;Clade II)__AIT17588__GPCmut8 (opt1)
aggagagucccgcagucggcguccagcggcucugcuuguucgugugugugucguugcaggccuuauucaagcuuaccaugggccagaucaucaccuucuuccaggaggugccccacgucaucgaggaggugaugaacaucgugcugaucgcccucagccugcuggccauccucaaggggaucuacaacgucgcgaccugcggccuguucgggcugguguccuuccuccugcugugcggccgcagcugcuccacgaccuacaaggggguguacgagcuccagacccuggagcuggacauggccagccucaacaugugcaugccgcuguccugcaccaagaacaacagccaccacuacaucauggucggcaacgagacgggccuggagcucacccugaccaacaccuccaucaucaaccacaaguucugcaaccugagcgacgcccacaagaagaaccucuacgaccacgcccugauguccaucaucagcacguuccaccuguccauccccaacuucaaccaguacgaggccaugagcugcgacuucaacgggggcaagaucuccgugcaguacaaccucagccacgcguacgccguggacgccgccaaccacugcgggaccaucgcgaacggcguccugcagaccuucaugcggauggccuggggcggguccuacaucgcccuggacagcggcaagggguccugggacugcaucaugaccagcuaccaguaccucaucauccagaacacgaccugggaggaccacugccaguucucccgccccagccccaucggcuaccuggggcugcucagccagcggacccgcgacaucuacaucucccggcgccugcugggcaccuucacguggacccucagcgacuccgagggcaacgagacccccgggggcuacugccugacccgguggaugcugaucgaggccgagcucaagugcuucgggaacacggccguggcgaagugcaacgagaagcacgacgaggaguucugcgacaugcugcgccuguucgacuucugcaagcaggccauccggcgccucaaggccccggcccagaugagcauccagcugaucaacaaggccgugaacgcgcugaucaacgaccagcucaucaugaagaaccaccuccgggacaucaugggcauccccuacugcaacuacuccaaguacugcuaccugaaccacaccgucaccgggaagaccagccugccccgcugcugccugguguccaacggcagcuaccugaacgagacgcacuucuccgacgacaucgagcagcaggccgacaacaugaucaccgagcuccugcagaaggaguacaucgaccggcagggcaagaccccgcuggggcugguggaccucuucgucuucagcaccuccuucuaccugaucagcaucuuccugcaccucgugaagauccccacgcaccgccacgugaucggcaagcccugccccaagccgcaccggcugaaccacauggggaucugcuccugcggccuguacaagcaccccgggguccccgugaaguggaagcgcugaggacuaguaauaaggaaacuguaugaaugucugugggcaggaagugaagagauccuucuguaaagguuuuuggaauuaugucugcugaauaauaaacuuuuuugaaauaauaaaucugguagaaaaaugagaucucaaaggcucuuuucagagccaccaaaaaaaaaaaaaaaaaaaaaaaaaaaaaaaaaaaaaaaaaaaaaaaaaaaaaaaaaaaaaaaaagaauu

SEQ ID NO: 34101 - RNA, 1778 nt, Artificial Sequence
  mRNA product Design b-4 (hSL-A64-N5) comprising derived and/or modified sequence from LASV(LASV1000-NIG-2009;Clade II)__AIT17782__GPCmut8 (opt1)
aggagagucccgcagucggcguccagcggcucugcuuguucgugugugugucguugcaggccuuauucaagcuuaccaugggccagaucaucaccuucuuccaggaggugccccacgucaucgaggaggugaugaacaucgugcugaucgcccucagccugcuggccauccucaaggggaucuacaacgucgcgaccugcggccuguucgggcugguguccuuccuccugcugugcggccgcagcugcuccacgaccuacaaggggguguacgagcuccagacccuggagcuggacauggccagccucaacaugugcaugccgcuguccugcaccaagaacaacagccaccacuacaucauggucggcaacgagacgggccuggagcucacccugaccaacaccuccaucaucaaccacaaguucugcaaccugagcgacgcccacaagaagaaccucuacgaccacgcccugauguccaucaucagcacguuccaccuguccauccccaacuucaaccaguacgaggccaugagcugcgacuucaacgggggcaagaucuccgugcaguacaaccucagccacaccuacgcgguggacgccgccaaccacugcgggaccaucgccaacggcguccugcagaccuucaugcggauggcguggggcggguccuacaucgcccuggacagcggcaagggguccugggacugcaucaugacgagcuaccaguaccucaucauccagaacaccaccugggaggaccacugccaguucucccgccccagccccaucggcuaccuggggcugcucagccagcggacccgcgacaucuacaucucccggcgccugcugggcacguucaccuggacccucagcgacuccgagggcaacgagacccccgggggcuacugccugacgcgguggaugcugaucgaggccgagcucaagugcuucgggaacaccgccguggccaagugcaacgagaagcacgacgaggaguucugcgacaugcugcgccuguucgacuucugcaagcaggcgaucaagcggcucaagaccccggcccagaugagcauccagcugaucaacaaggccgugaacgcccugaucaacgaccagcucaucaugaagaaccaccuccgcgacaucaugggcauccccuacugcaacuacuccaaguacugcuaccugaaccacaccgucacggggaagaccagccugccccggugcugccugguguccaacggcagcuaccugaacgagacccacuucuccgacgacaucgagcagcaggccgacaacaugaucaccgagcuccugcagaaggaguacaucgaccgccagggcaagacgccgcuggggcugguggaccucuucgucuucagcaccuccuucuaccugaucagcaucuuccugcaccucgugaagauccccacccaccggcacguggucggcaagcccugccccaagccgcaccgccugaaccacauggggaucugcuccugcggccuguacaagcaccccggggugcccgugaaguggaagcggugaggacuaguaauaaggaaacuguaugaaugucugugggcaggaagugaagagauccuucuguaaagguuuuuggaauuaugucugcugaauaauaaacuuuuuugaaauaauaaaucugguagaaaaaugagaucucaaaggcucuuuucagagccaccaaaaaaaaaaaaaaaaaaaaaaaaaaaaaaaaaaaaaaaaaaaaaaaaaaaaaaaaaaaaaaaaagaauu

SEQ ID NO: 34102 - RNA, 1778 nt, Artificial Sequence
  mRNA product Design b-4 (hSL-A64-N5) comprising derived and/or modified sequence from LASV(LASV221-NIG-2010;Clade II)__AIT17624__GPCmut8 (opt1)
aggagagucccgcagucggcguccagcggcucugcuuguucgugugugugucguugcaggccuuauucaagcuuaccaugggccagaucaucaccuucuuccaggaggugccccacgucaucgaggaggugaugaacaucgugcugaucgcccucagccugcuggccauccucaaggggaucuacaacgucgcgaccugcggccuguucgggcugguguccuuccuccugcugugcggccgcagcugcuccacgaccuacaaggggguguacgagcuccagacccuggagcuggacauggccagccucaacaugugcaugccgcuguccugcaccaagaacaacagccaccacuacaucauggucggcaacgagacgggccuggagcucacccugaccaacaccuccaucaucaaccacaaguucugcaaccugagcgacgcccacaagaagaaccucuacgaccacgcccugauguccaucaucagcacguuccaccuguccauccccaacuucaaccaguacgaggccaugagcugcgacuucaacgggggcaagaucuccgugcaguacaaccucagccacaccuacgcgaucgacgccgccaaccacugcgggaccaucgccaacggcgugcugcagaccuucaugcggauggcguggggcggguccuacaucgcccuggacagcggcaagggguccugggacugcaucaugacgagcuaccaguaccucaucauccagaacaccaccugggaggaccacugccaguucucccgccccagccccaucggcuaccuggggcugcucagccagcggacccgcgacaucuacaucucccggcgccugcugggcacguucaccuggacccucagcgacuccgagggcaacgagacccccgggggcuacugccugacgcgguggaugcugaucgaggccgagcucaagugcuucgggaacaccgccgucgccaagugcaacgagaagcacgacgaggaguucugcgacaugcugcgccuguucgacuucugcaagcaggcgauccggcgccucaagaccccggcccagaugagcauccagcugaucaacaaggccgugaacgcccugaucaacgaccagcucaucaugaagaaccaccuccgggacaucaugggcauccccuacugcaacuacuccaaguacugcuaccugaaccacaccgugacggggaagaccagccugccccgcugcugccuggucuccaacggcagcuaccugaacgagacccacuucuccgacgacaucgagcagcaggccgacaacaugaucaccgagaugcuccagaaggaguacauggaccggcagggcaagacgccgcuggggcugguggaccuguucguguucagcaccuccuucuaccucaucagcaucuuccugcaccuggucaagauccccacccaccgccacgugaucggcaagcccugccccaagccgcaccggcucaaccacauggggaucugcuccugcggccuguacaagcaccccggggugcccgucaaguggaagcgcugaggacuaguaauaaggaaacuguaugaaugucugugggcaggaagugaagagauccuucuguaaagguuuuuggaauuaugucugcugaauaauaaacuuuuuugaaauaauaaaucugguagaaaaaugagaucucaaaggcucuuuucagagccaccaaaaaaaaaaaaaaaaaaaaaaaaaaaaaaaaaaaaaaaaaaaaaaaaaaaaaaaaaaaaaaaaagaauu

SEQ ID NO: 34103 - RNA, 1778 nt, Artificial Sequence
  mRNA product Design b-4 (hSL-A64-N5) comprising derived and/or modified sequence from LASV(LASV237-NIG-2010;Clade II)__AIT17638__GPCmut8 (opt1)
aggagagucccgcagucggcguccagcggcucugcuuguucgugugugugucguugcaggccuuauucaagcuuaccaugggccagaucaucaccuucuuccaggaggugccccacgucaucgaggaggugaugaacaucgugcugaucgcccucagccugcuggccauccucaaggggaucuacaacgucgcgaccugcggccuguucgggcugguguccuuccuccugcugugcggccgcagcugcuccacgaccuacaaggggguguacgagcuccagacccuggagcuggacauggccagccucaacaugugcaugccgcuguccugcaccaagaacaacagccaccacuacaucauggucggcaacgagacgggccuggagcucacccugaccaacaccuccaucaucaaccacaaguucugcaaccugagcgacgcccacaagaaggaccucuacgaccacgcccugauguccaucaucagcacguuccaccuguccauccccaacuucaaccaguacgaggccaugagcugcgacuucaacgggggcaagaucuccgugcaguacaaccucagccacaccuacgcgguggacgccgccaaccacugcgggaccaucgccaacggcguccugcagaccuucaugcggauggcguggggcggguccuacaucgcccuggacagcggcaagggguccugggacugcaucaugacgagcuaccaguaccucaucauccagaacaccaccugggaggaccacugccaguucucccgccccagccccaucggcuaccuggggcugcucagccagcggacccgcgacaucuacaucucccggcgccugcugggcacguucaccuggacccucagcgacuccgagggcaacgagacccccgggggcuacugccugacgcgguggaugcugaucgaggccgagcucaagugcuucgggaacaccgccguggccaagugcaacgagaagcacgacgaggaguucugcgacaugcugcgccuguucgacuucugcaagcaggcgauccggcgccucaagaccccggcccagaugagcauccagcugaucaacaaggccgugaacgcccugaucaacgaccagcucaucaugaagaaccaccuccgggacaucaugggcauccccuacugcaacuacuccaaguacugcuaccugaaccacaccgucacggggaagaccagccugccccgcugcugccugguguccaacggcagcuaccugaacgagacccacuucuccgacgacaucgagcagcaggccgacaacaugaucaccgagcuccugcagaaggaguacauggaccggcagggcaagacgccgcuggggcugguggaccucuucgucuucagcaccuccuucuaccugaucagcaucuuccugcaccucaucaagauccccacccaccgccacaucaccggcaagcccugccccaagccgcaccggcugaaccacauggggaucugcuccugcggccuguacaagcaccccggggugcccgugaaguggaagcgcugaggacuaguaauaaggaaacuguaugaaugucugugggcaggaagugaagagauccuucuguaaagguuuuuggaauuaugucugcugaauaauaaacuuuuuugaaauaauaaaucugguagaaaaaugagaucucaaaggcucuuuucagagccaccaaaaaaaaaaaaaaaaaaaaaaaaaaaaaaaaaaaaaaaaaaaaaaaaaaaaaaaaaaaaaaaaagaauu

SEQ ID NO: 34104 - RNA, 1778 nt, Artificial Sequence
  mRNA product Design b-4 (hSL-A64-N5) comprising derived and/or modified sequence from LASV(LASV253-NIG-2011;Clade II)__AIT17670__GPCmut8 (opt1)
aggagagucccgcagucggcguccagcggcucugcuuguucgugugugugucguugcaggccuuauucaagcuuaccaugggccagaucaucaccuucuuccaggaggugccccacgucaucgaggaggugaugaacaucgugcugaucgcccucagccugcuggccauccucaaggggaucuacaacgucgcgaccugcggccuguucgggcugguguccuuccuccugcugugcggccgcagcugcuccacgaccuacaaggggguguacgagcuccagacccuggagcuggacauggccagccucaacaugugcaugccgcuguccugcaccaagaacaacagccaccacuacaucauggucggcaacgagacgggccuggagcucacccugaccaacaccuccaucaucaaccacaaguucugcaaccugagcgacgcccacaagaagaaccucuacgaccacgcccugauguccaucaucagcacguuccaccuguccauccccaacuucaaccaguacgaggccaugagcugcgacuucaacgggggcaagaucuccgugcaguacaaccucagccacaccuacgcgguggacgccgccaaccacugcgggaccaucgccaacggcguccugcagaccuucaugcggauggcguggggcggguccuacaucgcccuggacagcggcaagggguccugggacugcaucaugacgagcuaccaguaccucaucauccagaacaccaccugggaggaccacugccaguucucccgccccagccccaucggcuaccuggggcugcucagccagcggacccgcgacaucuacaucucccggcgccugcugggcacguucaccuggacccucagcgacuccgagggcaacgagacccccgggggcuacugccugacgcgguggaugcugaucgaggccgagcucaagugcuucgggaacaccgccguggccaagugcaacgagaagcacgacgaggaguucugcgacaugcugcgccuguucgacuucugcaagcaggcgauccggcgccucaaggccccggcccagaugagcauccagcugaucaacaaggccgugaacgcccugaucaacgaccagcucaucaugaagaaccaccuccgggacaucaugggcauccccuacugcaacuacuccaaguacugcuaccugaaccacaccgucaccgggcgcacgagccugccccggugcugccugguguccaacggcagcuaccugaacgagacccacuucuccgacgacaucgagcagcaggcggacaacaugaucaccgagcuccugcagaaggaguacaucgaccgccagggcaagaccccgcuggggcugguggaccucuucgucuucagcacguccuucuaccugaucagcaucuuccugcaccucgugaagauccccacccaccggcacaucaucggcaagcccugccccaagccgcaccgccugaaccacauggggaucugcuccugcggccuguacaagcaccccggggugcccgucaaguggaagcggugaggacuaguaauaaggaaacuguaugaaugucugugggcaggaagugaagagauccuucuguaaagguuuuuggaauuaugucugcugaauaauaaacuuuuuugaaauaauaaaucugguagaaaaaugagaucucaaaggcucuuuucagagccaccaaaaaaaaaaaaaaaaaaaaaaaaaaaaaaaaaaaaaaaaaaaaaaaaaaaaaaaaaaaaaaaaagaauu

SEQ ID NO: 34105 - RNA, 1778 nt, Artificial Sequence
  mRNA product Design b-4 (hSL-A64-N5) comprising derived and/or modified sequence from LASV(LASV254-NIG-2011;Clade II)__AIT17674__GPCmut8 (opt1)
aggagagucccgcagucggcguccagcggcucugcuuguucgugugugugucguugcaggccuuauucaagcuuaccaugggccagaucaucaccuucuuccaggaggugccccacgucaucgaggaggugaugaacaucgugcugaucgcccucagccugcuggccauccucaaggggaucuacaacgucgcgaccugcggccuguucgggcugguguccuuccuccugcugugcggccgcagcugcuccacgaccuacaaggggguguacgagcuccagacccuggagcuggacaugaccaaccucaacaugugcaugccgcugagcugcacgaagaacaacucccaccacuacaucauggucggcaacgagaccggccuggagcucacccugaccaacacgagcaucaucaaccacaaguucugcaaccuguccgacgcccacaagaagaaccucuacaaccacgcccugaugagcaucaucuccaccuuccaccugagcauccccaacuucaaccaguacgaggccauguccugcgacuucaacgggggcaagaucagcgugcaguacaaccucucccacagcuacgccguggacgcggccaaccacugcgggaccaucgccaacggcguccugcagaccuucaugcggauggccuggggcggguccuacaucgcgcuggacagcggcaaggggaacugggacugcaucaugacguccuaccaguaccucaucauccagaacaccaccugggaggaccacugccaguucagccgccccucccccaucggcuaccuggggcugcucagccagcggacccgcgacaucuacaucagccggcgccugcugggcacguucaccuggacccucuccgacagcgagggcaacgagacccccgggggcuacugccugacgcgguggaugcugaucgaggccgagcucaagugcuucgggaacaccgccguggccaagugcaacgagaagcacgacgaggaguucugcgacaugcugcgccuguucgacuucugcaagcaggccauccggcgccucaagaccccggcgcaggccaacauccagcugaucaacaaggccgugaacgcccugaucaacgaccagcucaucaugaagaaccaccuccgggacaucaugggcauccccuacugcaacuacuccaaguacugcuaccugaaccacaccgucacggggaagaccagccugccccgcugcugccugguguccaacggcagcuaccugaacgagacccacuucuccgacgacaucgagcagcaggccgacaacaugaucaccgagcuccugcagaaggaguacauggaccggcagggcaagacgccgcuggggcugguggaccucuucgucuucagcaccuccuucuaccugaucagcaucuuccugcaccucgugaagauccccacccaccgccacgugaucggcaagcccugccccaagccgcaccggcugaaccacauggggaucugcuccugcggccuguacaagcaccccgggguccccgugaaguggaagcgcugaggacuaguaauaaggaaacuguaugaaugucugugggcaggaagugaagagauccuucuguaaagguuuuuggaauuaugucugcugaauaauaaacuuuuuugaaauaauaaaucugguagaaaaaugagaucucaaaggcucuuuucagagccaccaaaaaaaaaaaaaaaaaaaaaaaaaaaaaaaaaaaaaaaaaaaaaaaaaaaaaaaaaaaaaaaaagaauu

SEQ ID NO: 34106 - RNA, 1778 nt, Artificial Sequence
  mRNA product Design b-4 (hSL-A64-N5) comprising derived and/or modified sequence from LASV(Nig08-A19;Clade III)__ADU56618__GPCmut8 (opt1)
aggagagucccgcagucggcguccagcggcucugcuuguucgugugugugucguugcaggccuuauucaagcuuaccaugggccagaucgugaccuucuuccaggaggucccccacgugaucgaggaggugaugaacaucguccugaucgcccucagcauccuggccauccugaaggggcucuacaacaucgcgaccugcggccugaucgggcuggugacguuccuccugcuguccggccgcagcugcuccaugaccuacaaggggguguacgagcuccagacccuggagcugaacaugaacacccucaacaugugcaugccgcugagcugcacgaagaacaacucccaccacuacaucauggucggcaacgagaccggccuggagcucacccugaccaacacgagccugcuccaccacaaguucugcaaccuguccgacgcccacaagaagaaccuguacgaccacacccucaugagcaucaucuccaccuuccaccugagcauccccaacuucaaccaguacgaggccauguccugcgacuucaacgggggcaagaucaccgugcaguacaaccugagccacuccuacgccaucgacgccgcgaaccacugcgggacgguggccaacggcguccuccagaccuucaugcggauggccuggggcgggagcuacaucgcccuggacuccggccgcgggaagugggacugcaucaugaccagcuaccaguaccugaucauccagaacaccacgugggaggaccacugccaguucucccggcccagccccaucggcuaccucgggcugcugucccagcgcacccgggacaucuacaucagccgccggcuccugggcaccuucaccuggacgcugagcgacuccgagggcaacgagacccccgggggcuacugccucacccgcuggaugcugaucgaggcggagcugaagugcuucgggaacaccgccguggccaagugcaacgagaagcacgacgaggaguucugcgacaugcuccggcuguucgacuucugcaagcaggccauccgccggcugaaggccccggcgcagaugagcauccagcucaucaacaaggccgugaacgcccugaucaacgaccagcugaucaugaagaaccaccuccgcgacaucaugggcauccccuacugcaacuacuccaaguacugcuaccugaaccacacgagcaccgggcggaccucccugccccgcugcugccucgucagcaacggcuccuaccugaacgagacccacuucagcgacgacaucgagcagcaggccgacaacaugaucacggagaugcugcagaaggaguaccuggaccggcagggcaagaccccgcucgggcugguggaccuguucguguucuccaccagcuucuaccucaucuccaucuuccugcaccuggucaagauccccacccaccgccacaucgugggcaagcccugccccaagccgcaccggcucaaccacauggggaucugcagcugcggccuguacaagcagcccggggugcccguccgcuggaagcggugaggacuaguaauaaggaaacuguaugaaugucugugggcaggaagugaagagauccuucuguaaagguuuuuggaauuaugucugcugaauaauaaacuuuuuugaaauaauaaaucugguagaaaaaugagaucucaaaggcucuuuucagagccaccaaaaaaaaaaaaaaaaaaaaaaaaaaaaaaaaaaaaaaaaaaaaaaaaaaaaaaaaaaaaaaaaagaauu

SEQ ID NO: 34107 - RNA, 1781 nt, Artificial Sequence
  mRNA product Design b-4 (hSL-A64-N5) comprising derived and/or modified sequence from LASV(G1180-SLE-2010;Clade IV)__AIT17168__GPCmut8 (opt1)
aggagagucccgcagucggcguccagcggcucugcuuguucgugugugugucguugcaggccuuauucaagcuuaccaugggccagaucgugaccuucuuccaggaggucccccacgugaucgaggaggugaugaacaucguccugaucgcccucagcauccuggccgugcugaaggggcucuacaacuucgcgaccugcggccugguggggcugcucacguuccugcugcucugcggccgcuccugcaccgccagccgguacaagggggucuacgagcugcagacccuggagcucaacauggagacccugaacaugugcaugccgcuguccugcacgaagaacaacagccaccacuacaucauggugggcaacgagaccggccucgagcugacccugaccaacacguccaucaucaaccacaaguucugcaaccucagcgacgcccacaagaagaaccuguacgaccacgcccugauguccaucaucagcaccuuccaccucuccauccccaacuucaaccaguacgaggccaugagcugcgacuucaacgggggcaagaucuccgugcaguacaaccugagccacuccuacgcgggggacgccgccaaccacugcggcaccgucgccaacggggugcugcagaccuucaugcgcauggcguggggcggcagcuacaucgcccucgacuccgggcacggcagcugggacugcaucaugacguccuaccaguaccugaucauccagaacaccaccugggaggaccacugccaguucagccggcccucccccaucggguaccugggccuccugagccagcgcacccgggacaucuacaucagccgccggcugcucggcacguucaccuggacccuguccgacagcgaggggaaggacaccccgggcggguacugccugacgcgcuggaugcucaucgaggccgagcugaagugcuucggcaacaccgccguggccaagugcaacgagaagcacgacgaggaguucugcgacaugcugcggcuguucgacuucugcaagcaggcgauccagcgccugaaggcccccgcccagauguccauccagcugaucaacaaggccgucaacgcccucaucaacgaccagcugaucaugaagaaccaccuccgggacaucauggggauccccuacugcaacuacagcaaguacugcuaccucaaccacaccaccacgggcaagaccucccugcccaagugcugccuggugagcaacggcuccuaccucaacgagacccacuucagcgacgacaucgagcagcaggcggacaacaugaucaccgagaugcugcagaaggaguacauggagcgccaggggaagacgccgcugggccugguggaccucuucgucuucuccaccagcuucuaccugaucuccaucuuccugcaccucgugaagauccccacccaccggcacaucgugggcaagagcugccccaagccccaccgccugaaccacauggggaucugcuccugcgggcuguacaagcagccgggcguccccgugaaguggaagcggugaggacuaguaauaaggaaacuguaugaaugucugugggcaggaagugaagagauccuucuguaaagguuuuuggaauuaugucugcugaauaauaaacuuuuuugaaauaauaaaucugguagaaaaaugagaucucaaaggcucuuuucagagccaccaaaaaaaaaaaaaaaaaaaaaaaaaaaaaaaaaaaaaaaaaaaaaaaaaaaaaaaaaaaaaaaaagaauu

SEQ ID NO: 34108 - RNA, 1781 nt, Artificial Sequence
  mRNA product Design b-4 (hSL-A64-N5) comprising derived and/or modified sequence from LASV(G1442-SLE-2011;Clade IV)__AIT17180__GPCmut8 (opt1)
aggagagucccgcagucggcguccagcggcucugcuuguucgugugugugucguugcaggccuuauucaagcuuaccaugggccagaucgugaccuucuuccaggaggucccccacgugaucgaggaggugaugaacaucguccugaucgcccucagcauccuggccgugcugaaggggcucuacaacguggcgaccugcggccugaucgggcuggucacguuccuccugcugugcggccgcuccugcaccaccacccucuacaaggggguguacgagcugcagacgcuggagcucaacauggagacccugaacaugugcaugccgcugagcugcaccaagaacaacucccaccacuacauccgggugggcaacgagaccggccucgagcugacgcugaccaacaccagcaucaucaaccacaaguucugcaaccucuccgacgcccacaagaagaaccuguacgaccacgcccugaugagcaucaucuccaccuuccaccucagcauccccaacuucaaccaguacgaggccauguccugcgacuucaacgggggcaagaucagcguccaguacaaccugucccacagcuacgccggggacgcggccaaccacugcggcacgguggccaacggggugcugcagaccuucaugcgcauggccuggggcggcuccuacaucgcgcucgacagcgggcggggcaacugggacugcaucaugaccuccuaccaguaccugaucauccagaacaccacgugggacgaccacugccaguucagccgccccucccccaucggguaccugggccuccugagccagcggacccgcgacgucuacaucucccggcgccugcucggcaccuucaccuggacgcugagcgacagcgaggggaaggacaccccgggcggguacugccugacccgguggaugcucaucgaggccgagcugaagugcuucggcaacaccgccguggccaagugcaacgagaagcacgacgaggaguucugcgacaugcugcgccucuucgacuucugcaagcaggccauccagcggcugaaggcgcccgcccagauguccauccagcugaucaacaaggccgugaacgcccucaucaacgaccagcugaucaugaagaaccaccuccgcgacaucauggggauccccuacugcaacuacagcaaguacugcuaccugaacaacacggccaccggcaagaccucccugcccaagugcugccugaucagcaacggcuccuaccucaacgagacccacuucagcgacgacaucgagcaggaggcggacaacaugaucacggagaugcugcagaaggaguacauggagcggcaggggaagaccccgcugggccuggucgaccucuucguguucuccaccagcuucuaccugaucuccaucuuccugcaccucgugaagauccccacccaccgccacaucgucggcaagagcugccccaagccccaccggcugaaccacauggggaucugcuccugcgggcuguacaagcagccgggcgugcccgugcgcuggaagcggugaggacuaguaauaaggaaacuguaugaaugucugugggcaggaagugaagagauccuucuguaaagguuuuuggaauuaugucugcugaauaauaaacuuuuuugaaauaauaaaucugguagaaaaaugagaucucaaaggcucuuuucagagccaccaaaaaaaaaaaaaaaaaaaaaaaaaaaaaaaaaaaaaaaaaaaaaaaaaaaaaaaaaaaaaaaaagaauu

SEQ ID NO: 34109 - RNA, 1781 nt, Artificial Sequence
  mRNA product Design b-4 (hSL-A64-N5) comprising derived and/or modified sequence from LASV(G3010-SLE-2013;Clade IV)__AIT17344__GPCmut8 (opt1)
aggagagucccgcagucggcguccagcggcucugcuuguucgugugugugucguugcaggccuuauucaagcuuaccaugggccagaucgugaccuucuuccaggaggucccccacgugaucgaggaggugaugaacaucguccugaucgcccucagcauccuggccgugcugaaggggcucuacaacuucgcgaccugcggccugguggggcuggucacguuccuccugcugugcggccgcuccugcaccaccagccucuacaaggggguguacgagcugcagacccuggagcucaacauggagacgcugaacaugugcaugccgcuguccugcaccaagaacaacagccaccacuacaucauggugggcaacgagaccggccucgagcugacccugacgaacaccuccaucaucaaccacaaguucugcaaccucagcgacgcccacaagaagaaccuguacaaccacgcccugauguccaucaucagcaccuuccaccucuccauccccaacuucaaccaguacgaggccaugagcugcgacuucaacgggggcaagaucuccguccaguacaaccugagccacuccuacgccggggacgcggccagccacugcggcaccguggccaacggggugcugcagacguucaugcggauggccuggggcggcuccuacaucgcgcucgacagcggguacggcaagugggacugcaucaugaccuccuaccaguaccugaucauccagaacaccaccugggaggaccacugccaguucagccgccccucccccaucggguaccugggccuccugagccagcggacgcgcgacaucuacaucagccggcgccugcucggcaccuucaccuggacccuguccgacagcgaggggaaggacacgccgggcggguacugccugacccgguggaugcucaucgaggccgagcugaagugcuucggcaacaccgccgucgccaagugcaacgagaagcacgacgaggaguucugcgacaugcugcgccucuucgacuucugcaagcaggccauccagcggcugaagacccccgcgcagauguccauccagcugaucaacaaggccgugaacgcccucaucaacgaccagcugaucaugaagaaccaccuccgcgacaucauggggauccccuacugcaacuacagcaaguacugcuaccugaaccacacgaccaccggcaagaccucccugcccaagugcugccuggugagcaacggcuccuaccucaacgagacgcacuucagcgacgacaucgagcagcaggccgacaacaugaucaccgagaugcugcagaaggaguacauggagcggcaggggaagaccccgcugggccuggucgaccucuucguguucuccaccagcuucuaccugaucuccaucuuccugcaccucgugaagauccccacgcaccgccacaucgucggcaagagcugccccaagccccaccggcugaaccacauggggaucugcuccugcgggcuguacaagcagccgggcgugcccgugcgcuggaagcggugaggacuaguaauaaggaaacuguaugaaugucugugggcaggaagugaagagauccuucuguaaagguuuuuggaauuaugucugcugaauaauaaacuuuuuugaaauaauaaaucugguagaaaaaugagaucucaaaggcucuuuucagagccaccaaaaaaaaaaaaaaaaaaaaaaaaaaaaaaaaaaaaaaaaaaaaaaaaaaaaaaaaaaaaaaaaagaauu

SEQ ID NO: 34110 - RNA, 1781 nt, Artificial Sequence
  mRNA product Design b-4 (hSL-A64-N5) comprising derived and/or modified sequence from LASV(G502-SLE-2009;Clade IV)__AIT17126__GPCmut8 (opt1)
aggagagucccgcagucggcguccagcggcucugcuuguucgugugugugucguugcaggccuuauucaagcuuaccaugggccagaucgugaccuucuuccaggaggucccccacgugaucgaggaggugaugaacaucguccugaucgcccucagcauccuggccgugcugaaggggcucuacaacuucgcgaccugcggccugguggggcugcucacguuccugcugcucugcggccgcuccugcaccaccgggcuguacaagggcgucuacgagcugcagacccucgagcugaacauggagacgcugaacaugugcaugccgcucagcugcaccaagaacaacucccaccacuacaucauggugggcaacgagaccgggcuggagcugacccucacgaacaccagcaucaucaaccacaaguucugcaaccuguccgacgcccacaagaagaaccuguacgaccacgcccucaugagcaucaucuccaccuuccaccugagcauccccaacuucaaccaguacgaggccauguccugcgacuucaacggcgggaagaucagcgugcaguacaaccugucccacagcuacgccggcgacgcggccgaccacugcgggaccgucgccaacggcgugcuccagacguucaugcggauggccuggggcggguccuacaucgcgcuggacagcggccgcgggcggugggacugcaucaugaccuccuaccaguaccugaucauccagaacaccaccugggaggaccacugccaguucagccgccccucccccaucggcuaccucggccugcugagccagcggacgcgcgacaucuacaucucccggcgccuccuggggaccuucaccuggacccugagcgacagcgagggcaaggacacgcccgggggcuacugccucacccgguggaugcugaucgaggccgagcugaagugcuucgggaacaccgccguggccaagugcaacgagaagcacgacgaggaguucugcgacaugcuccgccuguucgacuucugcaagcaggccauccagcggcugaaggcgccggcccagauguccauccagcucaucaacaaggccgucaacgcccugaucaacgaccagcuggugaugaagaaccaccuccgcgacaucaugggcauccccuacugcaacuacagccgguacugcuaccugaaccacaccacgaccggccgcaccucccugcccaagugcugccucgugagcaacggguccuaccugaacgagacccacuucagcgacgacaucgagcagcaggccgacaacaugaucacggagaugcugcagaaggaguacauggagcggcagggcaagaccccgcuggggcucgucgaccuguucguguucuccaccagcuucuaccugaucuccaucuuccuccaccuggugaagauccccacccaccgccacaucgucggcaagagcugccccaagccccaccggcugaaccacauggggaucugcuccugcggccucuacaagcagccgggcgugcccgugaaguggaagcgcugaggacuaguaauaaggaaacuguaugaaugucugugggcaggaagugaagagauccuucuguaaagguuuuuggaauuaugucugcugaauaauaaacuuuuuugaaauaauaaaucugguagaaaaaugagaucucaaaggcucuuuucagagccaccaaaaaaaaaaaaaaaaaaaaaaaaaaaaaaaaaaaaaaaaaaaaaaaaaaaaaaaaaaaaaaaaagaauu

SEQ ID NO: 34111 - RNA, 1781 nt, Artificial Sequence
  mRNA product Design b-4 (hSL-A64-N5) comprising derived and/or modified sequence from LASV(G733-SLE-2010;Clade IV)__AIT17154__GPCmut8 (opt1)
aggagagucccgcagucggcguccagcggcucugcuuguucgugugugugucguugcaggccuuauucaagcuuaccaugggccagaucgugaccuucuuccaggaggucccccacgugaucgaggaggugaugaacaucguccugaucgcccucagcauccuggccgugcugaaggggcucuacaacuucgcgaccugcggcaucguggggcuggucuccuuccugcuccugugcggccgcagcugcacgaccucccuguacaaggggguguacgagcuccagacccuggagcugaacauggagacccucaacaugugcaugccgcugagcugcacgaagaacaacucccaccacuacaucauggugggcaacgagaccggccuggagcucacccugaccaacacgagcaucaucaaccacaaguucugcaaccuguccgacgcccacaagaagaaccucuacgaccacgcccugaugagcaucaucuccaccuuccaccugagcauccccaacuucaaccaguacgaggccauguccugcgacuucaacgggggcaagaucagcguccaguacaaccucucccacagcuacgccggggacgcggccaaccacugcggcaccaucgccaacggggugcugcagaccuucaugcggauggccuggggcggcuccuacaucgcgcuggacagcgggcgcgaccggugggacugcaucaugacguccuaccaguaccucaucauccagaacaccaccugggaggaccacugccaguucagccgccccucccccaucggcuaccuggggcugcucagccagcggacccgcgacaucuacaucagccggcgccugcugggcacguucaccuggacccucuccgacagcgagggcaaggacacccccgggggcuacugccugacgcgguggaugcugaucgaggccgagcucaagugcuucgggaacaccgccguggccaagugcaacgagaagcacgacgaggaguucugcgacaugcugcgccuguucgacuucugcaagcaggccauccagcggcucaaggcgccggcccagauguccauccagcugaucaacaaggccgucaacgcccugaucaacgaccagcucaucaugaagaaccaccuccgcgacaucaugggcauccccuacugcaacuacagcaaguacugcuaccugaaccacaccaccacggggaagaccucccugcccaagugcugccuggugagcaacggcuccuaccugaacgagacccacuucagcgacgacaucgagcagcaggccgacaacaugaucaccgagaugcuccagaaggaguacauggagcggcagggcaagacgccgcuggggcugguggaccuguucgucuucuccaccagcuucuaccucaucuccaucuuccugcaccuggugaagauccccacccaccgccacguggucggcaagagcugccccaagccccaccggcucaaccacauggggaucugcuccugcggccuguacgggcagccgggcgugcccgugaaguggaagcgcugaggacuaguaauaaggaaacuguaugaaugucugugggcaggaagugaagagauccuucuguaaagguuuuuggaauuaugucugcugaauaauaaacuuuuuugaaauaauaaaucugguagaaaaaugagaucucaaaggcucuuuucagagccaccaaaaaaaaaaaaaaaaaaaaaaaaaaaaaaaaaaaaaaaaaaaaaaaaaaaaaaaaaaaaaaaaagaauu

SEQ ID NO: 34112 - RNA, 1781 nt, Artificial Sequence
  mRNA product Design b-4 (hSL-A64-N5) comprising derived and/or modified sequence from MOPV/LASV reassortant(IGS-1;Clade IV)__AFY05576__GPCmut8 (opt1)
aggagagucccgcagucggcguccagcggcucugcuuguucgugugugugucguugcaggccuuauucaagcuuaccaugggccagaucgugaccuucuuccaggaggucccccacgugaucgaggaggugaugaacaucguccugaucgcccucagcgugcuggccgugcugaaggggcucuacaacuucgcgaccugcggccuggucgggcuggugacguuccuccugcugugcggccgcuccugcaccaccagccucuacaaggggguguacgagcugcagacccuggagcucaacauggagacgcugaacaugugcaugccgcuguccugcaccaagaacaacagccaccacuacaucauggucggcaacgagaccggccucgagcugacccugacgaacaccuccaucaucaaccacaaguucugcaaccucagcgacgcccacaagaagaaccuguacgaccacgcccugauguccaucaucagcaccuuccaccucuccauccccaacuucaaccaguacgaggccaugagcugcgacuucaacgggggcaagaucuccgugcaguacaaccugagccacuccuacgccggggacgcggccaaccacugcggcaccguggccaacgggguccugcagacguucaugcggauggccuggggcggcagcuacaucgcgcucgacuccgggcgcggcaacugggacugcaucaugaccagcuaccaguaccugaucauccagaacaccaccugggaggaccacugccaguucucccggcccagccccaucggguaccugggccuccugucccagcgcacgcgggacaucuacaucagccgccggcugcucggcaccuucaccuggacccugagcgacuccgagggggaggacacgccgggcggguacugccugacccgcuggaugcucaucgaggccgagcugaagugcuucggcaacaccgccguggccaagugcaacgagaagcacgacgaggaguucugcgacaugcugcggcuguucgacuucugcaagcaggccauccagcgccugaaggcgcccgcccagaugagcauccagcugaucaacaaggccgugaacgcccucaucaacgaccagcugaucaugaagaaccaccuccgggacaucauggggauccccuacugcaacuacuccaaguacugcuaccucaaccacaccacgaccggccgcaccagccugcccaagugcugccuggucuccaacggcagcuaccucaacgagacccacuucuccgacgacaucgagcagcaggccgacaacaugaucacggagaugcugcagaaggaguacauggagcggcaggggaagaccccgcugggccugguggaccucuucguguucagcaccuccuucuaccugaucagcaucuuccugcaccucgucaagauccccacccaccgccacaucguggggaaguccugccccaagccccaccggcugaaccacaugggcaucugcagcugcgggcuguacaagcagccgggcgugcccgucaaguggaagcgcugaggacuaguaauaaggaaacuguaugaaugucugugggcaggaagugaagagauccuucuguaaagguuuuuggaauuaugucugcugaauaauaaacuuuuuugaaauaauaaaucugguagaaaaaugagaucucaaaggcucuuuucagagccaccaaaaaaaaaaaaaaaaaaaaaaaaaaaaaaaaaaaaaaaaaaaaaaaaaaaaaaaaaaaaaaaaagaauu

SEQ ID NO: 34113 - RNA, 1781 nt, Artificial Sequence
  mRNA product Design b-4 (hSL-A64-N5) comprising derived and/or modified sequence from LASV(LM765-SLE-2012;Clade IV)__AIT17814__GPCmut8 (opt1)
aggagagucccgcagucggcguccagcggcucugcuuguucgugugugugucguugcaggccuuauucaagcuuaccaugggccagaucgugaccuucuuccaggaggucccccacgugaucgaggaggugaugaacaucguccugaucgcccucagcauccuggccgugcugaaggggcucuacaacuucgcgaccugcggccugguggggcuggucacguuccuccugcugugcggccgcuccugcaccaccagccucuacaaggggguguacgagcugcagacccuggagcucaacauggagacgcugaacaugugcaugccgcuguccugcaccaagaacaacagccaccacuacaucauggugggcaacgagaccggccucgagcugacccugacgaacaccuccaucaucgaccacaaguucugcaaccucagcgacgcccaccggaagaaccuguacgaccacgcccugauguccaucaucagcaccuuccaccucuccauccccaacuucaaccaguacgaggccaugagcugcgacuucaacgggggcaagaucuccguccaguacaaccugagccacuccuacgccaaggacgcggccgaccacugcgggaccguggccaacggcgugcugcagacguucaugcgcauggccuggggcgggagcuacaucgcgcucgacuccggccgggggcgcugggacugcaucaugaccagcuaccaguaccugaucauccagaacaccaccugggaggaccacugccaguucucccggcccagccccaucggcuaccuggggcuccugucccagcgcacgcgggacaucuacaucagccgccggcugcucggcaccuucaccuggacccugagcgacuccgagggcaaggacacgcccgggggcuacugccugacccgcuggaugcucaucgaggccgagcugaagugcuucgggaacaccgccgucgccaagugcaacgagaagcacgacgaggaguucugcgacaugcugcggcuguucgacuucugcaagcaggccauccagcgccugaaggcgccggcccagaugagcauccagcugaucaacaaggccgugaacgcccucaucaacgaccagcugaucaugaagaaccaccuccgggacaucaugggcauccccuacugcaacuacuccaaguacugcuaccucaaccacaccacgaccgggaagaccagccugcccaagugcugccugguguccaacggcagcuaccucaacgagacccacuucuccgacgacaucgagcagcaggccgacaacaugaucacggagaugcugcagaaggaguacauggagcgccagggcaagaccccgcuggggcuggucgaccucuucguguucagcaccuccuucuaccugaucagcaucuuccugcaccucgugaagauccccacccaccggcacaucgucggcaagcccugccccaagccgcaccgccugaaccacauggggaucugcuccugcggccuguacaagcagcccggggugcccgugaaguggaagcggugaggacuaguaauaaggaaacuguaugaaugucugugggcaggaagugaagagauccuucuguaaagguuuuuggaauuaugucugcugaauaauaaacuuuuuugaaauaauaaaucugguagaaaaaugagaucucaaaggcucuuuucagagccaccaaaaaaaaaaaaaaaaaaaaaaaaaaaaaaaaaaaaaaaaaaaaaaaaaaaaaaaaaaaaaaaaagaauu

SEQ ID NO: 34114 - RNA, 1781 nt, Artificial Sequence
  mRNA product Design b-4 (hSL-A64-N5) comprising derived and/or modified sequence from LASV(LM776-SLE-2012;Clade IV)__AIT17824__GPCmut8 (opt1)
aggagagucccgcagucggcguccagcggcucugcuuguucgugugugugucguugcaggccuuauucaagcuuaccaugggccagaucgugaccuucuuccaggaggucccccacgugaucgaggaggugaugaacaucguccugaucgcccucagcauccuggccgugcugaaggggcucuacaacuucgcgaccugcggccugguggggcuggucacguuccuccugcugugcggccgcuccugcaccaccagcguguacaaggggguguacgagcuccagacccuggagcugaacauggagacgcucaacaugugcaugccgcuguccugcaccaagaacaacagccaccacuacaucauggucggcaacgagaccggccuggagcucacccugacgaacaccuccaucaucaaccacaaguucugcaaccugagcgacgcccacaagaagaaccucuacgaccacgcccugauguccaucaucagcaccuuccaccuguccauccccaacuucaaccaguacgaggccaugagcugcgacuucaacgggggcaagaucuccgugcaguacaaccucagccacuccuacgccggggacgcggccaaccacugcggcaccguggccaacgggguccugcagacguucaugcggauggccuggggcggcagcuacaucgcgcuggacuccgggcacggcaagugggacugcaucaugaccagcuaccaguaccucaucauccagaacaccaccugggaggaccacugccaguucucccgccccagccccaucggguaccugggccugcucucccagcggacgcgcgacaucuacaucagccggcgccugcugggcaccuucaccuggacccucagcgacuccgaggggaaggacacgccgggcggguacugccugacccgguggaugcugaucgaggccgagcucaagugcuucggcaacaccgccguggccaagugcaacgagaagcacgacgaggaguucugcgacaugcugcgccuguucgacuucugcaagcaggccauccagcggcucaaggcgcccgcccagaugagcauccagcugaucaacaaggccgugaacgcccugaucaacgaccagcucaucaugaagaaccaccuccgcgacaucauggggauccccuacugcaacuacuccaaguacugcuaccugaaccacaccacgaccggcaagaccagccugcccaagugcugccuggucuccaacggcagcuaccugaacgagacccacuucuccgacgacaucgagcagcaggccgacaacaugaucacggagaugcuccagaaggaguacauggagcggcaggggaagaccccgcugggccugguggaccuguucguguucagcaccuccuucuaccucaucagcaucuuccugcaccuggucaagauccccacccaccgccacaucguggggaaguccugccccaagccccaccggcucaaccacaugggcaucugcagcugcgggcuguacaagcagccgggcgugcccguccgcuggaagcggugaggacuaguaauaaggaaacuguaugaaugucugugggcaggaagugaagagauccuucuguaaagguuuuuggaauuaugucugcugaauaauaaacuuuuuugaaauaauaaaucugguagaaaaaugagaucucaaaggcucuuuucagagccaccaaaaaaaaaaaaaaaaaaaaaaaaaaaaaaaaaaaaaaaaaaaaaaaaaaaaaaaaaaaaaaaaagaauu

SEQ ID NO: 34115 - RNA, 1781 nt, Artificial Sequence
  mRNA product Design b-4 (hSL-A64-N5) comprising derived and/or modified sequence from LASV(Mad39;Clade IV)__ANH09722__GPCmut8 (opt1)
aggagagucccgcagucggcguccagcggcucugcuuguucgugugugugucguugcaggccuuauucaagcuuaccaugggccagaucgugaccuucuuccaggaggucccccacgugaucgaggaggugaugaacaucguccugaucgcccucagcauccuggccgugcugaaggggcucuacaacguggcgaccugcggccugaucgggcuggucacguuccuccugcugugcggccgcuccugcaccaccacccucuacaaggggguguacgagcugcaggcccuggagcucaacauggagacgcugaacaugugcaugccgcugagcugcaccaagaacaacucccaccacuacauccgggugggcaacgagaccggccucgagcugacccugacgaacaccagccucaucaaccacaaguucugcaaccuguccgacgcccacaagaagaaccuguacgaccacgcccucaugagcaucaucuccaccuuccaccugagcauccccaacuucaaccaguacgaggccauguccugcgacuucaacgacgggaagaucagcguccaguacaaccugucccacaccuacgcgggcgacacggccaaccacugcgggaccguggccaacggcgugcuccagaccuucaugcgcauggccuggggcgggagcuacaucgcgcuggacuccggccgcgggggcugggacugcaucaugaccagcuaccaguaccugaucauccagaacacgaccugggaggaccacugccaguucucccggcccagccccaucggguaccucggccugcugucccagcggacccgcgacaucuacaucagccggcgccuccugggcaccuucacguggacccuguccgacagcgaggggaaggacaccccgggcggguacugccucacccgguggaugcugaucgaggccgagcugaagugcuucggcaacacggccgucgccaagugcaacgagaagcacgacgaggaguucugcgacaugcuccgccuguucgacuucugcaagcaggccauccagcggcugaaggcgcccgcccagaugagcauccagcucaucaacaaggccgugaacgcccugaucaacgaccagcugaucaugaagaaccaccuccgcgacaucauggggauccccuacugcaacuacuccaaguacugcuaccugaaccacaccgugaccggcaagaccagccugcccaagugcugccucgucuccaacggcagcuaccugaacgagacgcacuucuccgacgacaucgagcagcaggccgacaacaugaucaccgagaugcugcagaaggaguacauggagcggcaggggaagaccccgcugggccucguggaccuguucguguucagcaccuccuucuaccugaucagcaucuuccuccaccuggucaagauccccacgcaccgccacgugguggggaagcccugccccaagccgcaccggcugaaccacaugggcaucugcuccugcggguucuacaagcagcccggcguccccgugcgcuggaagcggugaggacuaguaauaaggaaacuguaugaaugucugugggcaggaagugaagagauccuucuguaaagguuuuuggaauuaugucugcugaauaauaaacuuuuuugaaauaauaaaucugguagaaaaaugagaucucaaaggcucuuuucagagccaccaaaaaaaaaaaaaaaaaaaaaaaaaaaaaaaaaaaaaaaaaaaaaaaaaaaaaaaaaaaaaaaaagaauu

SEQ ID NO: 34116 - RNA, 1781 nt, Artificial Sequence
  mRNA product Design b-4 (hSL-A64-N5) comprising derived and/or modified sequence from LASV(Z0947-SLE-2011;Clade IV)__AIT17840__GPCmut8 (opt1)
aggagagucccgcagucggcguccagcggcucugcuuguucgugugugugucguugcaggccuuauucaagcuuaccaugggccagaucgugaccuucuuccaggaggucccccacgugaucgaggaggugaugaacaucguccugaucgcccucagcauccuggccgugcugaaggggcucuacaacuucgcgaccugcggccugguggggcuggucacguuccuccugcugugcggccgcuccugcaccaucagccucuacaaggggguguacgagcugcagacccuggagcucaacauggagacccugaacaugugcaugccgcuguccugcacgaagaacaacagccaccacuacaucauggugggcaacgagaccggccucgagcugacccugaccaacacguccaucaucaaccacaaguucugcaaccucagcgacgcccacaagaagaaccuguacgaccacgcccugauguccaucaucagcaccuuccaccucuccauccccaacuucaaccaguacgaggccaugagcugcgacuucaacgggggcaagaucuccguccaguacaaccugagccacuccuacgccggggacgcggccaaccacugcggcaccguggccaacggggugcugcagaccuucaugcggauggccuggggcggcagcuacaucgcgcucgacuccgggcgcgaccggugggacugcaucaugacgagcuaccaguaccugaucauccagaacaccaccugggaggaccacugccaguucucccgccccagccccaucggcuaccuggggcuccugucccagcggacccgcgacaucuacaucagccggcgccugcucggcacguucaccuggacccugagcgacuccgagggcaaggacacccccgggggcuacugccugacgcgguggaugcucaucgaggccgagcugaagugcuucgggaacaccgccgucgccaagugcaacgagaagcacgacgaggaguucugcgacaugcugcgccucuucgacuucugcaagcaggccauccagcggcugaaggcgccggcccagaugagcauccagcugaucaacaaggccgugaacgcccucaucaacgaccagcugaucaugaagaaccaccuccgcgacaucaugggcauccccuacugcaacuacuccaaguacugcuaccugaaccacaccaccacggggaagaccagccugcccaagugcugccugguguccaacggcagcuaccucaacgagacccacuucuccgacgacaucgagcagcaggccgacaacaugaucaccgagaugcugcagaaggaguacauggagcggcagggcaagacgccgcuggggcuggucgaccucuucguguucagcaccuccuucuaccugaucagcaucuuccugcaccucgugaagauccccacccaccgccacaucgucggcaagcccugccccaagccgcaccggcugaaccacauggggaucugcuccugcggccuguacaagcagcccggggugcccgugaaguggaagcgcugaggacuaguaauaaggaaacuguaugaaugucugugggcaggaagugaagagauccuucuguaaagguuuuuggaauuaugucugcugaauaauaaacuuuuuugaaauaauaaaucugguagaaaaaugagaucucaaaggcucuuuucagagccaccaaaaaaaaaaaaaaaaaaaaaaaaaaaaaaaaaaaaaaaaaaaaaaaaaaaaaaaaaaaaaaaaagaauu

SEQ ID NO: 34117 - RNA, 1781 nt, Artificial Sequence
  mRNA product Design b-4 (hSL-A64-N5) comprising derived and/or modified sequence from LASV(Josiah;Clade IV)__NP_694870__GPCmut8 (opt4)
aggagagucccgcagucggcguccagcggcucugcuuguucgugugugugucguugcaggccuuauucaagcuuaccaugggccagaucgugaccuucuuccaggaggugccccacgugaucgaggaggugaugaacaucgugcugaucgcccugagcgugcuggccgugcugaagggccuguacaacuucgccaccugcggccuggugggccuggugaccuuccugcugcugugcggcagaagcugcaccaccagccuguacaagggcguguacgagcugcagacccuggagcugaacauggagacccugaacaugugcaugccccugagcugcaccaagaacaacagccaccacuacaucauggugggcaacgagaccggccuggagcugacccugaccaacaccagcaucaucaaccacaaguucugcaaccugagcgacgcccacaagaagaaccuguacgaccacgcccugaugagcaucaucagcaccuuccaccugagcauccccaacuucaaccaguacgaggccaugagcugcgacuucaacggcggcaagaucagcgugcaguacaaccugagccacagcuacgccggcgacgccgccaaccacugcggcaccguggccaacggcgugcugcagaccuucaugagaauggccuggggcggcagcuacaucgcccuggacagcggcagaggcaacugggacugcaucaugaccagcuaccaguaccugaucauccagaacaccaccugggaggaccacugccaguucagcagacccagccccaucggcuaccugggccugcugagccagagaaccagagacaucuacaucagcagaagacugcugggcaccuucaccuggacccugagcgacagcgagggcaaggacacccccggcggcuacugccugaccagauggaugcugaucgaggccgagcugaagugcuucggcaacaccgccguggccaagugcaacgagaagcacgacgaggaguucugcgacaugcugagacuguucgacuucugcaagcaggccauccagagacugaaggcccccgcccagaugagcauccagcugaucaacaaggccgugaacgcccugaucaacgaccagcugaucaugaagaaccaccugagagacaucaugggcauccccuacugcaacuacagcaaguacugcuaccugaaccacaccaccaccggcagaaccagccugcccaagugcugccuggugagcaacggcagcuaccugaacgagacccacuucagcgacgacaucgagcagcaggccgacaacaugaucaccgagaugcugcagaaggaguacauggagagacagggcaagaccccccugggccugguggaccuguucguguucagcaccagcuucuaccugaucagcaucuuccugcaccuggugaagauccccacccacagacacaucgugggcaagagcugccccaagccccacagacugaaccacaugggcaucugcagcugcggccuguacaagcagcccggcgugcccgugaaguggaagagaugaggacuaguaauaaggaaacuguaugaaugucugugggcaggaagugaagagauccuucuguaaagguuuuuggaauuaugucugcugaauaauaaacuuuuuugaaauaauaaaucugguagaaaaaugagaucucaaaggcucuuuucagagccaccaaaaaaaaaaaaaaaaaaaaaaaaaaaaaaaaaaaaaaaaaaaaaaaaaaaaaaaaaaaaaaaaagaauu

SEQ ID NO: 34118 - RNA, 1778 nt, Artificial Sequence
  mRNA product Design b-4 (hSL-A64-N5) comprising derived and/or modified sequence from LASV(LP;Clade I)__AAF86701__GPCmut8 (opt4)
aggagagucccgcagucggcguccagcggcucugcuuguucgugugugugucguugcaggccuuauucaagcuuaccaugggccagaucaucaccuucuuccaggaggugccccacgugaucgaggaggugaugaacaucgugcugaucgcccugagccugcuggccauccugaagggccuguacaacaucgccaccugcggcaucaucggccugguggccuuccuguuccugugcggcaagagcugcagccugacccugaagggcggcuacgagcugcagacccuggagcugaacauggagacccugaacaugugcaugccccugagcugcaccaagaacagcagccaccacuacaucagagugggcaacgagaccggccuggagcugacccugaccaacaccagcaucaucaaccacaaguucugcaaccugagcgacgcccacaagaagaaccuguacgaccacgcccugaugagcaucaucagcaccuuccaccugagcauccccaacuucaaccaguacgaggccaugagcugcgacuucaacggcggcaagaucagcgugcaguacaaccugagccacagcuacgccggcgacgccgccgagcacugcggcaccguggccaacggcgugcugcagaccuucaugagaauggccuggggcggcagauacaucgcccuggacagcggcaagggcaacugggacugcaucaugaccagcuaccaguaccugaucauccagaacaccaccugggaggaccacugccaguucagcagacccagccccaucggcuaccugggccugcugagccagagaaccagagacaucuacaucagcagaagacugcugggcaccuucaccuggacccugagcgacagcgagggcaacgagacccccggcggcuacugccugaccagauggaugcugaucgaggccgagcugaagugcuucggcaacaccgccguggccaagugcaacgagaagcacgacgaggaguucugcgacaugcugagacuguucgacuucugcaagcaggccaucagaagacugaaggcccccgcccagaugagcauccagcugaucaacaaggccgugaacgcccugaucaacgaccagcugaucaugaagaaccaccugagagacaucaugggcauccccuacugcaacuacagcaaguacugcuaccugaaccacaccagcagcggcagaaccagccugcccaagugcugccugaucagcaacggcagcuaccugaacgagacccaguucagcgacgacaucgagcagcaggccgacaacaugaucaccgagaugcugcagaaggaguacaucgagagacagggcaagaccccccugggccugguggacaucuucaucuucagcaccagcuucuaccugaucagcaucuuccugcaccugaucaagauccccacccacagacacaucgugggcaagcccugccccaagccccacagacugaaccacaugggcgugugcagcugcggccuguacaagcaccccggcgugcccaccaaguggaagagaugaggacuaguaauaaggaaacuguaugaaugucugugggcaggaagugaagagauccuucuguaaagguuuuuggaauuaugucugcugaauaauaaacuuuuuugaaauaauaaaucugguagaaaaaugagaucucaaaggcucuuuucagagccaccaaaaaaaaaaaaaaaaaaaaaaaaaaaaaaaaaaaaaaaaaaaaaaaaaaaaaaaaaaaaaaaaagaauu

SEQ ID NO: 34119 - RNA, 1778 nt, Artificial Sequence
  mRNA product Design b-4 (hSL-A64-N5) comprising derived and/or modified sequence from LASV(803213;Clade II)__AAF86703__GPCmut8 (opt4)
aggagagucccgcagucggcguccagcggcucugcuuguucgugugugugucguugcaggccuuauucaagcuuaccaugggccagaucaucaccuucuuccaggaggugccccacgugaucgaggaggugaugaacaucgugcugaucgcccugagccugcuggccauccugaagggcaucuacaacguggccaccugcggccuguucggccugaucagcuuccugcugcugugcggcagaagcugcagcgugaccuacaagggcguguacgagcugcagacccuggagcugaacauggccaaccugaacaugugcaugccccugagcugcaccaagaacaacagccaccacuacaucauggugggcaacgagaccggccuggagcugacccugaccaacaccagcaucaucaaccacaaguucugcaaccugagcgacgcccacaagaagaaccuguacgaccacgcccugaugagcaucaucagcaccuuccaccugagcauccccaacuucaaccaguacgaggccaugagcugcgacuucaacggcggcaagaucagcgugcaguacaaccugagccacagcuucgccguggacgccgccaaccacugcggcaccaucgccaacggcgugcugcagaccuucaugagaauggccuggggcggcagcuacaucgcccuggacagcggcaagggcaacugggacugcaucaugaccagcuaccaguaccugaucauccagaacaccaccugggaggaccacugccaguucagcagacccagccccaucggcuaccugggccugcugagccagagaaccagagacaucuacaucagcagaagacugcugggcaccuucaccuggacccugagcgacagcgagggcaacgaggcccccggcggcuacugccugaccagauggaugcugaucgaggccgagcugaagugcuucggcaacaccgccguggccaagugcaacgagaagcacgacgaggaguucugcgacaugcugagacuguucgacuucugcaagcaggccaucaagagacugaagacccccgcccagaugagcauccagcugaucaacaaggccgugaacgcccugaucaacgaccagcugaucaugaagaaccaccugagagacaucaugggcauccccuacugcaacuacagcagauacugcuaccugaaccacaccgugaccggcaagaccagccugcccagaugcugccuggugagcaacggcagcuaccugaacgagacccacuucagcgacgacaucgagcagcaggccgacaacaugaucaccgagaugcugcagaaggaguacauggacagacagggcaagaccccccugggccugguggaccuguucguguucagcaccagcuucuaccugaucagcaucuuccugcaccuggugaagauccccacccacagacacaucgugggcaagcccugccccaagccccacagacugaaccacaugggcaucugcagcugcggccuguacaagcaccccggcgugcccgugaaguggaagagaugaggacuaguaauaaggaaacuguaugaaugucugugggcaggaagugaagagauccuucuguaaagguuuuuggaauuaugucugcugaauaauaaacuuuuuugaaauaauaaaucugguagaaaaaugagaucucaaaggcucuuuucagagccaccaaaaaaaaaaaaaaaaaaaaaaaaaaaaaaaaaaaaaaaaaaaaaaaaaaaaaaaaaaaaaaaaagaauu

SEQ ID NO: 34120 - RNA, 1778 nt, Artificial Sequence
  mRNA product Design b-4 (hSL-A64-N5) comprising derived and/or modified sequence from LASV(GA391;Clade III)__CAA36645__GPCmut8 (opt4)
aggagagucccgcagucggcguccagcggcucugcuuguucgugugugugucguugcaggccuuauucaagcuuaccaugggccagaucgugaccuucuuccaggaggugccccacgugaucgaggaggugaugaacaucgugcugaucgcccugagcauccuggccauccugaagggccuguacaacguggccaccugcggccugaucggccuggugaccuuccugcugcugagcggcagaagcugcagccugaucuacaagggcaccuacgagcugcagacccuggagcugaacauggagacccugaacaugugcaugccccugagcugcaccaagaacaacagccaccacuacaucagagugggcaacgagaccggccuggagcugacccugaccaacaccagcauccugaaccacaaguucugcaaccugagcgacgcccacaagagaaaccuguacgaccacagccugaugagcaucaucagcaccuuccaccugagcauccccaacuucaaccaguacgaggccaugagcugcgacuucaacggcggcaagaucaccgugcaguacaaccugagccacagcuucgccguggacgccgccggccacugcggcacccuggccaacggcgugcugcagaccuucaugagaauggccuggggcggcagcuacaucgcccuggacagcggcagaggcaacugggacugcaucaugaccagcuaccaguaccugaucauccagaacaccaccugggacgaccacugccaguucagcagacccagccccaucggcuaccugggccugcugagccagagaaccagagacaucuacaucagcagaagacugcugggcaccuucaccuggacccugagcgacagcgagggcaacgagacccccggcggcuacugccugaccagauggaugcugaucgaggccgagcugaagugcuucggcaacaccgccguggccaagugcaacgagaagcacgacgaggaguucugcgacaugcugagacuguucgacuucugcaagcaggccaucagaagacugaagacccccgcccagaugagcauccagcugaucaacaaggccgugaacgcccugaucaacgaccagcugaucaugaagaaccaccugagagacaucaugggcauccccuacugcaacuacagcagauacugcuaccugaaccacaccagcaccggcaagaccagccugcccagaugcugccugaucagcaacggcagcuaccugaacgagaccaaguucagcgacgacaucgagcagcaggccgacaacaugaucaccgagaugcugcagaaggaguacaucgacagacagggcaagaccccccugggccugguggaccuguucguguucagcaccagcuucuaccugaucagcaucuuccugcaccuggugaagauccccacccacagacacaucgugggcaagcccugccccaagccccacagacugaaccacaugggcaucugcagcugcggccuguacaagcagcccggcgugcccgugagauggaagagaugaggacuaguaauaaggaaacuguaugaaugucugugggcaggaagugaagagauccuucuguaaagguuuuuggaauuaugucugcugaauaauaaacuuuuuugaaauaauaaaucugguagaaaaaugagaucucaaaggcucuuuucagagccaccaaaaaaaaaaaaaaaaaaaaaaaaaaaaaaaaaaaaaaaaaaaaaaaaaaaaaaaaaaaaaaaaagaauu

SEQ ID NO: 34121 - RNA, 1781 nt, Artificial Sequence
  mRNA product Design b-4 (hSL-A64-N5) comprising derived and/or modified sequence from LASV(AV;Clade V)__CCA30314__GPCmut8 (opt4)
aggagagucccgcagucggcguccagcggcucugcuuguucgugugugugucguugcaggccuuauucaagcuuaccaugggccagaucgugaccuucuuccaggaggugccccacgugaucgaggaggugaugaacaucgugcugaucgcccugagcauccuggccgugcugaagggccuguacaacaucgccaccugcggccugaucggccugaucaccuuccugcugcugugcggcagaagcugcagcagcaaccuguacaagggcguguacgagcugcagagccuggaccugaacauggagacccugaacaugugcaugccccugagcugcaccaagaacaacagccaccacuacaucagagugggcaacgacaccggccuggagcugacccugaccaacaccagcauccugaaccacaaguucugcaaccugagcgacgcccacaagaaggaccuguacgaccacgcccugaugagcaucaucagcaccuuccaccugagcauccccaacuucaaccaguacgaggccaugagcugcgacuucaacggcggcaagaucagcgugcaguacaaccugagccacagcuacgccaucgacgccgccaaccacugcggcaccguggccaacggcauccugcagaccuucaugagaauggccuggggcggcagcuacaucgcccuggacagcggcagaggcaacugggacugcaucaugaccagcuaccaguaccugaucauccagaacaccaccugggagaaccacugccaguucagcagacccagccccaucggcuaccugggccugcugagccagagaaccagagacaucuacaucagcagaagacugcugggcaccuucaccuggacccugagcgacagcgagggcaacgccacccccggcggcuacugccugaccagauggaugcugaucgaggccgagcugaagugcuucggcaacaccgccguggccaagugcaacgagaagcacgacgaggaguucugcgacaugcugagacuguucgacuucugcaagcaggccaucagcagacugaagagccccgcccagaugagcauccagcugaucaacaaggccgugaacgcccugaucaacgaccagcugaucaugaagaaccaccugagagacaucaugggcauccccuacugcaacuacagcaaguacugcuaccugaaccacaccaucaccggcaagaccagccugcccaagugcugccuggugagcaacggcagcuaccugaacgagacccacuucagcgacgacaucgagcagcaggccgacaacaugaucaccgagaugcugcagaaggaguacauggagagacagggcaagaccccccugggccugguggaccuguucguguucagcaccagcuucuaccugaucagcaucuuccugagacuggugaagauccccacccacagacacaucgugggcaagcccugccccaagccccacagacugaaccacaugggcaucugcagcugcggccuguacaagcagcccggcgugcccgugagauggaagagaugaggacuaguaauaaggaaacuguaugaaugucugugggcaggaagugaagagauccuucuguaaagguuuuuggaauuaugucugcugaauaauaaacuuuuuugaaauaauaaaucugguagaaaaaugagaucucaaaggcucuuuucagagccaccaaaaaaaaaaaaaaaaaaaaaaaaaaaaaaaaaaaaaaaaaaaaaaaaaaaaaaaaaaaaaaaaagaauu

SEQ ID NO: 34122 - RNA, 1778 nt, Artificial Sequence
  mRNA product Design b-4 (hSL-A64-N5) comprising derived and/or modified sequence from LASV(Togo/2016/7082;Clade VI)__AMR44577__GPCmut8 (opt4)
aggagagucccgcagucggcguccagcggcucugcuuguucgugugugugucguugcaggccuuauucaagcuuaccaugggccagaucaucaccuucuuccaggaggugccccacgugaucgaggaggugaugaacaucgugcugaucgcccugagccugcuggccauccugaagggcguguacaacguggccaccugcggcaucaucggccuggugaccuuccuguuccugugcggcagaagcugcagccugaucuacaagggcagcuacgagcugcagacccuggagcugaacauggagacccugaacaugugcaugccccugagcugcaccaagaacagcagccaccacuacaucagagugggcaacgagaccggccuggagcugacccugaccaacaccagcaucaucaaccacaaguucugcaaccugagcgacgcccacaagagaaaccuguacgaccacgcccugaugagcauccugagcaccuuccaccugagcauccccaacuucaaccaguacgaggccaugagcugcgacuucaacggcggcaagaucagcgugcaguacaaccugagccacgccuacgccguggacgccgccgagcacugcggcaccguggccaacggcgugcugcagaccuucaugagaauggccuggggcggcagcuacaucgcccuggacagcggcagaggcaacugggacugcaucaugaccagcuaccaguaccugaucauccagaacaccaccugggaggaccacugccaguucagcagacccagccccaucggcuaccugggccugcugagccagagaaccagagacaucuacaucagcagaagacugcugggcaccuucaccuggacccugagcgacagcgagggcaacgagacccccggcggcuacugccugaccagauggaugcugaucgaggccgagcugaagugcuucggcaacaccgccguggccaagugcaacgagaagcacgacgaggaguucugcgacaugcugagacuguucgacuucugcaagcaggccauccagagacugaagagccccgcccagaugagcauccagcugaucaacaaggccgugaacgcccugaucaacgaccagcugaucaugaagaaccaccugagagacaugaugggcauccccuacugcaacuacagcaaguacugcuaccugaaccacaccagcagcggcagaaccagccugcccaagugcugccuggugagcaacggcagcuaccugaacgagacccacuucagcgacgacaucgagcagcaggccgacaacaugaucaccgagaugcugcagaaggaguacaucgacagacagggcaagaccccccugggccugguggaccuguucguguucagcaccagcuucuaccugaucagcaucuuccugcaccugaucaagauccccacccacagacacaucgugggcaagcccugccccaagccccacagacugaaccacaugggcaucugcagcugcggccuguacaagcagcccggcgugcccaccagauggaagagaugaggacuaguaauaaggaaacuguaugaaugucugugggcaggaagugaagagauccuucuguaaagguuuuuggaauuaugucugcugaauaauaaacuuuuuugaaauaauaaaucugguagaaaaaugagaucucaaaggcucuuuucagagccaccaaaaaaaaaaaaaaaaaaaaaaaaaaaaaaaaaaaaaaaaaaaaaaaaaaaaaaaaaaaaaaaaagaauu

SEQ ID NO: 34123 - RNA, 1778 nt, Artificial Sequence
  mRNA product Design b-4 (hSL-A64-N5) comprising derived and/or modified sequence from LASV(KAK-428;Clade n.d. (VII))__ANH09740__GPCmut8 (opt4)
aggagagucccgcagucggcguccagcggcucugcuuguucgugugugugucguugcaggccuuauucaagcuuaccaugggccagaucgugaccuucuuccaggaggugccccacgugaucgaggaggugaugaacaucgugcugaucgcccugagccugcuggccauccugaagggccuguacaacuucgccaccugcggcgugaucggccugaucaccuuccugcugcugugcggcagaagcugcagcgccaccuacaagggccaguacgagcugcagacccuggagcugaacauggagagccugaacaugugcaugccccugagcugcaccaagaacaacagccaccacuacaucagagccggcaacaacaccggccuggagcugacccugaccaacaccagcaucaucagccacaaguucugcaaccugagcgacgcccacaagaagaaccuguacgaccacacccugaugagcaucaucaccaccuuccaccugagcauccccaacuucaaccaguacgaggccaugagcugcgacuucaacggcggcaagaucagcauccaguacaaccugagccacagcuacgccggcgacgccgcccagcacugcggcaccguggccaacggcgugcugcagaccuucaugagaauggccuggggcggcagcuaccuggcccuggacagcggcagaagaggcugggacugcaucaucagcagcuaccaguaccugaucauccagaacaccaccugggacgaccacugccaguucagcagacccagccccaucggcuaccugggcuucgugagccagaagaccagagacaucuacaucagcagaagacugcugggcaccuucaccuggacccugagcgacagcgagggccacgacaugcccggcggcuacugccugaccagauggaugcugaucgaggccgaccugaagugcuucggcaacaccgccguggccaagugcaacgagaagcacgacgaggaguucugcgacauguggagacuguucgacuucugcaagcaggccauccagagacugaaggcccccgcccagaugaacauccagcugaucaacaaggccgugaacgcccugaucaacgaccagcugaugaugaagaaccaccugagagacaucaugggcauccccuacugcaacuacagcaaguucugcuaccugaacaacaccaccaccggcagaaccagccugcccagaugcugccugaucagcaacggcagcuaccugaacgagacccacuucagcgacgacaucgagcagcaggccgacaacaugaucaccgagaugcugcagaaggaguacauggacagacagggcaagaccccccugggccugguggaccuguucguguucagcaccagcuucuaccugaucaccaucuuccugcaccuggugaagauccccacccacagacacaucgugggcaagcccugccccaagccccacagacugaaccacaugggcaucugcagcugcggccuguacaagcagcccggcgugcccgugagauggaagagaugaggacuaguaauaaggaaacuguaugaaugucugugggcaggaagugaagagauccuucuguaaagguuuuuggaauuaugucugcugaauaauaaacuuuuuugaaauaauaaaucugguagaaaaaugagaucucaaaggcucuuuucagagccaccaaaaaaaaaaaaaaaaaaaaaaaaaaaaaaaaaaaaaaaaaaaaaaaaaaaaaaaaaaaaaaaaagaauu

SEQ ID NO: 34124 - RNA, 1778 nt, Artificial Sequence; identical to SEQ ID NO: 34118
  mRNA product Design b-4 (hSL-A64-N5) comprising derived and/or modified sequence from LASV(Pinneo-NIG-1969;Clade I)__AIT17836__GPCmut8 (opt4)

SEQ ID NO: 34125 - RNA, 1778 nt, Artificial Sequence
  mRNA product Design b-4 (hSL-A64-N5) comprising derived and/or modified sequence from LASV(ISTH0009-NIG-2011;Clade II)__AIT17404__GPCmut8 (opt4)
aggagagucccgcagucggcguccagcggcucugcuuguucgugugugugucguugcaggccuuauucaagcuuaccaugggccagaucaucaccuucuuccaggaggugccccacgugaucgaggaggugaugaacaucgugcugaucgcccugagccugcuggccauccugaagggcaucuacaacguggccaccugcggccuguucggccuggugagcuuccugcugcugugcggcagaagcugcagcaccaccuacaagggcguguacgagcugcagacccuggagcuggacauggccagccugaacaugugcaugccccugagcugcaccaagaacaacagccaccacuacaucauggugggcaacgagaccggccuggagcugacccugaccaacaccagcaucaucaaccacaaguucugcaaccugagcgacgcccacaagaagaaccuguacgaccacgcccugaugagcaucaucagcaccuuccaccugagcauccccaacuucaaccaguacgaggccaugagcugcgacuucaacggcggcaagaucagcgugcaguacaaccugagccacgccuacgccguggacgccgccaaccacugcggcaccaucgccaacggcgugcugcagaccuucaugagaauggccuggggcggcagcuacaucgcccuggacagcggcaagggcagcugggacugcaucaugaccagcuaccaguaccugaucauccagaacaccaccugggaggaccacugccaguucagcagacccagccccaucggcuaccugggccugcugagccagagaaccagagacaucuacaucagcagaagacugcugggcaccuucaccuggacccugagcgacagcgagggcaacgagacccccggcggcuacugccugaccagauggaugcugaucgaggccgagcugaagugcuucggcaacaccgccguggccaagugcaacgagaagcacgacgaggaguucugcgacaugcugagacuguucgacuucugcaagcaggccaucagaagacugaagacccccgcccagaugagcauccagcugaucaacaaggccgugaacgcccugaucaacgaccagcugaucaugaagaaccaccugagagacaucaugggcauccccuacugcaacuacagcaaguacugcuaccugaaccacaccgugaccggcaagaccagccugcccagaugcugccuggugagcaacggcagcuaccugaacgagacccacuucagcgacgacaucgagcagcaggccgacaacaugaucaccgagcugcugcagaaggaguacauggacagacagggcaagaccccccugggccugguggaccuguucguguucagcaccagcuucuaccugaucagcaucuuccugcaccugaucaagauccccacccacagacacaucaccggcaagcccugccccaagccccacagacugaaccacaugggcaucugcagcugcggccuguacaagcaccccggcgugcccgugaaguggaagagaugaggacuaguaauaaggaaacuguaugaaugucugugggcaggaagugaagagauccuucuguaaagguuuuuggaauuaugucugcugaauaauaaacuuuuuugaaauaauaaaucugguagaaaaaugagaucucaaaggcucuuuucagagccaccaaaaaaaaaaaaaaaaaaaaaaaaaaaaaaaaaaaaaaaaaaaaaaaaaaaaaaaaaaaaaaaaagaauu

SEQ ID NO: 34126 - RNA, 1778 nt, Artificial Sequence
  mRNA product Design b-4 (hSL-A64-N5) comprising derived and/or modified sequence from LASV(ISTH2010-NIG-2012;Clade II)__AIT17482__GPCmut8 (opt4)
aggagagucccgcagucggcguccagcggcucugcuuguucgugugugugucguugcaggccuuauucaagcuuaccaugggccagaucaucaccuucuuccaggaggugccccacgugaucgaggaggugaugaacaucgugcugaucgcccugagccugcuggccauccugaagggcaucuacaacguggccaccugcggccuguucggccuggugagcuuccugcugcugugcggcagaagcugcagcaccaccuacaagggcguguacgagcugcagacccuggagcuggacauggccagccugaacaugugcaugccccugagcugcaccaagaacaacagccaccacuacaucauggugggcaacgagaccggccuggagcugacccugaccaacaccagcaucaucaaccacaaguucugcaaccugagcgacgcccacaagaagaaccuguacgaccacgcccugaugagcaucaucagcaccuuccaccugagcauccccaacuucaaccaguacgaggccaugagcugcgacuucaacggcggcaagaucagcgugcaguacaaccugagccacgccuacgccguggacgccgccaaccacugcggcaccaucgccaacggcgugcugcagaccuucaugagaauggccuggggcggcagcuacaucgcccuggacagcggcaagggcagcugggacugcaucaugaccagcuaccaguaccugaucauccagaacaucaccugggaggaccacugccaguucagcagacccagccccaucggcuaccugggccugcugagccagagaaccagagacaucuacaucagcagaagacugcugggcaccuucaccuggacccugagcgacagcgagggcaacgagacccccggcggcuacugccugaccagauggaugcugaucgaggccgagcugaagugcuucggcaacaccgccguggccaagugcaacgagaagcacgacgaggaguucugcgacaugcugagacuguucgacuucugcaagcaggccaucagaagacugaagacccccgcccagaugagcauccagcugaucaacaaggccgugaacgcccugaucaacgaccagcugaucaugaagaaccaccugagagacaucaugggcauccccuacugcaacuacagcaaguacugcuaccugaaccacaccgugaccggcaagaccagccugcccagaugcugccuggugagcaacggcagcuaccugaacgagacccacuucagcgacgacaucgagcagcaggccgacaacaugaucaccgagcugcugcagaaggaguacaucgacagacagggcaagaccccccugggccugguggaccuguucguguucagcaccagcuucuaccugaucagcaucuuccugcaccuggugaagauccccacccacagacacguggugggcaagcccugccccaagccccacagacugaaccacaugggcaucugcagcugcggccuguacaagcaccccggcgugcccgugaaguggaagagaugaggacuaguaauaaggaaacuguaugaaugucugugggcaggaagugaagagauccuucuguaaagguuuuuggaauuaugucugcugaauaauaaacuuuuuugaaauaauaaaucugguagaaaaaugagaucucaaaggcucuuuucagagccaccaaaaaaaaaaaaaaaaaaaaaaaaaaaaaaaaaaaaaaaaaaaaaaaaaaaaaaaaaaaaaaaaagaauu

SEQ ID NO: 34127 - RNA, 1778 nt, Artificial Sequence
  mRNA product Design b-4 (hSL-A64-N5) comprising derived and/or modified sequence from LASV(Lassa virus/H.sapiens-wt/NGA/2015/ISTH_0543;Clade II)__AVO03639__GPCmut8 (opt4)
aggagagucccgcagucggcguccagcggcucugcuuguucgugugugugucguugcaggccuuauucaagcuuaccaugggccagaucaucaccuucuuccaggaggugccccacgugaucgaggaggugaugaacaucgugcugaucgcccugagccugcuggccauccugaagggcaucuacaacguggccaccugcggccuguucggccuggugagcuuccugcugcugugcggcagaagcugcagcaccaccuacaagggcguguacgagcugcagacccuggagcuggacauggccaaccugaacaugugcaugccccugagcugcaccaagaacaacagccaccacuacaucauggugggcaacgagaccggccuggagcugacccugaccaacaccagcaucaucaaccacaaguucugcaaccugagcgacgcccacaagaagaaccuguacgaccacgcccugaugagcaucaucagcaccuuccaccugagcauccccaacuucaaccaguacgaggccaugagcugcgacuucaacggcggcaagaucagcgugcaguacaaccugagccacaccuacgccguggacgccgccaaccacugcggcaccaucgccaacggcgugcugcagaccuucaugagaauggccuggggcggcagcuacaucgcccuggacagcggcaagggcagcugggacugcaucaugaccagcuaccaguaccuggugauccagaacaccaccugggaggaccacugccaguucagcagacccagccccaucggcuaccugggccugcugagccagagaaccagagacaucuacaucagcagaagacugcugggcaccuucaccuggacccugagcgacagcgagggcaacgagacccccggcggcuacugccugaccagauggaugcugaucgaggccgagcugaagugcuucggcaacaccgccguggccaagugcaacgagaagcacgacgaggaguucugcgacaugcugagacuguucgacuucugcaagcaggccaucagaagacugaagacccccgcccagaugagcauccagcugaucaacaaggccgugaacgcccugaucaacgaccagcugaucaugaagaaccaccugagagacaucaugggcauccccuacugcaacuacagcaaguacugcuaccugaaccacaccgugaccggcaagaccagccugcccagaugcugccuggugagcaacggcagcuaccugaacgagacccacuucagcgacgacaucgagcagcaggccgacaacaugaucaccgagcugcugcagaaggaguacaucgacagacagggcaagaccccccugggccugguggaccuguucguguucagcaccagcuucuaccugaucagcaucuuccugcaccuggugaagauccccacccacagacacaucaccggcaagcccugccccaagccccacagacugaaccacaugggcaucugcagcugcggccuguacaagcaccccggcgugcccgugaaguggaagagaugaggacuaguaauaaggaaacuguaugaaugucugugggcaggaagugaagagauccuucuguaaagguuuuuggaauuaugucugcugaauaauaaacuuuuuugaaauaauaaaucugguagaaaaaugagaucucaaaggcucuuuucagagccaccaaaaaaaaaaaaaaaaaaaaaaaaaaaaaaaaaaaaaaaaaaaaaaaaaaaaaaaaaaaaaaaaagaauu

SEQ ID NO: 34128 - RNA, 1778 nt, Artificial Sequence
  mRNA product Design b-4 (hSL-A64-N5) comprising derived and/or modified sequence from LASV(Lassa virus/H.sapiens-wt/NGA/2016/ISTH_0009;Clade II)__AVO03571__GPCmut8 (opt4)
aggagagucccgcagucggcguccagcggcucugcuuguucgugugugugucguugcaggccuuauucaagcuuaccaugggccagaucaucaccuucuuccaggaggugccccacgugaucgaggaggugaugaacaucgugcugaucgcccugagccugcuggccauccugaagggcaucuacaacguggccaccugcggccugcugggccuggugagcuuccugcugcugugcggcagaagcugcagcaccaccuacaagggcguguacgagcugcagacccuggagcuggacauggccagccugaacaugugcaugccccugagcugcaccaagaacaacagccaccacuacaucauggugggcaacgagaccggccuggagcugacccugaccaacaccagcaucaucaaccacaaguucugcaaccugagcgacgcccacaagaagaaccuguacgaccacgcccugaugagcaucaucagcaccuuccaccugagcauccccaacuucaaccaguacgaggccaugagcugcgacuucaacggcggcagaaucagcgugcaguacaaccugagccacagcuacgccguggacgccgccaaccacugcggcaccaucgccaacggcgugcugcagaccuucaugagaauggccuggggcggcagcuacaucgcccuggacagcggcaagggcagcugggacugcaucaugaccagcuaccaguaccugaucauccagaacaccaccugggaggaccacugccaguucagcagacccagccccaucggcuaccugggccugcugagccagagaaccagagacaucuacaucagcagaagacugcugggcaccuucaccuggacccugagcgacagcgagggcaacgagacccccggcggcuacugccugaccagauggaugcugaucgaggccgagcugaagugcuucggcaacaccgccguggccaagugcaacgagaagcacgacgaggaguucugcgacaugcugagacuguucgacuucugcaagcaggccaucagaagacugaagacccccgcccagaugagcauccagcugaucaacaaggccgugaacgcccugaucaacgaccagcugaucaugaagaaccaccugagagacaucaugggcauccccuacugcaacuacagcaaguacugcuaccugaaccacaccgugaccggcaagaccagccugcccagaugcugccuggugagcaacggcagcuaccugaacgagacccacuucagcgacgacaucgagcagcaggccgacaacaugaucaccgagcugcugcagaaggaguacaucgacagacagggcaagaccccccugggccugguggaccuguucguguucagcaccagcuucuaccugaucagcaucuuccugcaccuggugaagauccccacccacagacacaucaccggcaagcccugccccaagccccacagacugaaccacaugggcaucugcagcugcggccuguacaaccaccccggcgugcccgugaaguggaagagaugaggacuaguaauaaggaaacuguaugaaugucugugggcaggaagugaagagauccuucuguaaagguuuuuggaauuaugucugcugaauaauaaacuuuuuugaaauaauaaaucugguagaaaaaugagaucucaaaggcucuuuucagagccaccaaaaaaaaaaaaaaaaaaaaaaaaaaaaaaaaaaaaaaaaaaaaaaaaaaaaaaaaaaaaaaaaagaauu

SEQ ID NO: 34129 - RNA, 1778 nt, Artificial Sequence
  mRNA product Design b-4 (hSL-A64-N5) comprising derived and/or modified sequence from LASV(Lassa virus/H.sapiens-wt/NGA/2016/ISTH_0017;Clade II)__AVO03567__GPCmut8 (opt4)
aggagagucccgcagucggcguccagcggcucugcuuguucgugugugugucguugcaggccuuauucaagcuuaccaugggccagaucaucaccuucuuccaggaggugccccacgugaucgaggaggugaugaacaucgugcugaucgcccugagccugcuggccauccugaagggcaucuacaacguggccaccugcggccuguucggccuggugagcuuccugcugcugugcggcagaagcugcagcaccaccuacaagggcguguacgagcugcagacccuggagcuggacauggccagccugaacaugugcaugccccugagcugcaccaagaacaacagccaccacuacaucauggugggcaacgagaccggccuggagcugacccugaccaacaccagcaucaucaaccacaaguucugcaaccugagcgacgcccacaagaagaaccuguacgaccacgcccugaugagcaucaucagcaccuuccaccugagcauccccaacuucaaccaguacgaggccaugagcugcgacuucaacggcggcaagaucagcgugcaguacaaccugagccacaccuacgccaucgacgccgccaaccacugcggcaccaucgccaacggcgugcugcagaccuucaugagaauggccuggggcggcagcuacaucgcccuggacagcggcaagggcagcugggacugcaucaugaccagcuaccaguaccugaucauccagaacaccaccugggaggaccacugccaguucagcagacccagccccaucggcuaccugggccugcugagccagagaaccagagacaucuacaucagcagaagacugcugggcaccuucaccuggacccugagcgacagcgagggcaacgagacccccggcggcuacugccugaccagauggaugcugaucgaggccgagcugaagugcuucggcaacaccgccguggccaagugcaacgagaagcacgacgaggaguucugcgacaugcugagacuguucgacuucugcaagcaggccaucagaagacugaagacccccgcccagaugagcauccagcugaucaacaaggccgugaacgcccugaucaacgaccagcugaucaugaagaaccaccugagagacaucaugggcauccccuacugcaacuacagcaaguacugcuaccugaaccacaccgugaccggcaagaccagccugcccagaugcugccuggugagcaacggcagcuaccugaacgagacccacuucagcgacgacaucgagcagcaggccgacaacaugaucaccgagcugcugcagaaggaguacauggacagacagggcaagaccccccugggccugguggaccuguucguguucagcaccagcuucuaccugaucagcaucuuccugcaccuggugagaauccccacccacagacacgugaucggcaagcccugccccaagccccacagacugaaccacaugggcaucugcagcugcggccuguacaagcaccccggcgugcccgugaaguggaagagaugaggacuaguaauaaggaaacuguaugaaugucugugggcaggaagugaagagauccuucuguaaagguuuuuggaauuaugucugcugaauaauaaacuuuuuugaaauaauaaaucugguagaaaaaugagaucucaaaggcucuuuucagagccaccaaaaaaaaaaaaaaaaaaaaaaaaaaaaaaaaaaaaaaaaaaaaaaaaaaaaaaaaaaaaaaaaagaauu

SEQ ID NO: 34130 - RNA, 1778 nt, Artificial Sequence
  mRNA product Design b-4 (hSL-A64-N5) comprising derived and/or modified sequence from LASV(Lassa virus/H.sapiens-wt/NGA/2018/ISTH_0959;Clade II)__AVV65099__GPCmut8 (opt4)
aggagagucccgcagucggcguccagcggcucugcuuguucgugugugugucguugcaggccuuauucaagcuuaccaugggccagaucaucaccuucuuccaggaggugccccacgugaucgaggaggugaugaacaucgugcugaucgcccugagccugcuggccauccugaagggcaucuacaacguggugaccugcggccuguucggccuggugagcuuccugcugcugugcggcagaagcugcagcaccaccuacaagggcguguacgagcugcagacccuggagcuggacauggccagccugaacaugugcaugccccugagcugcaccaagaacaacagccaccacuacaucauggugggcaacgagaccggccuggagcugacccugaccaacaccagcaucaucaaccacaaguucugcaaccugagcgacgcccacaagaagaaccuguacgaccacgcccugaugagcaucaucagcaccuuccaccugagcauccccaacuucaaccaguacgaggccaugagcugcgacuucaacggcggcaagaucagcgugcaguacaaccugagccacgccuacgccaucgacgccgccaaccacugcggcaccaucgccaacggcgugcugcagaccuucaugagaauggccuggggcggcagcuacaucgcccuggacagcggcaagggcagcugggacugcaucaugaccagcuaccaguaccugaucauccagaacaccaccugggaggaccacugccaguucagcagacccagccccaucggcuaccugggccugcugagccagagaaccagagacaucuacaucagcagaagacugcugggcaccuucaccuggacccugagcgacagcgagggcaacgagacccccggcggcuacugccugaccagauggaugcugaucgaggccgagcugaagugcuucggcaacaccgccguggccaagugcaacgagaagcacgacgaggaguucugcgacaugcugagacuguucgacuucugcaagcaggccaucagaagacugaagacccccgcccagaugagcauccagcugaucaacaaggccgugaacgcccugaucaacgaccagcugaucaugaagaaccaccugagagacaucaugggcauccccuacugcaacuacagcaaguacugcuaccugaaccacaccgugaccggcaagaccagccugcccagaugcugccuggugagcaacggcagcuaccugaacgagacccacuucagcgacgacaucgagcagcaggccgacaacaugaucaccgagcugcugcagaaggaguacaucgacagacagggcaagaccccccugggccugguggaccuguucguguucagcaccagcuucuaccugaucagcaucuuccugcaccuggugaagauccccacccacagacacgugaucggcaagcccugccccaagccccacagacugaaccacaugggcaucugcagcugcggccuguacaagcaccccggcgugcccgugaaguggaagagaugaggacuaguaauaaggaaacuguaugaaugucugugggcaggaagugaagagauccuucuguaaagguuuuuggaauuaugucugcugaauaauaaacuuuuuugaaauaauaaaucugguagaaaaaugagaucucaaaggcucuuuucagagccaccaaaaaaaaaaaaaaaaaaaaaaaaaaaaaaaaaaaaaaaaaaaaaaaaaaaaaaaaaaaaaaaaagaauu

SEQ ID NO: 34131 - RNA, 1778 nt, Artificial Sequence
  mRNA product Design b-4 (hSL-A64-N5) comprising derived and/or modified sequence from LASV(LASV003-NIG-2008;Clade II)__AIT17580__GPCmut8 (opt4)
aggagagucccgcagucggcguccagcggcucugcuuguucgugugugugucguugcaggccuuauucaagcuuaccaugggccagaucaucaccuucuuccaggaggugccccacgugaucgaggaggugaugaacaucgugcugaucgcccugagccugcuggccauccugaagggcaucuacaacguggccaccugcggccuguucggccuggugagcuuccugcugcugugcggcagaagcugcagcaccaccuacaagggcguguacgagcugcagacccuggagcuggacauggccagccugaacaugugcaugccccugagcugcaccaagaacaacagccaccacuacaucauggugggcaacgagaccggccuggagcugacccugaccaacaccagcaucaucaaccacaaguucugcaaccugagcgacgcccacaagaagaaccuguacgaccacgcccugaugagcaucaucagcaccuuccaccugagcauccccaacuucaaccaguacgaggccaugagcugcgacuucaacggcggcaagaucagcgugcaguacaaccugagccacaccuacgccguggacgccgccaaccacugcggcaccaucgccaacggcgugcugcagaccuucaugagaauggccuggggcggcagcuacaucgcccuggacagcggcaagggcagcugggacugcaucaugaccagcuaccaguaccugaucauccagaacaccaccugggaggaccacugccaguucagcagacccagccccaucggcuaccugggccugcugagccagagaaccagagacaucuacaucagcagaagacugcugggcaccuucaccuggacccugagcgacagcgagagcaacgagacccccggcggcuacugccugaccagauggaugcugaucgaggccgagcugaagugcuucggcaacaccgccguggccaagugcaacgagaagcacgacgaggaguucugcgacaugcugagacuguucgacuucugcaagcaggccaucagaagacugaaggcccccgcccagaugagcauccagcugaucaacaaggccgugaacgcccugaucaacgaccagcugaucaugaagaaccaccugagagacaucaugggcauccccuacugcaacuacagcaaguacugcuaccugaaccacaccgugaccggcagaaccagccugcccagaugcugccuggugagcaacggcagcuaccugaacgagacccacuucagcgacgacaucgagcagcaggccgacaacaugaucaccgagcugcugcagaaggaguacauggacagacagggcaagaccccccugggccugguggaccuguucguguucagcaccagcuucuaccugaucagcaucuuccugcaccuggugaagauccccacccacagacacgugaucggcaagcccugccccaagccccacagacugaaccacaugggcaucugcagcugcggccuguacaagcaccccggcgugcccgugaaguggaagagaugaggacuaguaauaaggaaacuguaugaaugucugugggcaggaagugaagagauccuucuguaaagguuuuuggaauuaugucugcugaauaauaaacuuuuuugaaauaauaaaucugguagaaaaaugagaucucaaaggcucuuuucagagccaccaaaaaaaaaaaaaaaaaaaaaaaaaaaaaaaaaaaaaaaaaaaaaaaaaaaaaaaaaaaaaaaaagaauu

SEQ ID NO: 34132 - RNA, 1778 nt, Artificial Sequence
  mRNA product Design b-4 (hSL-A64-N5) comprising derived and/or modified sequence from LASV(LASV035-NIG-2009;Clade II)__AIT17588__GPCmut8 (opt4)
aggagagucccgcagucggcguccagcggcucugcuuguucgugugugugucguugcaggccuuauucaagcuuaccaugggccagaucaucaccuucuuccaggaggugccccacgugaucgaggaggugaugaacaucgugcugaucgcccugagccugcuggccauccugaagggcaucuacaacguggccaccugcggccuguucggccuggugagcuuccugcugcugugcggcagaagcugcagcaccaccuacaagggcguguacgagcugcagacccuggagcuggacauggccagccugaacaugugcaugccccugagcugcaccaagaacaacagccaccacuacaucauggugggcaacgagaccggccuggagcugacccugaccaacaccagcaucaucaaccacaaguucugcaaccugagcgacgcccacaagaagaaccuguacgaccacgcccugaugagcaucaucagcaccuuccaccugagcauccccaacuucaaccaguacgaggccaugagcugcgacuucaacggcggcaagaucagcgugcaguacaaccugagccacgccuacgccguggacgccgccaaccacugcggcaccaucgccaacggcgugcugcagaccuucaugagaauggccuggggcggcagcuacaucgcccuggacagcggcaagggcagcugggacugcaucaugaccagcuaccaguaccugaucauccagaacaccaccugggaggaccacugccaguucagcagacccagccccaucggcuaccugggccugcugagccagagaaccagagacaucuacaucagcagaagacugcugggcaccuucaccuggacccugagcgacagcgagggcaacgagacccccggcggcuacugccugaccagauggaugcugaucgaggccgagcugaagugcuucggcaacaccgccguggccaagugcaacgagaagcacgacgaggaguucugcgacaugcugagacuguucgacuucugcaagcaggccaucagaagacugaaggcccccgcccagaugagcauccagcugaucaacaaggccgugaacgcccugaucaacgaccagcugaucaugaagaaccaccugagagacaucaugggcauccccuacugcaacuacagcaaguacugcuaccugaaccacaccgugaccggcaagaccagccugcccagaugcugccuggugagcaacggcagcuaccugaacgagacccacuucagcgacgacaucgagcagcaggccgacaacaugaucaccgagcugcugcagaaggaguacaucgacagacagggcaagaccccccugggccugguggaccuguucguguucagcaccagcuucuaccugaucagcaucuuccugcaccuggugaagauccccacccacagacacgugaucggcaagcccugccccaagccccacagacugaaccacaugggcaucugcagcugcggccuguacaagcaccccggcgugcccgugaaguggaagagaugaggacuaguaauaaggaaacuguaugaaugucugugggcaggaagugaagagauccuucuguaaagguuuuuggaauuaugucugcugaauaauaaacuuuuuugaaauaauaaaucugguagaaaaaugagaucucaaaggcucuuuucagagccaccaaaaaaaaaaaaaaaaaaaaaaaaaaaaaaaaaaaaaaaaaaaaaaaaaaaaaaaaaaaaaaaaagaauu

SEQ ID NO: 34133 - RNA, 1778 nt, Artificial Sequence
  mRNA product Design b-4 (hSL-A64-N5) comprising derived and/or modified sequence from LASV(LASV1000-NIG-2009;Clade II)__AIT17782__GPCmut8 (opt4)
aggagagucccgcagucggcguccagcggcucugcuuguucgugugugugucguugcaggccuuauucaagcuuaccaugggccagaucaucaccuucuuccaggaggugccccacgugaucgaggaggugaugaacaucgugcugaucgcccugagccugcuggccauccugaagggcaucuacaacguggccaccugcggccuguucggccuggugagcuuccugcugcugugcggcagaagcugcagcaccaccuacaagggcguguacgagcugcagacccuggagcuggacauggccagccugaacaugugcaugccccugagcugcaccaagaacaacagccaccacuacaucauggugggcaacgagaccggccuggagcugacccugaccaacaccagcaucaucaaccacaaguucugcaaccugagcgacgcccacaagaagaaccuguacgaccacgcccugaugagcaucaucagcaccuuccaccugagcauccccaacuucaaccaguacgaggccaugagcugcgacuucaacggcggcaagaucagcgugcaguacaaccugagccacaccuacgccguggacgccgccaaccacugcggcaccaucgccaacggcgugcugcagaccuucaugagaauggccuggggcggcagcuacaucgcccuggacagcggcaagggcagcugggacugcaucaugaccagcuaccaguaccugaucauccagaacaccaccugggaggaccacugccaguucagcagacccagccccaucggcuaccugggccugcugagccagagaaccagagacaucuacaucagcagaagacugcugggcaccuucaccuggacccugagcgacagcgagggcaacgagacccccggcggcuacugccugaccagauggaugcugaucgaggccgagcugaagugcuucggcaacaccgccguggccaagugcaacgagaagcacgacgaggaguucugcgacaugcugagacuguucgacuucugcaagcaggccaucaagagacugaagacccccgcccagaugagcauccagcugaucaacaaggccgugaacgcccugaucaacgaccagcugaucaugaagaaccaccugagagacaucaugggcauccccuacugcaacuacagcaaguacugcuaccugaaccacaccgugaccggcaagaccagccugcccagaugcugccuggugagcaacggcagcuaccugaacgagacccacuucagcgacgacaucgagcagcaggccgacaacaugaucaccgagcugcugcagaaggaguacaucgacagacagggcaagaccccccugggccugguggaccuguucguguucagcaccagcuucuaccugaucagcaucuuccugcaccuggugaagauccccacccacagacacguggugggcaagcccugccccaagccccacagacugaaccacaugggcaucugcagcugcggccuguacaagcaccccggcgugcccgugaaguggaagagaugaggacuaguaauaaggaaacuguaugaaugucugugggcaggaagugaagagauccuucuguaaagguuuuuggaauuaugucugcugaauaauaaacuuuuuugaaauaauaaaucugguagaaaaaugagaucucaaaggcucuuuucagagccaccaaaaaaaaaaaaaaaaaaaaaaaaaaaaaaaaaaaaaaaaaaaaaaaaaaaaaaaaaaaaaaaaagaauu

SEQ ID NO: 34134 - RNA, 1778 nt, Artificial Sequence
  mRNA product Design b-4 (hSL-A64-N5) comprising derived and/or modified sequence from LASV(LASV221-NIG-2010;Clade II)__AIT17624__GPCmut8 (opt4)
aggagagucccgcagucggcguccagcggcucugcuuguucgugugugugucguugcaggccuuauucaagcuuaccaugggccagaucaucaccuucuuccaggaggugccccacgugaucgaggaggugaugaacaucgugcugaucgcccugagccugcuggccauccugaagggcaucuacaacguggccaccugcggccuguucggccuggugagcuuccugcugcugugcggcagaagcugcagcaccaccuacaagggcguguacgagcugcagacccuggagcuggacauggccagccugaacaugugcaugccccugagcugcaccaagaacaacagccaccacuacaucauggugggcaacgagaccggccuggagcugacccugaccaacaccagcaucaucaaccacaaguucugcaaccugagcgacgcccacaagaagaaccuguacgaccacgcccugaugagcaucaucagcaccuuccaccugagcauccccaacuucaaccaguacgaggccaugagcugcgacuucaacggcggcaagaucagcgugcaguacaaccugagccacaccuacgccaucgacgccgccaaccacugcggcaccaucgccaacggcgugcugcagaccuucaugagaauggccuggggcggcagcuacaucgcccuggacagcggcaagggcagcugggacugcaucaugaccagcuaccaguaccugaucauccagaacaccaccugggaggaccacugccaguucagcagacccagccccaucggcuaccugggccugcugagccagagaaccagagacaucuacaucagcagaagacugcugggcaccuucaccuggacccugagcgacagcgagggcaacgagacccccggcggcuacugccugaccagauggaugcugaucgaggccgagcugaagugcuucggcaacaccgccguggccaagugcaacgagaagcacgacgaggaguucugcgacaugcugagacuguucgacuucugcaagcaggccaucagaagacugaagacccccgcccagaugagcauccagcugaucaacaaggccgugaacgcccugaucaacgaccagcugaucaugaagaaccaccugagagacaucaugggcauccccuacugcaacuacagcaaguacugcuaccugaaccacaccgugaccggcaagaccagccugcccagaugcugccuggugagcaacggcagcuaccugaacgagacccacuucagcgacgacaucgagcagcaggccgacaacaugaucaccgagaugcugcagaaggaguacauggacagacagggcaagaccccccugggccugguggaccuguucguguucagcaccagcuucuaccugaucagcaucuuccugcaccuggugaagauccccacccacagacacgugaucggcaagcccugccccaagccccacagacugaaccacaugggcaucugcagcugcggccuguacaagcaccccggcgugcccgugaaguggaagagaugaggacuaguaauaaggaaacuguaugaaugucugugggcaggaagugaagagauccuucuguaaagguuuuuggaauuaugucugcugaauaauaaacuuuuuugaaauaauaaaucugguagaaaaaugagaucucaaaggcucuuuucagagccaccaaaaaaaaaaaaaaaaaaaaaaaaaaaaaaaaaaaaaaaaaaaaaaaaaaaaaaaaaaaaaaaaagaauu

SEQ ID NO: 34135 - RNA, 1778 nt, Artificial Sequence
  mRNA product Design b-4 (hSL-A64-N5) comprising derived and/or modified sequence from LASV(LASV237-NIG-2010;Clade II)__AIT17638__GPCmut8 (opt4)
aggagagucccgcagucggcguccagcggcucugcuuguucgugugugugucguugcaggccuuauucaagcuuaccaugggccagaucaucaccuucuuccaggaggugccccacgugaucgaggaggugaugaacaucgugcugaucgcccugagccugcuggccauccugaagggcaucuacaacguggccaccugcggccuguucggccuggugagcuuccugcugcugugcggcagaagcugcagcaccaccuacaagggcguguacgagcugcagacccuggagcuggacauggccagccugaacaugugcaugccccugagcugcaccaagaacaacagccaccacuacaucauggugggcaacgagaccggccuggagcugacccugaccaacaccagcaucaucaaccacaaguucugcaaccugagcgacgcccacaagaaggaccuguacgaccacgcccugaugagcaucaucagcaccuuccaccugagcauccccaacuucaaccaguacgaggccaugagcugcgacuucaacggcggcaagaucagcgugcaguacaaccugagccacaccuacgccguggacgccgccaaccacugcggcaccaucgccaacggcgugcugcagaccuucaugagaauggccuggggcggcagcuacaucgcccuggacagcggcaagggcagcugggacugcaucaugaccagcuaccaguaccugaucauccagaacaccaccugggaggaccacugccaguucagcagacccagccccaucggcuaccugggccugcugagccagagaaccagagacaucuacaucagcagaagacugcugggcaccuucaccuggacccugagcgacagcgagggcaacgagacccccggcggcuacugccugaccagauggaugcugaucgaggccgagcugaagugcuucggcaacaccgccguggccaagugcaacgagaagcacgacgaggaguucugcgacaugcugagacuguucgacuucugcaagcaggccaucagaagacugaagacccccgcccagaugagcauccagcugaucaacaaggccgugaacgcccugaucaacgaccagcugaucaugaagaaccaccugagagacaucaugggcauccccuacugcaacuacagcaaguacugcuaccugaaccacaccgugaccggcaagaccagccugcccagaugcugccuggugagcaacggcagcuaccugaacgagacccacuucagcgacgacaucgagcagcaggccgacaacaugaucaccgagcugcugcagaaggaguacauggacagacagggcaagaccccccugggccugguggaccuguucguguucagcaccagcuucuaccugaucagcaucuuccugcaccugaucaagauccccacccacagacacaucaccggcaagcccugccccaagccccacagacugaaccacaugggcaucugcagcugcggccuguacaagcaccccggcgugcccgugaaguggaagagaugaggacuaguaauaaggaaacuguaugaaugucugugggcaggaagugaagagauccuucuguaaagguuuuuggaauuaugucugcugaauaauaaacuuuuuugaaauaauaaaucugguagaaaaaugagaucucaaaggcucuuuucagagccaccaaaaaaaaaaaaaaaaaaaaaaaaaaaaaaaaaaaaaaaaaaaaaaaaaaaaaaaaaaaaaaaaagaauu

SEQ ID NO: 34136 - RNA, 1778 nt, Artificial Sequence
  mRNA product Design b-4 (hSL-A64-N5) comprising derived and/or modified sequence from LASV(LASV253-NIG-2011;Clade II)__AIT17670__GPCmut8 (opt4)
aggagagucccgcagucggcguccagcggcucugcuuguucgugugugugucguugcaggccuuauucaagcuuaccaugggccagaucaucaccuucuuccaggaggugccccacgugaucgaggaggugaugaacaucgugcugaucgcccugagccugcuggccauccugaagggcaucuacaacguggccaccugcggccuguucggccuggugagcuuccugcugcugugcggcagaagcugcagcaccaccuacaagggcguguacgagcugcagacccuggagcuggacauggccagccugaacaugugcaugccccugagcugcaccaagaacaacagccaccacuacaucauggugggcaacgagaccggccuggagcugacccugaccaacaccagcaucaucaaccacaaguucugcaaccugagcgacgcccacaagaagaaccuguacgaccacgcccugaugagcaucaucagcaccuuccaccugagcauccccaacuucaaccaguacgaggccaugagcugcgacuucaacggcggcaagaucagcgugcaguacaaccugagccacaccuacgccguggacgccgccaaccacugcggcaccaucgccaacggcgugcugcagaccuucaugagaauggccuggggcggcagcuacaucgcccuggacagcggcaagggcagcugggacugcaucaugaccagcuaccaguaccugaucauccagaacaccaccugggaggaccacugccaguucagcagacccagccccaucggcuaccugggccugcugagccagagaaccagagacaucuacaucagcagaagacugcugggcaccuucaccuggacccugagcgacagcgagggcaacgagacccccggcggcuacugccugaccagauggaugcugaucgaggccgagcugaagugcuucggcaacaccgccguggccaagugcaacgagaagcacgacgaggaguucugcgacaugcugagacuguucgacuucugcaagcaggccaucagaagacugaaggcccccgcccagaugagcauccagcugaucaacaaggccgugaacgcccugaucaacgaccagcugaucaugaagaaccaccugagagacaucaugggcauccccuacugcaacuacagcaaguacugcuaccugaaccacaccgugaccggcagaaccagccugcccagaugcugccuggugagcaacggcagcuaccugaacgagacccacuucagcgacgacaucgagcagcaggccgacaacaugaucaccgagcugcugcagaaggaguacaucgacagacagggcaagaccccccugggccugguggaccuguucguguucagcaccagcuucuaccugaucagcaucuuccugcaccuggugaagauccccacccacagacacaucaucggcaagcccugccccaagccccacagacugaaccacaugggcaucugcagcugcggccuguacaagcaccccggcgugcccgugaaguggaagagaugaggacuaguaauaaggaaacuguaugaaugucugugggcaggaagugaagagauccuucuguaaagguuuuuggaauuaugucugcugaauaauaaacuuuuuugaaauaauaaaucugguagaaaaaugagaucucaaaggcucuuuucagagccaccaaaaaaaaaaaaaaaaaaaaaaaaaaaaaaaaaaaaaaaaaaaaaaaaaaaaaaaaaaaaaaaaagaauu

SEQ ID NO: 34137 - RNA, 1778 nt, Artificial Sequence
  mRNA product Design b-4 (hSL-A64-N5) comprising derived and/or modified sequence from LASV(LASV254-NIG-2011;Clade II)__AIT17674__GPCmut8 (opt4)
aggagagucccgcagucggcguccagcggcucugcuuguucgugugugugucguugcaggccuuauucaagcuuaccaugggccagaucaucaccuucuuccaggaggugccccacgugaucgaggaggugaugaacaucgugcugaucgcccugagccugcuggccauccugaagggcaucuacaacguggccaccugcggccuguucggccuggugagcuuccugcugcugugcggcagaagcugcagcaccaccuacaagggcguguacgagcugcagacccuggagcuggacaugaccaaccugaacaugugcaugccccugagcugcaccaagaacaacagccaccacuacaucauggugggcaacgagaccggccuggagcugacccugaccaacaccagcaucaucaaccacaaguucugcaaccugagcgacgcccacaagaagaaccuguacaaccacgcccugaugagcaucaucagcaccuuccaccugagcauccccaacuucaaccaguacgaggccaugagcugcgacuucaacggcggcaagaucagcgugcaguacaaccugagccacagcuacgccguggacgccgccaaccacugcggcaccaucgccaacggcgugcugcagaccuucaugagaauggccuggggcggcagcuacaucgcccuggacagcggcaagggcaacugggacugcaucaugaccagcuaccaguaccugaucauccagaacaccaccugggaggaccacugccaguucagcagacccagccccaucggcuaccugggccugcugagccagagaaccagagacaucuacaucagcagaagacugcugggcaccuucaccuggacccugagcgacagcgagggcaacgagacccccggcggcuacugccugaccagauggaugcugaucgaggccgagcugaagugcuucggcaacaccgccguggccaagugcaacgagaagcacgacgaggaguucugcgacaugcugagacuguucgacuucugcaagcaggccaucagaagacugaagacccccgcccaggccaacauccagcugaucaacaaggccgugaacgcccugaucaacgaccagcugaucaugaagaaccaccugagagacaucaugggcauccccuacugcaacuacagcaaguacugcuaccugaaccacaccgugaccggcaagaccagccugcccagaugcugccuggugagcaacggcagcuaccugaacgagacccacuucagcgacgacaucgagcagcaggccgacaacaugaucaccgagcugcugcagaaggaguacauggacagacagggcaagaccccccugggccugguggaccuguucguguucagcaccagcuucuaccugaucagcaucuuccugcaccuggugaagauccccacccacagacacgugaucggcaagcccugccccaagccccacagacugaaccacaugggcaucugcagcugcggccuguacaagcaccccggcgugcccgugaaguggaagagaugaggacuaguaauaaggaaacuguaugaaugucugugggcaggaagugaagagauccuucuguaaagguuuuuggaauuaugucugcugaauaauaaacuuuuuugaaauaauaaaucugguagaaaaaugagaucucaaaggcucuuuucagagccaccaaaaaaaaaaaaaaaaaaaaaaaaaaaaaaaaaaaaaaaaaaaaaaaaaaaaaaaaaaaaaaaaagaauu

SEQ ID NO: 34138 - RNA, 1778 nt, Artificial Sequence
  mRNA product Design b-4 (hSL-A64-N5) comprising derived and/or modified sequence from LASV(Nig08-A19;Clade III)__ADU56618__GPCmut8 (opt4)
aggagagucccgcagucggcguccagcggcucugcuuguucgugugugugucguugcaggccuuauucaagcuuaccaugggccagaucgugaccuucuuccaggaggugccccacgugaucgaggaggugaugaacaucgugcugaucgcccugagcauccuggccauccugaagggccuguacaacaucgccaccugcggccugaucggccuggugaccuuccugcugcugagcggcagaagcugcagcaugaccuacaagggcguguacgagcugcagacccuggagcugaacaugaacacccugaacaugugcaugccccugagcugcaccaagaacaacagccaccacuacaucauggugggcaacgagaccggccuggagcugacccugaccaacaccagccugcugcaccacaaguucugcaaccugagcgacgcccacaagaagaaccuguacgaccacacccugaugagcaucaucagcaccuuccaccugagcauccccaacuucaaccaguacgaggccaugagcugcgacuucaacggcggcaagaucaccgugcaguacaaccugagccacagcuacgccaucgacgccgccaaccacugcggcaccguggccaacggcgugcugcagaccuucaugagaauggccuggggcggcagcuacaucgcccuggacagcggcagaggcaagugggacugcaucaugaccagcuaccaguaccugaucauccagaacaccaccugggaggaccacugccaguucagcagacccagccccaucggcuaccugggccugcugagccagagaaccagagacaucuacaucagcagaagacugcugggcaccuucaccuggacccugagcgacagcgagggcaacgagacccccggcggcuacugccugaccagauggaugcugaucgaggccgagcugaagugcuucggcaacaccgccguggccaagugcaacgagaagcacgacgaggaguucugcgacaugcugagacuguucgacuucugcaagcaggccaucagaagacugaaggcccccgcccagaugagcauccagcugaucaacaaggccgugaacgcccugaucaacgaccagcugaucaugaagaaccaccugagagacaucaugggcauccccuacugcaacuacagcaaguacugcuaccugaaccacaccagcaccggcagaaccagccugcccagaugcugccuggugagcaacggcagcuaccugaacgagacccacuucagcgacgacaucgagcagcaggccgacaacaugaucaccgagaugcugcagaaggaguaccuggacagacagggcaagaccccccugggccugguggaccuguucguguucagcaccagcuucuaccugaucagcaucuuccugcaccuggugaagauccccacccacagacacaucgugggcaagcccugccccaagccccacagacugaaccacaugggcaucugcagcugcggccuguacaagcagcccggcgugcccgugagauggaagagaugaggacuaguaauaaggaaacuguaugaaugucugugggcaggaagugaagagauccuucuguaaagguuuuuggaauuaugucugcugaauaauaaacuuuuuugaaauaauaaaucugguagaaaaaugagaucucaaaggcucuuuucagagccaccaaaaaaaaaaaaaaaaaaaaaaaaaaaaaaaaaaaaaaaaaaaaaaaaaaaaaaaaaaaaaaaaagaauu

SEQ ID NO: 34139 - RNA, 1781 nt, Artificial Sequence
  mRNA product Design b-4 (hSL-A64-N5) comprising derived and/or modified sequence from LASV(G1180-SLE-2010;Clade IV)__AIT17168__GPCmut8 (opt4)
aggagagucccgcagucggcguccagcggcucugcuuguucgugugugugucguugcaggccuuauucaagcuuaccaugggccagaucgugaccuucuuccaggaggugccccacgugaucgaggaggugaugaacaucgugcugaucgcccugagcauccuggccgugcugaagggccuguacaacuucgccaccugcggccuggugggccugcugaccuuccugcugcugugcggcagaagcugcaccgccagcagauacaagggcguguacgagcugcagacccuggagcugaacauggagacccugaacaugugcaugccccugagcugcaccaagaacaacagccaccacuacaucauggugggcaacgagaccggccuggagcugacccugaccaacaccagcaucaucaaccacaaguucugcaaccugagcgacgcccacaagaagaaccuguacgaccacgcccugaugagcaucaucagcaccuuccaccugagcauccccaacuucaaccaguacgaggccaugagcugcgacuucaacggcggcaagaucagcgugcaguacaaccugagccacagcuacgccggcgacgccgccaaccacugcggcaccguggccaacggcgugcugcagaccuucaugagaauggccuggggcggcagcuacaucgcccuggacagcggccacggcagcugggacugcaucaugaccagcuaccaguaccugaucauccagaacaccaccugggaggaccacugccaguucagcagacccagccccaucggcuaccugggccugcugagccagagaaccagagacaucuacaucagcagaagacugcugggcaccuucaccuggacccugagcgacagcgagggcaaggacacccccggcggcuacugccugaccagauggaugcugaucgaggccgagcugaagugcuucggcaacaccgccguggccaagugcaacgagaagcacgacgaggaguucugcgacaugcugagacuguucgacuucugcaagcaggccauccagagacugaaggcccccgcccagaugagcauccagcugaucaacaaggccgugaacgcccugaucaacgaccagcugaucaugaagaaccaccugagagacaucaugggcauccccuacugcaacuacagcaaguacugcuaccugaaccacaccaccaccggcaagaccagccugcccaagugcugccuggugagcaacggcagcuaccugaacgagacccacuucagcgacgacaucgagcagcaggccgacaacaugaucaccgagaugcugcagaaggaguacauggagagacagggcaagaccccccugggccugguggaccuguucguguucagcaccagcuucuaccugaucagcaucuuccugcaccuggugaagauccccacccacagacacaucgugggcaagagcugccccaagccccacagacugaaccacaugggcaucugcagcugcggccuguacaagcagcccggcgugcccgugaaguggaagagaugaggacuaguaauaaggaaacuguaugaaugucugugggcaggaagugaagagauccuucuguaaagguuuuuggaauuaugucugcugaauaauaaacuuuuuugaaauaauaaaucugguagaaaaaugagaucucaaaggcucuuuucagagccaccaaaaaaaaaaaaaaaaaaaaaaaaaaaaaaaaaaaaaaaaaaaaaaaaaaaaaaaaaaaaaaaaagaauu

SEQ ID NO: 34140 - RNA, 1781 nt, Artificial Sequence
  mRNA product Design b-4 (hSL-A64-N5) comprising derived and/or modified sequence from LASV(G1442-SLE-2011;Clade IV)__AIT17180__GPCmut8 (opt4)
aggagagucccgcagucggcguccagcggcucugcuuguucgugugugugucguugcaggccuuauucaagcuuaccaugggccagaucgugaccuucuuccaggaggugccccacgugaucgaggaggugaugaacaucgugcugaucgcccugagcauccuggccgugcugaagggccuguacaacguggccaccugcggccugaucggccuggugaccuuccugcugcugugcggcagaagcugcaccaccacccuguacaagggcguguacgagcugcagacccuggagcugaacauggagacccugaacaugugcaugccccugagcugcaccaagaacaacagccaccacuacaucagagugggcaacgagaccggccuggagcugacccugaccaacaccagcaucaucaaccacaaguucugcaaccugagcgacgcccacaagaagaaccuguacgaccacgcccugaugagcaucaucagcaccuuccaccugagcauccccaacuucaaccaguacgaggccaugagcugcgacuucaacggcggcaagaucagcgugcaguacaaccugagccacagcuacgccggcgacgccgccaaccacugcggcaccguggccaacggcgugcugcagaccuucaugagaauggccuggggcggcagcuacaucgcccuggacagcggcagaggcaacugggacugcaucaugaccagcuaccaguaccugaucauccagaacaccaccugggacgaccacugccaguucagcagacccagccccaucggcuaccugggccugcugagccagagaaccagagacguguacaucagcagaagacugcugggcaccuucaccuggacccugagcgacagcgagggcaaggacacccccggcggcuacugccugaccagauggaugcugaucgaggccgagcugaagugcuucggcaacaccgccguggccaagugcaacgagaagcacgacgaggaguucugcgacaugcugagacuguucgacuucugcaagcaggccauccagagacugaaggcccccgcccagaugagcauccagcugaucaacaaggccgugaacgcccugaucaacgaccagcugaucaugaagaaccaccugagagacaucaugggcauccccuacugcaacuacagcaaguacugcuaccugaacaacaccgccaccggcaagaccagccugcccaagugcugccugaucagcaacggcagcuaccugaacgagacccacuucagcgacgacaucgagcaggaggccgacaacaugaucaccgagaugcugcagaaggaguacauggagagacagggcaagaccccccugggccugguggaccuguucguguucagcaccagcuucuaccugaucagcaucuuccugcaccuggugaagauccccacccacagacacaucgugggcaagagcugccccaagccccacagacugaaccacaugggcaucugcagcugcggccuguacaagcagcccggcgugcccgugagauggaagagaugaggacuaguaauaaggaaacuguaugaaugucugugggcaggaagugaagagauccuucuguaaagguuuuuggaauuaugucugcugaauaauaaacuuuuuugaaauaauaaaucugguagaaaaaugagaucucaaaggcucuuuucagagccaccaaaaaaaaaaaaaaaaaaaaaaaaaaaaaaaaaaaaaaaaaaaaaaaaaaaaaaaaaaaaaaaaagaauu

SEQ ID NO: 34141 - RNA, 1781 nt, Artificial Sequence
  mRNA product Design b-4 (hSL-A64-N5) comprising derived and/or modified sequence from LASV(G3010-SLE-2013;Clade IV)__AIT17344__GPCmut8 (opt4)
aggagagucccgcagucggcguccagcggcucugcuuguucgugugugugucguugcaggccuuauucaagcuuaccaugggccagaucgugaccuucuuccaggaggugccccacgugaucgaggaggugaugaacaucgugcugaucgcccugagcauccuggccgugcugaagggccuguacaacuucgccaccugcggccuggugggccuggugaccuuccugcugcugugcggcagaagcugcaccaccagccuguacaagggcguguacgagcugcagacccuggagcugaacauggagacccugaacaugugcaugccccugagcugcaccaagaacaacagccaccacuacaucauggugggcaacgagaccggccuggagcugacccugaccaacaccagcaucaucaaccacaaguucugcaaccugagcgacgcccacaagaagaaccuguacaaccacgcccugaugagcaucaucagcaccuuccaccugagcauccccaacuucaaccaguacgaggccaugagcugcgacuucaacggcggcaagaucagcgugcaguacaaccugagccacagcuacgccggcgacgccgccagccacugcggcaccguggccaacggcgugcugcagaccuucaugagaauggccuggggcggcagcuacaucgcccuggacagcggcuacggcaagugggacugcaucaugaccagcuaccaguaccugaucauccagaacaccaccugggaggaccacugccaguucagcagacccagccccaucggcuaccugggccugcugagccagagaaccagagacaucuacaucagcagaagacugcugggcaccuucaccuggacccugagcgacagcgagggcaaggacacccccggcggcuacugccugaccagauggaugcugaucgaggccgagcugaagugcuucggcaacaccgccguggccaagugcaacgagaagcacgacgaggaguucugcgacaugcugagacuguucgacuucugcaagcaggccauccagagacugaagacccccgcccagaugagcauccagcugaucaacaaggccgugaacgcccugaucaacgaccagcugaucaugaagaaccaccugagagacaucaugggcauccccuacugcaacuacagcaaguacugcuaccugaaccacaccaccaccggcaagaccagccugcccaagugcugccuggugagcaacggcagcuaccugaacgagacccacuucagcgacgacaucgagcagcaggccgacaacaugaucaccgagaugcugcagaaggaguacauggagagacagggcaagaccccccugggccugguggaccuguucguguucagcaccagcuucuaccugaucagcaucuuccugcaccuggugaagauccccacccacagacacaucgugggcaagagcugccccaagccccacagacugaaccacaugggcaucugcagcugcggccuguacaagcagcccggcgugcccgugagauggaagagaugaggacuaguaauaaggaaacuguaugaaugucugugggcaggaagugaagagauccuucuguaaagguuuuuggaauuaugucugcugaauaauaaacuuuuuugaaauaauaaaucugguagaaaaaugagaucucaaaggcucuuuucagagccaccaaaaaaaaaaaaaaaaaaaaaaaaaaaaaaaaaaaaaaaaaaaaaaaaaaaaaaaaaaaaaaaaagaauu

SEQ ID NO: 34142 - RNA, 1781 nt, Artificial Sequence
  mRNA product Design b-4 (hSL-A64-N5) comprising derived and/or modified sequence from LASV(G502-SLE-2009;Clade IV)__AIT17126__GPCmut8 (opt4)
aggagagucccgcagucggcguccagcggcucugcuuguucgugugugugucguugcaggccuuauucaagcuuaccaugggccagaucgugaccuucuuccaggaggugccccacgugaucgaggaggugaugaacaucgugcugaucgcccugagcauccuggccgugcugaagggccuguacaacuucgccaccugcggccuggugggccugcugaccuuccugcugcugugcggcagaagcugcaccaccggccuguacaagggcguguacgagcugcagacccuggagcugaacauggagacccugaacaugugcaugccccugagcugcaccaagaacaacagccaccacuacaucauggugggcaacgagaccggccuggagcugacccugaccaacaccagcaucaucaaccacaaguucugcaaccugagcgacgcccacaagaagaaccuguacgaccacgcccugaugagcaucaucagcaccuuccaccugagcauccccaacuucaaccaguacgaggccaugagcugcgacuucaacggcggcaagaucagcgugcaguacaaccugagccacagcuacgccggcgacgccgccgaccacugcggcaccguggccaacggcgugcugcagaccuucaugagaauggccuggggcggcagcuacaucgcccuggacagcggcagaggcagaugggacugcaucaugaccagcuaccaguaccugaucauccagaacaccaccugggaggaccacugccaguucagcagacccagccccaucggcuaccugggccugcugagccagagaaccagagacaucuacaucagcagaagacugcugggcaccuucaccuggacccugagcgacagcgagggcaaggacacccccggcggcuacugccugaccagauggaugcugaucgaggccgagcugaagugcuucggcaacaccgccguggccaagugcaacgagaagcacgacgaggaguucugcgacaugcugagacuguucgacuucugcaagcaggccauccagagacugaaggcccccgcccagaugagcauccagcugaucaacaaggccgugaacgcccugaucaacgaccagcuggugaugaagaaccaccugagagacaucaugggcauccccuacugcaacuacagcagauacugcuaccugaaccacaccaccaccggcagaaccagccugcccaagugcugccuggugagcaacggcagcuaccugaacgagacccacuucagcgacgacaucgagcagcaggccgacaacaugaucaccgagaugcugcagaaggaguacauggagagacagggcaagaccccccugggccugguggaccuguucguguucagcaccagcuucuaccugaucagcaucuuccugcaccuggugaagauccccacccacagacacaucgugggcaagagcugccccaagccccacagacugaaccacaugggcaucugcagcugcggccuguacaagcagcccggcgugcccgugaaguggaagagaugaggacuaguaauaaggaaacuguaugaaugucugugggcaggaagugaagagauccuucuguaaagguuuuuggaauuaugucugcugaauaauaaacuuuuuugaaauaauaaaucugguagaaaaaugagaucucaaaggcucuuuucagagccaccaaaaaaaaaaaaaaaaaaaaaaaaaaaaaaaaaaaaaaaaaaaaaaaaaaaaaaaaaaaaaaaaagaauu

SEQ ID NO: 34143 - RNA, 1781 nt, Artificial Sequence
  mRNA product Design b-4 (hSL-A64-N5) comprising derived and/or modified sequence from LASV(G733-SLE-2010;Clade IV)__AIT17154__GPCmut8 (opt4)
aggagagucccgcagucggcguccagcggcucugcuuguucgugugugugucguugcaggccuuauucaagcuuaccaugggccagaucgugaccuucuuccaggaggugccccacgugaucgaggaggugaugaacaucgugcugaucgcccugagcauccuggccgugcugaagggccuguacaacuucgccaccugcggcaucgugggccuggugagcuuccugcugcugugcggcagaagcugcaccaccagccuguacaagggcguguacgagcugcagacccuggagcugaacauggagacccugaacaugugcaugccccugagcugcaccaagaacaacagccaccacuacaucauggugggcaacgagaccggccuggagcugacccugaccaacaccagcaucaucaaccacaaguucugcaaccugagcgacgcccacaagaagaaccuguacgaccacgcccugaugagcaucaucagcaccuuccaccugagcauccccaacuucaaccaguacgaggccaugagcugcgacuucaacggcggcaagaucagcgugcaguacaaccugagccacagcuacgccggcgacgccgccaaccacugcggcaccaucgccaacggcgugcugcagaccuucaugagaauggccuggggcggcagcuacaucgcccuggacagcggcagagacagaugggacugcaucaugaccagcuaccaguaccugaucauccagaacaccaccugggaggaccacugccaguucagcagacccagccccaucggcuaccugggccugcugagccagagaaccagagacaucuacaucagcagaagacugcugggcaccuucaccuggacccugagcgacagcgagggcaaggacacccccggcggcuacugccugaccagauggaugcugaucgaggccgagcugaagugcuucggcaacaccgccguggccaagugcaacgagaagcacgacgaggaguucugcgacaugcugagacuguucgacuucugcaagcaggccauccagagacugaaggcccccgcccagaugagcauccagcugaucaacaaggccgugaacgcccugaucaacgaccagcugaucaugaagaaccaccugagagacaucaugggcauccccuacugcaacuacagcaaguacugcuaccugaaccacaccaccaccggcaagaccagccugcccaagugcugccuggugagcaacggcagcuaccugaacgagacccacuucagcgacgacaucgagcagcaggccgacaacaugaucaccgagaugcugcagaaggaguacauggagagacagggcaagaccccccugggccugguggaccuguucguguucagcaccagcuucuaccugaucagcaucuuccugcaccuggugaagauccccacccacagacacguggugggcaagagcugccccaagccccacagacugaaccacaugggcaucugcagcugcggccuguacggccagcccggcgugcccgugaaguggaagagaugaggacuaguaauaaggaaacuguaugaaugucugugggcaggaagugaagagauccuucuguaaagguuuuuggaauuaugucugcugaauaauaaacuuuuuugaaauaauaaaucugguagaaaaaugagaucucaaaggcucuuuucagagccaccaaaaaaaaaaaaaaaaaaaaaaaaaaaaaaaaaaaaaaaaaaaaaaaaaaaaaaaaaaaaaaaaagaauu

SEQ ID NO: 34144 - RNA, 1781 nt, Artificial Sequence
  mRNA product Design b-4 (hSL-A64-N5) comprising derived and/or modified sequence from MOPV/LASV reassortant(IGS-1;Clade IV)__AFY05576__GPCmut8 (opt4)
aggagagucccgcagucggcguccagcggcucugcuuguucgugugugugucguugcaggccuuauucaagcuuaccaugggccagaucgugaccuucuuccaggaggugccccacgugaucgaggaggugaugaacaucgugcugaucgcccugagcgugcuggccgugcugaagggccuguacaacuucgccaccugcggccuggugggccuggugaccuuccugcugcugugcggcagaagcugcaccaccagccuguacaagggcguguacgagcugcagacccuggagcugaacauggagacccugaacaugugcaugccccugagcugcaccaagaacaacagccaccacuacaucauggugggcaacgagaccggccuggagcugacccugaccaacaccagcaucaucaaccacaaguucugcaaccugagcgacgcccacaagaagaaccuguacgaccacgcccugaugagcaucaucagcaccuuccaccugagcauccccaacuucaaccaguacgaggccaugagcugcgacuucaacggcggcaagaucagcgugcaguacaaccugagccacagcuacgccggcgacgccgccaaccacugcggcaccguggccaacggcgugcugcagaccuucaugagaauggccuggggcggcagcuacaucgcccuggacagcggcagaggcaacugggacugcaucaugaccagcuaccaguaccugaucauccagaacaccaccugggaggaccacugccaguucagcagacccagccccaucggcuaccugggccugcugagccagagaaccagagacaucuacaucagcagaagacugcugggcaccuucaccuggacccugagcgacagcgagggcgaggacacccccggcggcuacugccugaccagauggaugcugaucgaggccgagcugaagugcuucggcaacaccgccguggccaagugcaacgagaagcacgacgaggaguucugcgacaugcugagacuguucgacuucugcaagcaggccauccagagacugaaggcccccgcccagaugagcauccagcugaucaacaaggccgugaacgcccugaucaacgaccagcugaucaugaagaaccaccugagagacaucaugggcauccccuacugcaacuacagcaaguacugcuaccugaaccacaccaccaccggcagaaccagccugcccaagugcugccuggugagcaacggcagcuaccugaacgagacccacuucagcgacgacaucgagcagcaggccgacaacaugaucaccgagaugcugcagaaggaguacauggagagacagggcaagaccccccugggccugguggaccuguucguguucagcaccagcuucuaccugaucagcaucuuccugcaccuggugaagauccccacccacagacacaucgugggcaagagcugccccaagccccacagacugaaccacaugggcaucugcagcugcggccuguacaagcagcccggcgugcccgugaaguggaagagaugaggacuaguaauaaggaaacuguaugaaugucugugggcaggaagugaagagauccuucuguaaagguuuuuggaauuaugucugcugaauaauaaacuuuuuugaaauaauaaaucugguagaaaaaugagaucucaaaggcucuuuucagagccaccaaaaaaaaaaaaaaaaaaaaaaaaaaaaaaaaaaaaaaaaaaaaaaaaaaaaaaaaaaaaaaaaagaauu

SEQ ID NO: 34145 - RNA, 1781 nt, Artificial Sequence
  mRNA product Design b-4 (hSL-A64-N5) comprising derived and/or modified sequence from LASV(LM765-SLE-2012;Clade IV)__AIT17814__GPCmut8 (opt4)
aggagagucccgcagucggcguccagcggcucugcuuguucgugugugugucguugcaggccuuauucaagcuuaccaugggccagaucgugaccuucuuccaggaggugccccacgugaucgaggaggugaugaacaucgugcugaucgcccugagcauccuggccgugcugaagggccuguacaacuucgccaccugcggccuggugggccuggugaccuuccugcugcugugcggcagaagcugcaccaccagccuguacaagggcguguacgagcugcagacccuggagcugaacauggagacccugaacaugugcaugccccugagcugcaccaagaacaacagccaccacuacaucauggugggcaacgagaccggccuggagcugacccugaccaacaccagcaucaucgaccacaaguucugcaaccugagcgacgcccacagaaagaaccuguacgaccacgcccugaugagcaucaucagcaccuuccaccugagcauccccaacuucaaccaguacgaggccaugagcugcgacuucaacggcggcaagaucagcgugcaguacaaccugagccacagcuacgccaaggacgccgccgaccacugcggcaccguggccaacggcgugcugcagaccuucaugagaauggccuggggcggcagcuacaucgcccuggacagcggcagaggcagaugggacugcaucaugaccagcuaccaguaccugaucauccagaacaccaccugggaggaccacugccaguucagcagacccagccccaucggcuaccugggccugcugagccagagaaccagagacaucuacaucagcagaagacugcugggcaccuucaccuggacccugagcgacagcgagggcaaggacacccccggcggcuacugccugaccagauggaugcugaucgaggccgagcugaagugcuucggcaacaccgccguggccaagugcaacgagaagcacgacgaggaguucugcgacaugcugagacuguucgacuucugcaagcaggccauccagagacugaaggcccccgcccagaugagcauccagcugaucaacaaggccgugaacgcccugaucaacgaccagcugaucaugaagaaccaccugagagacaucaugggcauccccuacugcaacuacagcaaguacugcuaccugaaccacaccaccaccggcaagaccagccugcccaagugcugccuggugagcaacggcagcuaccugaacgagacccacuucagcgacgacaucgagcagcaggccgacaacaugaucaccgagaugcugcagaaggaguacauggagagacagggcaagaccccccugggccugguggaccuguucguguucagcaccagcuucuaccugaucagcaucuuccugcaccuggugaagauccccacccacagacacaucgugggcaagcccugccccaagccccacagacugaaccacaugggcaucugcagcugcggccuguacaagcagcccggcgugcccgugaaguggaagagaugaggacuaguaauaaggaaacuguaugaaugucugugggcaggaagugaagagauccuucuguaaagguuuuuggaauuaugucugcugaauaauaaacuuuuuugaaauaauaaaucugguagaaaaaugagaucucaaaggcucuuuucagagccaccaaaaaaaaaaaaaaaaaaaaaaaaaaaaaaaaaaaaaaaaaaaaaaaaaaaaaaaaaaaaaaaaagaauu

SEQ ID NO: 34146 - RNA, 1781 nt, Artificial Sequence
  mRNA product Design b-4 (hSL-A64-N5) comprising derived and/or modified sequence from LASV(LM776-SLE-2012;Clade IV)__AIT17824__GPCmut8 (opt4)
aggagagucccgcagucggcguccagcggcucugcuuguucgugugugugucguugcaggccuuauucaagcuuaccaugggccagaucgugaccuucuuccaggaggugccccacgugaucgaggaggugaugaacaucgugcugaucgcccugagcauccuggccgugcugaagggccuguacaacuucgccaccugcggccuggugggccuggugaccuuccugcugcugugcggcagaagcugcaccaccagcguguacaagggcguguacgagcugcagacccuggagcugaacauggagacccugaacaugugcaugccccugagcugcaccaagaacaacagccaccacuacaucauggugggcaacgagaccggccuggagcugacccugaccaacaccagcaucaucaaccacaaguucugcaaccugagcgacgcccacaagaagaaccuguacgaccacgcccugaugagcaucaucagcaccuuccaccugagcauccccaacuucaaccaguacgaggccaugagcugcgacuucaacggcggcaagaucagcgugcaguacaaccugagccacagcuacgccggcgacgccgccaaccacugcggcaccguggccaacggcgugcugcagaccuucaugagaauggccuggggcggcagcuacaucgcccuggacagcggccacggcaagugggacugcaucaugaccagcuaccaguaccugaucauccagaacaccaccugggaggaccacugccaguucagcagacccagccccaucggcuaccugggccugcugagccagagaaccagagacaucuacaucagcagaagacugcugggcaccuucaccuggacccugagcgacagcgagggcaaggacacccccggcggcuacugccugaccagauggaugcugaucgaggccgagcugaagugcuucggcaacaccgccguggccaagugcaacgagaagcacgacgaggaguucugcgacaugcugagacuguucgacuucugcaagcaggccauccagagacugaaggcccccgcccagaugagcauccagcugaucaacaaggccgugaacgcccugaucaacgaccagcugaucaugaagaaccaccugagagacaucaugggcauccccuacugcaacuacagcaaguacugcuaccugaaccacaccaccaccggcaagaccagccugcccaagugcugccuggugagcaacggcagcuaccugaacgagacccacuucagcgacgacaucgagcagcaggccgacaacaugaucaccgagaugcugcagaaggaguacauggagagacagggcaagaccccccugggccugguggaccuguucguguucagcaccagcuucuaccugaucagcaucuuccugcaccuggugaagauccccacccacagacacaucgugggcaagagcugccccaagccccacagacugaaccacaugggcaucugcagcugcggccuguacaagcagcccggcgugcccgugagauggaagagaugaggacuaguaauaaggaaacuguaugaaugucugugggcaggaagugaagagauccuucuguaaagguuuuuggaauuaugucugcugaauaauaaacuuuuuugaaauaauaaaucugguagaaaaaugagaucucaaaggcucuuuucagagccaccaaaaaaaaaaaaaaaaaaaaaaaaaaaaaaaaaaaaaaaaaaaaaaaaaaaaaaaaaaaaaaaaagaauu

SEQ ID NO: 34147 - RNA, 1781 nt, Artificial Sequence
  mRNA product Design b-4 (hSL-A64-N5) comprising derived and/or modified sequence from LASV(Mad39;Clade IV)__ANH09722__GPCmut8 (opt4)
aggagagucccgcagucggcguccagcggcucugcuuguucgugugugugucguugcaggccuuauucaagcuuaccaugggccagaucgugaccuucuuccaggaggugccccacgugaucgaggaggugaugaacaucgugcugaucgcccugagcauccuggccgugcugaagggccuguacaacguggccaccugcggccugaucggccuggugaccuuccugcugcugugcggcagaagcugcaccaccacccuguacaagggcguguacgagcugcaggcccuggagcugaacauggagacccugaacaugugcaugccccugagcugcaccaagaacaacagccaccacuacaucagagugggcaacgagaccggccuggagcugacccugaccaacaccagccugaucaaccacaaguucugcaaccugagcgacgcccacaagaagaaccuguacgaccacgcccugaugagcaucaucagcaccuuccaccugagcauccccaacuucaaccaguacgaggccaugagcugcgacuucaacgacggcaagaucagcgugcaguacaaccugagccacaccuacgccggcgacaccgccaaccacugcggcaccguggccaacggcgugcugcagaccuucaugagaauggccuggggcggcagcuacaucgcccuggacagcggcagaggcggcugggacugcaucaugaccagcuaccaguaccugaucauccagaacaccaccugggaggaccacugccaguucagcagacccagccccaucggcuaccugggccugcugagccagagaaccagagacaucuacaucagcagaagacugcugggcaccuucaccuggacccugagcgacagcgagggcaaggacacccccggcggcuacugccugaccagauggaugcugaucgaggccgagcugaagugcuucggcaacaccgccguggccaagugcaacgagaagcacgacgaggaguucugcgacaugcugagacuguucgacuucugcaagcaggccauccagagacugaaggcccccgcccagaugagcauccagcugaucaacaaggccgugaacgcccugaucaacgaccagcugaucaugaagaaccaccugagagacaucaugggcauccccuacugcaacuacagcaaguacugcuaccugaaccacaccgugaccggcaagaccagccugcccaagugcugccuggugagcaacggcagcuaccugaacgagacccacuucagcgacgacaucgagcagcaggccgacaacaugaucaccgagaugcugcagaaggaguacauggagagacagggcaagaccccccugggccugguggaccuguucguguucagcaccagcuucuaccugaucagcaucuuccugcaccuggugaagauccccacccacagacacguggugggcaagcccugccccaagccccacagacugaaccacaugggcaucugcagcugcggcuucuacaagcagcccggcgugcccgugagauggaagagaugaggacuaguaauaaggaaacuguaugaaugucugugggcaggaagugaagagauccuucuguaaagguuuuuggaauuaugucugcugaauaauaaacuuuuuugaaauaauaaaucugguagaaaaaugagaucucaaaggcucuuuucagagccaccaaaaaaaaaaaaaaaaaaaaaaaaaaaaaaaaaaaaaaaaaaaaaaaaaaaaaaaaaaaaaaaaagaauu

SEQ ID NO: 34148 - RNA, 1781 nt, Artificial Sequence
  mRNA product Design b-4 (hSL-A64-N5) comprising derived and/or modified sequence from LASV(Z0947-SLE-2011;Clade IV)__AIT17840__GPCmut8 (opt4)
aggagagucccgcagucggcguccagcggcucugcuuguucgugugugugucguugcaggccuuauucaagcuuaccaugggccagaucgugaccuucuuccaggaggugccccacgugaucgaggaggugaugaacaucgugcugaucgcccugagcauccuggccgugcugaagggccuguacaacuucgccaccugcggccuggugggccuggugaccuuccugcugcugugcggcagaagcugcaccaucagccuguacaagggcguguacgagcugcagacccuggagcugaacauggagacccugaacaugugcaugccccugagcugcaccaagaacaacagccaccacuacaucauggugggcaacgagaccggccuggagcugacccugaccaacaccagcaucaucaaccacaaguucugcaaccugagcgacgcccacaagaagaaccuguacgaccacgcccugaugagcaucaucagcaccuuccaccugagcauccccaacuucaaccaguacgaggccaugagcugcgacuucaacggcggcaagaucagcgugcaguacaaccugagccacagcuacgccggcgacgccgccaaccacugcggcaccguggccaacggcgugcugcagaccuucaugagaauggccuggggcggcagcuacaucgcccuggacagcggcagagacagaugggacugcaucaugaccagcuaccaguaccugaucauccagaacaccaccugggaggaccacugccaguucagcagacccagccccaucggcuaccugggccugcugagccagagaaccagagacaucuacaucagcagaagacugcugggcaccuucaccuggacccugagcgacagcgagggcaaggacacccccggcggcuacugccugaccagauggaugcugaucgaggccgagcugaagugcuucggcaacaccgccguggccaagugcaacgagaagcacgacgaggaguucugcgacaugcugagacuguucgacuucugcaagcaggccauccagagacugaaggcccccgcccagaugagcauccagcugaucaacaaggccgugaacgcccugaucaacgaccagcugaucaugaagaaccaccugagagacaucaugggcauccccuacugcaacuacagcaaguacugcuaccugaaccacaccaccaccggcaagaccagccugcccaagugcugccuggugagcaacggcagcuaccugaacgagacccacuucagcgacgacaucgagcagcaggccgacaacaugaucaccgagaugcugcagaaggaguacauggagagacagggcaagaccccccugggccugguggaccuguucguguucagcaccagcuucuaccugaucagcaucuuccugcaccuggugaagauccccacccacagacacaucgugggcaagcccugccccaagccccacagacugaaccacaugggcaucugcagcugcggccuguacaagcagcccggcgugcccgugaaguggaagagaugaggacuaguaauaaggaaacuguaugaaugucugugggcaggaagugaagagauccuucuguaaagguuuuuggaauuaugucugcugaauaauaaacuuuuuugaaauaauaaaucugguagaaaaaugagaucucaaaggcucuuuucagagccaccaaaaaaaaaaaaaaaaaaaaaaaaaaaaaaaaaaaaaaaaaaaaaaaaaaaaaaaaaaaaaaaaagaauu

SEQ ID NO: 34149 - RNA, 1781 nt, Artificial Sequence
  mRNA product Design b-4 (hSL-A64-N5) comprising derived and/or modified sequence from LASV(Josiah;Clade IV)__NP_694870__GPCmut8 (opt5)
aggagagucccgcagucggcguccagcggcucugcuuguucgugugugugucguugcaggccuuauucaagcuuaccaugggccagaucgugaccuucuuucaagaggucccccacguuauugaagaggugaugaacaucgugcugauugcccucagcguccuggcugugcuuaaggggcuguacaauuucgccacaugcggacucguuggccuggugacguuucuucugcucugugggagauccugcaccacaucucuguauaaaggagucuacgaacugcagacccucgagcugaacauggaaacacuuaauauguguaugccucugagcugcaccaagaacaauucccaucacuauaucauggugggcaacgagacagggcucgagcugacccuuacgaauaccucuauuaucaaccauaaauucuguaaucugagcgacgcgcacaagaaaaaccucuacgaucaugcucugauguccaucauuucuacauuucaccugagcaucccgaauuucaaccaguaugaagccauguccugcgacuuuaauggaggcaagauuagcguucaguacaaccucucucacuccuaugccggcgaugcugccaaucauugugggaccguggcuaacggaguccugcaaacauucaugcggauggccuggggcgggagcuacaucgcgcuugacucuggacgcggcaacugggauugcauuaugaccuccuaccaguaucugaucauucagaauacgacaugggaggaccacugucaguuuagcagacccucuccuaucggguaccucggacugcuuucccaacggacccgcgauaucuauauuagcagacggcugcucggcacauucaccuggacccuguccgacucugaaggcaaggauacacccgggggauacugccugacgcgcuggaugcucaucgaggccgagcugaaauguuuuggcaacaccgcuguggccaagugcaaugaaaaacaugacgaggaguucugcgauaugcuuagacuguuugacuucuguaagcaggcuauucagcggcucaaagccccugcgcagaugagcauccaacugauuaacaaggccgugaaugcucuuaucaacgaucagcugaucaugaagaaucaccuccgcgacauuauggggauccccuauugcaacuacuccaaauauuguuaccugaaucacacaaccacaggaagaaccagccugccuaagugcugucucgucucuaacggcuccuaccugaaugaaacgcauuucagcgacgauauugaacagcaagccgacaacaugaucacagagaugcuucagaaagaguauauggaacggcaggggaagaccccgcugggacucguugaucuguuuguguucucuaccagcuuuuaccugauuuccaucuuccuucaccucgugaaaauccccacacaucgccacauugucggcaagucuugcccuaaaccccauagacugaaucacaugggcaucuguagcugcgggcuguauaagcagccuggagugcccguuaaguggaaacggugaggacuaguaauaaggaaacuguaugaaugucugugggcaggaagugaagagauccuucuguaaagguuuuuggaauuaugucugcugaauaauaaacuuuuuugaaauaauaaaucugguagaaaaaugagaucucaaaggcucuuuucagagccaccaaaaaaaaaaaaaaaaaaaaaaaaaaaaaaaaaaaaaaaaaaaaaaaaaaaaaaaaaaaaaaaaagaauu

SEQ ID NO: 34150 - RNA, 1778 nt, Artificial Sequence
  mRNA product Design b-4 (hSL-A64-N5) comprising derived and/or modified sequence from LASV(LP;Clade I)__AAF86701__GPCmut8 (opt5)
aggagagucccgcagucggcguccagcggcucugcuuguucgugugugugucguugcaggccuuauucaagcuuaccaugggccagaucauuaccuucuuucaagaggugccccacgucaucgaagagguuaugaacauugugcugaucgcccucagccugcuugcuauucugaaggggcucuacaauaucgccacaugcggaaucauuggccugguggcguuccuuuuucugugugggaaauccugcucucucacgcugaagggaggcuaugaacugcagacccucgagcugaacauggaaacacuuaauauguguaugccucugagcugcaccaaaaacuccucucaucacuacaucagagucgggaaugagacaggacucgagcugacccuuacaaacaccagcauuaucaaucauaaguucuguaaccuguccgacgcucacaaaaagaaucucuaugaucaugcccugaugucuauuaucagcacguuucaccuguccauuccgaacuucaaucaguacgaagccaugagcugcgacuuuaacggcggcaagaucucugugcaguauaaucucucccacagcuacgcuggggaugccgcugagcauuguggaaccguugccaacggcgugcugcaaacauucaugcggauggcguggggagggcgcuauaucgcccuugacucuggcaaagggaauugggauugcauuaugaccuccuaccaguaccugaucauucagaacacaaccugggaagaccacugucaguuuagcagacccucuccuaucggauaucucggccugcuuucccaacggacgcgcgauauuuacaucagcagacggcugcucggcacauucaccuggacacuguccgacucugaggggaacgagacccccggaggcuauugccugacccgcuggaugcucaucgaagcugagcugaaguguuuugggaauacagccgucgcuaaaugcaacgaaaagcaugaugaggaguucugcgacaugcuuagacuguuugauuucuguaaacaggccauucggcgccucaaggcgccugcccagaugagcauccagcugauuaauaaggcugugaacgcccuuaucaaugaccaacugauuaugaaaaaccaccucagagauaucaugggaauccccuacugcaauuauuccaaguacuguuaucugaaccacacgagcucuggccggaccucccugccuaaaugcugucucauuagcaaugggucuuaccugaacgaaacacaguucagcgacgacaucgagcagcaagcugauaauaugauuaccgaaaugcuucagaaggaguacaucgaacgccagggaaaaacaccgcugggccucguugacauuuuuaucuucuccaccucuuuuuaucugauuagcaucuuccugcaucuuaucaagauucccacgcacagacauaucgugggcaaaccuugccccaagccucaccggcucaaccauaugggggucuguuccugcggacuguacaagcaccccggcgugccgacaaaauggaagcgcugaggacuaguaauaaggaaacuguaugaaugucugugggcaggaagugaagagauccuucuguaaagguuuuuggaauuaugucugcugaauaauaaacuuuuuugaaauaauaaaucugguagaaaaaugagaucucaaaggcucuuuucagagccaccaaaaaaaaaaaaaaaaaaaaaaaaaaaaaaaaaaaaaaaaaaaaaaaaaaaaaaaaaaaaaaaaagaauu

SEQ ID NO: 34151 - RNA, 1778 nt, Artificial Sequence
  mRNA product Design b-4 (hSL-A64-N5) comprising derived and/or modified sequence from LASV(803213;Clade II)__AAF86703__GPCmut8 (opt5)
aggagagucccgcagucggcguccagcggcucugcuuguucgugugugugucguugcaggccuuauucaagcuuaccaugggccagaucauuaccuucuuucaagaggugccccacgucaucgaagagguuaugaacauugugcugaucgcccucagccugcuugcuauucugaaggggaucuacaauguggccacaugcggacucuucggccugaucuccuuucuucugcucugugggagaucuugcagcgucacguauaaaggaguguacgaacugcagacccuggagcucaacauggcgaaucugaacauguguaugccucuuuccugcacaaagaauaacucucaucacuauauuaugguuggcaaugaaaccgggcuggagcucacacugaccaacacaagcaucauuaaucauaaauucuguaaccuuuccgacgcucacaagaaaaaucuguacgaucaugcccucaugucuaucauuagcaccuuucaccuguccaucccgaacuucaaucaguaugaggccaugagcugcgacuuuaacggaggcaagauuucugugcaguacaaucugucccacagcuucgcugucgaugccgcuaaccauuguggcacgaucgccaacggggugcuccaaaccuuuaugcggauggcguggggaggcucuuauaucgcccuggacuccgggaagggaaauugggauugcauuaugacaagcuaccaguaccuuaucauucagaacaccacaugggaagaccacugucaguucucucgccccuccccuaucggcuaucuggggcuccugagccaaagaacccgggauauuuacaucucccgcagacuucugggaacguuuacauggacccucucugacagcgagggcaaugaagcucccggcggguauugccugacacgguggaugcugaucgaggccgagcucaaauguuucggaaacaccgcuguugccaagugcaaugaaaaacaugaugaggaauuuugcgacaugcugcgccuuuucgauuucuguaagcaggcgauuaaaagacugaagaccccugcccagauguccauccagcucauuaacaaggcugugaaugcccugaucaacgaccaacuuauuaugaaaaaucaucugcgggauaucaugggcauccccuacugcaacuauagccgcuacuguuaucucaaucacacagucacggggaagaccucucugccuagaugcugucugguguccaacggaagcuaccucaaugagacacacuuuucugacgacauugaacagcaggcugauaacaugaucaccgagaugcugcaaaaagaguacauggaccggcagggcaagacaccgcuugggcugguggaucucuucgucuuuagcaccuccuucuaucugauuucuaucuuucugcaccuuguuaaaauucccacgcaucgccacaucgugggaaagccuugccccaaaccucauagacucaaucacaugggcauuuguagcugcggccuguacaagcaccccggggugccggucaaguggaaacggugaggacuaguaauaaggaaacuguaugaaugucugugggcaggaagugaagagauccuucuguaaagguuuuuggaauuaugucugcugaauaauaaacuuuuuugaaauaauaaaucugguagaaaaaugagaucucaaaggcucuuuucagagccaccaaaaaaaaaaaaaaaaaaaaaaaaaaaaaaaaaaaaaaaaaaaaaaaaaaaaaaaaaaaaaaaaagaauu

SEQ ID NO: 34152 - RNA, 1778 nt, Artificial Sequence
  mRNA product Design b-4 (hSL-A64-N5) comprising derived and/or modified sequence from LASV(GA391;Clade III)__CAA36645__GPCmut8 (opt5)
aggagagucccgcagucggcguccagcggcucugcuuguucgugugugugucguugcaggccuuauucaagcuuaccaugggccagaucgugaccuucuuucaagaggucccccacguuauugaagaggugaugaacaucgugcugauugcccucagcauccuggcuauucuuaaggggcuguacaaugucgccacaugcggacucaucggccuggugacguuccuucugcucuccgggagaucuuguagccugaucuauaaaggaaccuacgaacugcagacacucgagcugaacauggaaacccuuaauaugugcaugccucuguccuguacaaagaacaauucucaucacuauauucggguuggcaacgagaccgggcucgagcugacacuuaccaauacgagcauccugaaccauaaauuuugcaaucucuccgacgcgcacaagcgcaaccuguacgaucauucucugaugagcauuaucuccaccuuccaccucagcauuccgaauuuuaaccaguaugaagcuaugucuugugacuucaauggaggcaaaaucacagugcaguacaaccugucccacagcuuugccgucgaugccgcuggccauugcgggacccuugccaauggagugcugcaaacauucaugagaauggcuuggggcgggucuuauauugcccucgacuccggacggggcaacugggauuguaucaugaccagcuaccaguaccugaucauucagaacacgacaugggacgaucacugccaguuuucucgccccuccccuaucggguaucuuggacugcucagccaaagaacccgggacauuuacaucucccgcagacugcugggcacauucaccuggacccucucugauagcgagggcaaugaaacacccgggggauauugucugacgcgguggaugcuuauugaggcggagcugaagugcuuuggcaacaccgccguugcuaaguguaaugaaaaacaugacgaggaguucugcgauaugcuccgccuguuugacuucugcaagcaggccaucagacggcuuaaaaccccugcucagauguccauccagcugauuaacaaggccgugaaugcgcucaucaacgaucaacugauuaugaaaaaucaucugcgcgacaucauggggauucccuacuguaacuauagcagauacugcuaucucaaucacacaucuacaggaaagaccucccugccucgguguugccuuaucagcaacggcucuuaccugaaugaaacgaaguucagcgacgauaucgaacagcaggccgacaacaugauuacagagaugcuccaaaaagaguacaucgaucgccaggggaagaccccgcugggacuggucgaccuuuuuguguucuccaccucuuuuuaucucauuagcaucuuccugcaccuggugaaaauucccacacacagacauaucgucggcaagccuugucccaaaccucaccggcucaaucauaugggcauuugcuccugugggcuguacaagcagcccggaguuccggugagauggaaacgcugaggacuaguaauaaggaaacuguaugaaugucugugggcaggaagugaagagauccuucuguaaagguuuuuggaauuaugucugcugaauaauaaacuuuuuugaaauaauaaaucugguagaaaaaugagaucucaaaggcucuuuucagagccaccaaaaaaaaaaaaaaaaaaaaaaaaaaaaaaaaaaaaaaaaaaaaaaaaaaaaaaaaaaaaaaaaagaauu

SEQ ID NO: 34153 - RNA, 1781 nt, Artificial Sequence
  mRNA product Design b-4 (hSL-A64-N5) comprising derived and/or modified sequence from LASV(AV;Clade V)__CCA30314__GPCmut8 (opt5)
aggagagucccgcagucggcguccagcggcucugcuuguucgugugugugucguugcaggccuuauucaagcuuaccaugggccagaucgugaccuucuuucaagaggucccccacguuauugaagaggugaugaacaucgugcugauugcccucagcauccuggcuguccuuaaggggcuguacaauauugccacaugcggacucaucggccugaucacguuccuucugcucugugggagauccugcucuagcaaccuguauaaaggaguguacgaacugcagucccucgaccugaauauggagacccuuaacauguguaugccucugucuugcacaaagaauaacagccaucacuauauucggguuggcaaugauaccgggcucgaacugacacuuaccaacacauccauccugaaucauaaauuuuguaaccucucugacgcgcacaagaaagaucuguacgaccaugcucugaugagcauuaucuccaccuuccaccucagcauuccgaauuuuaaccaguaugaggccaugucuugcgauuucaauggaggcaagaucuccgugcaguacaaccugagccacucuuaugccauugacgcugccaaucauuguggcacggucgcuaacgggauccuucaaaccuuuaugcgcauggccuggggaggcuccuacaucgcgcuggauagcgggagaggaaacugggacugcauuaugacaucuuaccaguaucucaucauucagaauaccacaugggagaaccacugucaguucucccggcccagcccuaucggcuaccuggggcuucugucccaacgcaccagagauauuuauaucucucggcgccuccugggaacguuuacauggacccugagcgacuccgaaggcaaugccacacccggcggguacugccucaccagauggaugcugaucgaggcugaacuuaaguguuucggaaacaccgccguggcuaaaugcaaugagaagcaugaugaggaauuuugcgacaugcugcgccucuucgauuuuuguaaacaggccauuagccggcugaagucuccugcgcagauguccauccagcuuauuaacaaagccguuaaugcucugaucaacgaccaacucauuaugaagaaucaccugagagacaucaugggcauccccuauugcaacuacagcaaguauuguuaccugaaucacacaauuacggggaaaaccucucucccuaagugcugucuggugagcaacggauccuaccuuaaugagacacauuucucugaugacaucgaacagcaggccgauaacaugauuaccgagaugcugcaaaaagaauauauggagcggcagggcaagacaccgcucgggcuggucgaccuguucguguuuagcaccuccuucuaccuuaucagcauuuuucuccgccuggugaaaauccccacgcacagacauauugucggaaagccuugccccaaaccucaccggcugaaucauaugggcaucuguucuugcggccucuauaagcagcccgggguuccggugcgcuggaagagaugaggacuaguaauaaggaaacuguaugaaugucugugggcaggaagugaagagauccuucuguaaagguuuuuggaauuaugucugcugaauaauaaacuuuuuugaaauaauaaaucugguagaaaaaugagaucucaaaggcucuuuucagagccaccaaaaaaaaaaaaaaaaaaaaaaaaaaaaaaaaaaaaaaaaaaaaaaaaaaaaaaaaaaaaaaaaagaauu

SEQ ID NO: 34154 - RNA, 1778 nt, Artificial Sequence
  mRNA product Design b-4 (hSL-A64-N5) comprising derived and/or modified sequence from LASV(Togo/2016/7082;Clade VI)__AMR44577__GPCmut8 (opt5)
aggagagucccgcagucggcguccagcggcucugcuuguucgugugugugucguugcaggccuuauucaagcuuaccaugggccagaucauuaccuucuuucaagaggugccccacgucaucgaagagguuaugaacauugugcugaucgcccucagccugcuugcuauucugaaggggguguacaaugucgccacaugcggaaucaucggccucgugacguuccuguuucuuugugggagauccugcucucugauuuauaaaggaagcuacgaacuccagacccuggagcugaacauggaaacacucaauauguguaugccucuguccugcaccaagaacucuagccaucacuauauccggguuggcaaugagacagggcuugagcugacccucacaaacaccuccauuaucaaucauaaauucuguaaccugucugacgcgcacaagcgcaaucuuuacgaucaugcucugaugagcauucucuccacguuucaccugagcaucccgaacuucaaucaguaugaagccaugucuugcgacuuuaacggaggcaaaauuuccgugcaguacaaucugagccacgccuaugcugucgaugccgcugagcauuguggcaccguggccaacgggguucuccaaacauucaugagaauggcguggggaggcucuuacaucgcccuggacuccgggcggggaaauugggauugcaucaugaccagcuaccaguaucuuauuauccagaacacaaccugggaagaccacugucaguuuucucgccccuccccuauuggcuaccuggggcuccugagccaaagaacgcgggauaucuauauuucccgcagacuucugggaacauucaccuggacacucucugacagcgagggcaacgagacccccggcggguacugccugacccgguggaugcugaucgaagcugagcucaaguguuuuggaaauacagccguggcuaagugcaacgaaaaacaugaugaggaguucugcgacaugcugcgccuuuuugauuucuguaagcaggccauccagagacugaaauccccugcgcagaugagcauucaacucaucaauaaggccgucaacgcucugauuaaugaccagcuuaucaugaaaaaccaucugcgggauaugaugggcauucccuauugcaauuacucuaaguauuguuaccucaaccacacguccagcgggcgcaccucucugccuaagugcugucuggugagcaauggauccuaccucaacgaaacacacuucucugacgacaucgagcagcaagccgauaauaugaucaccgaaaugcugcagaaagaguauauugacagacagggcaagacaccgcuugggcugguggaucucuuugucuucagcaccuccuuuuaccugaucagcauuuuccugcaccuuaucaaaauucccacgcaucggcacaucguuggaaagccuugccccaaaccucaucgccucaaccacaugggcauuuguucuugcggccuguauaagcagcccggggugccgacaagauggaaacggugaggacuaguaauaaggaaacuguaugaaugucugugggcaggaagugaagagauccuucuguaaagguuuuuggaauuaugucugcugaauaauaaacuuuuuugaaauaauaaaucugguagaaaaaugagaucucaaaggcucuuuucagagccaccaaaaaaaaaaaaaaaaaaaaaaaaaaaaaaaaaaaaaaaaaaaaaaaaaaaaaaaaaaaaaaaaagaauu

SEQ ID NO: 34155 - RNA, 1778 nt, Artificial Sequence
  mRNA product Design b-4 (hSL-A64-N5) comprising derived and/or modified sequence from LASV(KAK-428;Clade n.d. (VII))__ANH09740__GPCmut8 (opt5)
aggagagucccgcagucggcguccagcggcucugcuuguucgugugugugucguugcaggccuuauucaagcuuaccaugggccagaucgugaccuucuuucaagaggucccccacguuauugaagaggugaugaacaucgugcugauugcccucagccugcuugcuauccugaaggggcucuacaauuucgccacaugcggagucauuggccugaucacguuucuucugcucugugggagauccugcucugcgaccuauaaaggacaguacgaacugcagacacuggagcucaacauggaaagccugaauauguguaugccucuuuccugcaccaagaacaauucucaucacuauauccgggcuggcaacaauacagggcuggagcucacccugacaaacaccagcauuaucucccauaaauucuguaaucuuucugacgcccacaagaaaaaccuguacgaucauacgcucaugagcauuaucaccacauuucaccuguccauuccgaauuucaaccaguaugaggccaugagcugcgacuuuaauggaggcaagaucucuauucaauacaaccugucccacagcuaugcuggcgaugccgcucagcauugugggaccguggccaauggaguucuccagacauucaugcgcauggcguggggcgggucuuaccuggcccuugacuccggaagacggggcugggauugcaucaucagcucuuaccaguaucugauuauccaaaacaccacgugggacgaucacugucaguuuucccgccccagcccuauuggguaccucggauucgugucccagaagacaagagacaucuauauuucucggcgccugcuuggcaccuuuacauggacccugagcgauuccgaaggccaugacaugcccgggggauacugccucaccagauggaugcugaucgaggcugaucugaaauguuucggcaacacagccgucgcuaagugcaaugaaaaacacgacgaggaguuuugcgauauguggcgccucuucgacuucuguaagcaggccauccaacggcugaaagcgccugcccagaugaacauucagcuuaucaauaaggcugugaacgcccugauuaaugaccaacucaugaugaagaaccaccugagagauaucauggggauucccuauugcaauuacagcaaauuuuguuaucuuaacaauacgaccacaggacggaccucucugccucgcugcugucucaucuccaacggcagcuaccugaaugaaacacauuucucugacgauaucgagcagcaggcugacaacaugauuaccgaaaugcugcagaaggaguacauggauagacaagggaaaacgccgcucggacugguugaccuuuuuguguucagcacauccuuuuaucugaucaccauuuuccuccaccuggucaagauccccacccaucggcacauugugggcaaaccuugccccaagccucaucgccugaaucacaugggcaucuguucuugcgggcuuuacaaacagcccggagugccggucagauggaagcggugaggacuaguaauaaggaaacuguaugaaugucugugggcaggaagugaagagauccuucuguaaagguuuuuggaauuaugucugcugaauaauaaacuuuuuugaaauaauaaaucugguagaaaaaugagaucucaaaggcucuuuucagagccaccaaaaaaaaaaaaaaaaaaaaaaaaaaaaaaaaaaaaaaaaaaaaaaaaaaaaaaaaaaaaaaaaagaauu

SEQ ID NO: 34156 - RNA, 1778 nt, Artificial Sequence; identical to SEQ ID NO: 34150
  mRNA product Design b-4 (hSL-A64-N5) comprising derived and/or modified sequence from LASV(Pinneo-NIG-1969;Clade I)__AIT17836__GPCmut8 (opt5)

SEQ ID NO: 34157 - RNA, 1778 nt, Artificial Sequence
  mRNA product Design b-4 (hSL-A64-N5) comprising derived and/or modified sequence from LASV(ISTH0009-NIG-2011;Clade II)__AIT17404__GPCmut8 (opt5)
aggagagucccgcagucggcguccagcggcucugcuuguucgugugugugucguugcaggccuuauucaagcuuaccaugggccagaucauuaccuucuuucaagaggugccccacgucaucgaagagguuaugaacauugugcugaucgcccucagccugcuugcuauucugaaggggaucuacaauguggccacaugcggacucuucggccuggucuccuuucuucugcucugugggagaucuugcagcacgaccuauaaaggaguguacgaacugcagacacuggagcucgacauggcgucccugaacauguguaugccucuuucuugcaccaagaauaacagccaucacuauaucaugguuggcaaugaaacagggcuggagcucacccugacaaacaccuccauuaucaaucauaaauucuguaaccuuucugaugcucacaagaaaaaucuguacgaccaugcccucaugagcauuaucuccacguuucaccugagcauuccgaacuucaaucaguaugaggccaugucuugcgauuuuaacggaggcaagaucuccgugcaguacaaucugagccacgcuuaugccgucgacgcugccaaccauuguggcaccauugcgaauggggugcuccaaacauucaugcggauggccuggggaggcucuuacaucgcucuggauuccgggaagggaagcugggacugcaucaugaccucuuaccaguaucuuauuauccagaacacaaccugggaagaucacugucaguuuucccgccccagcccuauuggcuaccuggggcuccugucccaaagaacgcgggacaucuauauuucucgcagacuucugggaacauucaccuggacacucagcgauuccgagggcaacgaaacccccggcggguacugccugacccgguggaugcugaucgaggccgagcucaaauguuuuggaaauacagcuguugccaagugcaacgaaaaacaugacgaggaguucugcgauaugcugcgccuuuuugacuucuguaagcaggcgaucagacggcugaaaacgccugcccagaugagcauucagcucaucaauaaggcugugaacgcccugauuaaugaucaacuuaucaugaagaaccaucugcgcgacauuaugggcauccccuauugcaauuacucuaaauauuguuaccucaaccacaccgucacagggaagaccucccugccuagaugcugucuggugagcaauggaucuuaccucaacgaaacacacuucagcgacgauaucgaacagcaggcugacaauaugauuaccgagcugcuucaaaaagaguauauggaucggcagggcaagacgccgcuggggcucguggaccuguuugucuucuccacaucuuuuuaccugaucagcauuuuccuucaccucaucaaaauucccacccaucgccacaucaccggaaagccuugccccaaaccucauagacugaaccacaugggcauuuguuccugcggccuguauaagcaccccgggguuccggugaaguggaaacggugaggacuaguaauaaggaaacuguaugaaugucugugggcaggaagugaagagauccuucuguaaagguuuuuggaauuaugucugcugaauaauaaacuuuuuugaaauaauaaaucugguagaaaaaugagaucucaaaggcucuuuucagagccaccaaaaaaaaaaaaaaaaaaaaaaaaaaaaaaaaaaaaaaaaaaaaaaaaaaaaaaaaaaaaaaaaagaauu

SEQ ID NO: 34158 - RNA, 1778 nt, Artificial Sequence
  mRNA product Design b-4 (hSL-A64-N5) comprising derived and/or modified sequence from LASV(ISTH2010-NIG-2012;Clade II)__AIT17482__GPCmut8 (opt5)
aggagagucccgcagucggcguccagcggcucugcuuguucgugugugugucguugcaggccuuauucaagcuuaccaugggccagaucauuaccuucuuucaagaggugccccacgucaucgaagagguuaugaacauugugcugaucgcccucagccugcuugcuauucugaaggggaucuacaauguggccacaugcggacucuucggccuggucuccuuucuucugcucugugggagaucuugcagcacgaccuauaaaggaguguacgaacugcagacacuggagcucgacauggcgucccugaacauguguaugccucuuucuugcaccaagaauaacagccaucacuauaucaugguuggcaaugaaacagggcuggagcucacccugacaaacaccuccauuaucaaucauaaauucuguaaccuuucugaugcucacaagaaaaaucuguacgaccaugcccucaugagcauuaucuccacguuucaccugagcauuccgaacuucaaucaguaugaggccaugucuugcgauuuuaacggaggcaagaucuccgugcaguacaaucugagccacgcuuaugccgucgacgcugccaaccauuguggcaccauugcgaauggggugcuccaaacauucaugcggauggccuggggaggcucuuacaucgcucuggauuccgggaagggaagcugggacugcaucaugaccucuuaccaguaucuuauuauccagaacauuacaugggaagaucacugucaguuuucccgccccagcccuaucggcuaccuggggcuccugucccaaagaacccgggacauuuauaucucucgcagacuucugggaacguucacauggacccucagcgauuccgagggcaacgaaacacccggcggguacugccugacccgguggaugcugaucgaggccgagcucaaauguuuuggaaauaccgcuguugccaagugcaacgaaaaacaugacgaggaguucugcgauaugcugcgccuuuuugacuucuguaagcaggcgauuagacggcugaaaacgccugcccagaugagcauccagcucauuaauaaggcugugaacgcccugaucaaugaucaacuuauuaugaagaaccaucugcgcgacaucaugggcauccccuauugcaauuacucuaaauauuguuaccucaaccacacagucaccgggaagacaucccugccuagaugcugucuggugagcaauggaucuuaccucaacgaaacccacuucagcgacgauauugaacagcaggcugacaauaugaucacagagcugcuucaaaaagaguauauugaucggcagggcaagaccccgcuggggcucguggaccuguuugucuucuccacgucuuuuuaccugaucagcauuuuccuucaccucguuaaaauccccacacaucgccacguggugggaaagccuugccccaaaccucauagacugaaccacaugggcauuuguuccugcggccuguauaagcaccccggggucccggugaaguggaaacggugaggacuaguaauaaggaaacuguaugaaugucugugggcaggaagugaagagauccuucuguaaagguuuuuggaauuaugucugcugaauaauaaacuuuuuugaaauaauaaaucugguagaaaaaugagaucucaaaggcucuuuucagagccaccaaaaaaaaaaaaaaaaaaaaaaaaaaaaaaaaaaaaaaaaaaaaaaaaaaaaaaaaaaaaaaaaagaauu

SEQ ID NO: 34159 - RNA, 1778 nt, Artificial Sequence
  mRNA product Design b-4 (hSL-A64-N5) comprising derived and/or modified sequence from LASV(Lassa virus/H.sapiens-wt/NGA/2015/ISTH_0543;Clade II)__AVO03639__GPCmut8 (opt5)
aggagagucccgcagucggcguccagcggcucugcuuguucgugugugugucguugcaggccuuauucaagcuuaccaugggccagaucauuaccuucuuucaagaggugccccacgucaucgaagagguuaugaacauugugcugaucgcccucagccugcuugcuauucugaaggggaucuacaauguggccacaugcggacucuucggccuggucuccuuucuucugcucugugggagaucuugcagcacgaccuauaaaggaguguacgaacugcagacacuggagcucgacauggcgaaccugaauauguguaugccucuuuccugcaccaagaacaauucucaucacuauaucaugguuggcaacgaaacagggcuggagcucacccugacaaauaccagcauuaucaaccauaaauucuguaaucuuuccgaugcucacaagaaaaaccuguacgaccaugcccucaugucuauuaucagcacguuucaccuguccauuccgaauuucaaccaguaugaggccaugagcugcgauuuuaauggaggcaagaucucugugcaguacaaccugucccacaccuaugcugucgacgccgcuaaucauuguggcacaauugccaacggggugcuccaaaccuucaugcggauggcguggggaggcagcuacaucgcccuggauucugggaagggauccugggacugcaucaugacaagcuaccaguaucuuguuauucagaacaccacgugggaagaucacugucaguuuucucgccccuccccuaucggcuaccuggggcuccugagccaaagaacacgggacauuuauaucucccgcagacuucugggaaccuucacauggacccucucugauagcgagggcaaugaaacccccggcggguacugccugacacgguggaugcugauugaggcugagcucaaauguuuuggaaacacggccguggcuaagugcaaugaaaaacaugacgaggaguucugcgauaugcugcgccuuuuugacuucuguaagcaggccaucagacggcugaaaaccccugcgcagauguccauccagcucauuaacaaggccgucaaugcucugaucaacgaucaacuuauuaugaagaaucaucugcgcgacaucaugggcauucccuauugcaacuacagcaaauauuguuaccucaaucacacagugaccgggaagacaucucugccuagaugcugucugguguccaacggaagcuaccucaaugaaacccacuucucugacgauaucgaacagcaggccgacaacaugaucacggagcugcuucaaaaagaguauauugaucggcagggcaagacaccgcuggggcucgucgaccuguuuguuuucagcaccuccuuuuaccugaucucuauuuuccuucaccucgugaaaauccccacccaucgccacauuacaggaaagccuugccccaaaccucauagacugaaucacaugggcaucuguagcugcggccuguauaagcaccccggggugccggucaaguggaaacggugaggacuaguaauaaggaaacuguaugaaugucugugggcaggaagugaagagauccuucuguaaagguuuuuggaauuaugucugcugaauaauaaacuuuuuugaaauaauaaaucugguagaaaaaugagaucucaaaggcucuuuucagagccaccaaaaaaaaaaaaaaaaaaaaaaaaaaaaaaaaaaaaaaaaaaaaaaaaaaaaaaaaaaaaaaaaagaauu

SEQ ID NO: 34160 - RNA, 1778 nt, Artificial Sequence
  mRNA product Design b-4 (hSL-A64-N5) comprising derived and/or modified sequence from LASV(Lassa virus/H.sapiens-wt/NGA/2016/ISTH_0009;Clade II)__AVO03571__GPCmut8 (opt5)
aggagagucccgcagucggcguccagcggcucugcuuguucgugugugugucguugcaggccuuauucaagcuuaccaugggccagaucauuaccuucuuucaagaggugccccacgucaucgaagagguuaugaacauugugcugaucgcccucagccugcuugcuauucugaaggggaucuacaauguggccacaugcggacuccugggccuugucuccuuccugcuccugugugggagaucuugcagcacgaccuauaaaggaguguacgaacugcagacacucgagcuggacauggcgucccuuaacauguguaugccucugucuugcaccaagaauaacagccaucacuauaucaugguuggcaaugaaacagggcucgagcugacccuuacaaacaccuccauuaucaaucauaaauuuuguaaccugucugaugcucacaagaaaaaucucuacgaccaugcccugaugagcauuaucuccacguuccaccugagcauuccgaacuuuaaucaguaugaggccaugucuugcgauuucaacggaggccggaucuccgugcaguacaaucucagccacucuuaugcugucgacgccgcuaaccauuguggcaccauugccaauggggugcugcaaacauuuaugcgcauggcguggggaggcuccuacaucgcccuugauagcgggaagggaucuugggacugcaucaugaccuccuaccaguaucugauuauccagaacacaaccugggaagaucacugucaguucagcagacccuccccuauuggcuaccucgggcugcuuucucaacggacgcgcgacaucuauauuagcagacggcugcucggaacauuuaccuggacacuguccgauagcgagggcaacgaaacccccggcggguacugccugacccgcuggaugcucaucgaggcugagcugaaguguuucggaaauacagccguugcuaaaugcaacgaaaagcaugacgaggaauuuugcgauaugcuuagacuguucgacuuuuguaaacaggccauccggcgccucaagacgccugcgcagaugucuauucagcugaucaauaaagccgugaacgcucuuauuaaugaucaacugaucaugaagaaccaccucagagacauuaugggcauccccuauugcaauuacuccaaguauuguuaccugaaccacaccgucacagggaaaaccagccugccucggugcugucucgugucuaauggaagcuaccugaacgagacacauuucuccgacgauaucgaacagcaggccgacaauaugauuaccgagcuucugcaaaaggaguauaucgaucgccagggcaaaacgccgcucgggcugguggaccuguucgucuuuucuaccagcuucuaccuuauuuccaucuuucuccaccugguuaagauucccacacauagacacaucaccggaaaaccuugccccaagccucaucggcugaaccacaugggcauuuguagcugcggccucuauaaucaccccggggugccggugaaauggaagcgcugaggacuaguaauaaggaaacuguaugaaugucugugggcaggaagugaagagauccuucuguaaagguuuuuggaauuaugucugcugaauaauaaacuuuuuugaaauaauaaaucugguagaaaaaugagaucucaaaggcucuuuucagagccaccaaaaaaaaaaaaaaaaaaaaaaaaaaaaaaaaaaaaaaaaaaaaaaaaaaaaaaaaaaaaaaaaagaauu

SEQ ID NO: 34161 - RNA, 1778 nt, Artificial Sequence
  mRNA product Design b-4 (hSL-A64-N5) comprising derived and/or modified sequence from LASV(Lassa virus/H.sapiens-wt/NGA/2016/ISTH_0017;Clade II)__AVO03567__GPCmut8 (opt5)
aggagagucccgcagucggcguccagcggcucugcuuguucgugugugugucguugcaggccuuauucaagcuuaccaugggccagaucauuaccuucuuucaagaggugccccacgucaucgaagagguuaugaacauugugcugaucgcccucagccugcuugcuauucugaaggggaucuacaauguggccacaugcggacucuucggccuggucuccuuucuucugcucugugggagaucuugcagcacgaccuauaaaggaguguacgaacugcagacacuggagcucgacauggcgucccugaacauguguaugccucuuucuugcaccaagaauaacagccaucacuauaucaugguuggcaaugaaacagggcuggagcucacccugacaaacaccuccauuaucaaucauaaauucuguaaccuuucugaugcucacaagaaaaaucuguacgaccaugcccucaugagcauuaucuccacguuucaccugagcauuccgaacuucaaucaguaugaggccaugucuugcgauuuuaacggaggcaagaucuccgugcaguacaaucugagccacaccuaugcuauugacgccgcuaaccauuguggcacaaucgccaaugggguccuccaaaccuucaugcggauggcguggggaggcucuuacaucgcccuggauuccgggaagggaagcugggacugcauuaugacaucuuaccaguaucuuaucauucagaacaccacgugggaagaucacugucaguuuucccgccccagcccuaucggcuaccuggggcuccugucccaaagaacacgggacauuuauaucucucgcagacuucugggaaccuucacauggacccucagcgauuccgagggcaacgaaacccccggcggguacugccugacacgguggaugcugaucgaggcugagcucaaauguuuuggaaauacggccguggcuaagugcaacgaaaaacaugacgaggaguucugcgauaugcugcgccuuuuugacuucuguaagcaggccauuagacggcugaaaaccccugcgcagaugagcauccagcucauuaauaaggccguuaacgcucugaucaaugaucaacuuauuaugaagaaccaucugcgcgacaucaugggcauccccuauugcaauuacucuaaauauuguuaccucaaccacacagugaccgggaagacaucccugccuagaugcugucuggucagcaauggaucuuaccucaacgaaacccacuucagcgacgauauugaacagcaggccgacaauaugaucacggagcugcuucaaaaagaguauauggaucggcagggcaagacaccgcuggggcucguggaccuguuuguguucuccaccucuuuuuaccugauuagcaucuuccuucaccucguccgcauucccacccauagacacguuaucggaaaaccuugccccaagccucaucggcugaaccacaugggcauuuguuccugcggccuguauaaacaccccggggugccggugaaguggaagcgcugaggacuaguaauaaggaaacuguaugaaugucugugggcaggaagugaagagauccuucuguaaagguuuuuggaauuaugucugcugaauaauaaacuuuuuugaaauaauaaaucugguagaaaaaugagaucucaaaggcucuuuucagagccaccaaaaaaaaaaaaaaaaaaaaaaaaaaaaaaaaaaaaaaaaaaaaaaaaaaaaaaaaaaaaaaaaagaauu

SEQ ID NO: 34162 - RNA, 1778 nt, Artificial Sequence
  mRNA product Design b-4 (hSL-A64-N5) comprising derived and/or modified sequence from LASV(Lassa virus/H.sapiens-wt/NGA/2018/ISTH_0959;Clade II)__AVV65099__GPCmut8 (opt5)
aggagagucccgcagucggcguccagcggcucugcuuguucgugugugugucguugcaggccuuauucaagcuuaccaugggccagaucauuaccuucuuucaagaggugccccacgucaucgaagagguuaugaacauugugcugaucgcccucagccugcuugcuauucugaaggggaucuacaauguggucacaugcggacucuucggccugguguccuuucuucugcucugugggagaucuugcagcacgaccuauaaaggaguuuacgaacugcagacacuggagcucgacauggccucccugaacauguguaugccucuuucuugcaccaagaauaacagccaucacuauaucauggugggcaaugaaacagggcuggagcucacccugacaaacaccuccauuaucaaucauaaauucuguaaccuuucugaugcgcacaagaaaaaucuguacgaccaugcucucaugagcauuaucuccacguuucaccugagcauuccgaacuucaaucaguaugaggccaugucuugcgauuuuaacggaggcaagaucuccguccaguacaaucugagccacgccuaugcuauugacgccgcuaaccauuguggcaccaucgccaauggggugcuccaaacauucaugcggauggcguggggaggcucuuacaucgcccuggauuccgggaagggaagcugggacugcauuaugaccucuuaccaguaucuuaucauucagaacacaaccugggaagaucacugucaguuuucccgccccagcccuaucggcuaccuggggcuccugucccaaagaacgcgggacauuuauaucucucgcagacuucugggaacauucaccuggacacucagcgauuccgagggcaacgaaacccccggcggguacugccugacccgguggaugcugaucgaggcugagcucaaauguuuuggaaauacagccguugcuaagugcaacgaaaaacaugacgaggaguucugcgauaugcugcgccuuuuugacuucuguaagcaggccauuagacggcugaaaacgccugcgcagaugagcauccagcucauuaauaaggccgugaacgcucugaucaaugaucaacuuauuaugaagaaccaucugcgcgacaucaugggcauccccuauugcaauuacucuaaauauuguuaccucaaccacaccgucacagggaagaccucccugccuagaugcugucuggugagcaauggaucuuaccucaacgaaacacacuucagcgacgauauugaacagcaggccgacaauaugaucaccgagcugcuucaaaaagaguauauugaucggcagggcaagacgccgcuggggcucguggaccuguuugucuucuccacaucuuuuuaccugaucagcauuuuccuucaccucguuaaaauccccacccaucgccacgugauuggaaagccuugccccaaaccucauagacugaaccacaugggcaucuguuccugcggccuguauaagcaccccggggugccggucaaguggaaacggugaggacuaguaauaaggaaacuguaugaaugucugugggcaggaagugaagagauccuucuguaaagguuuuuggaauuaugucugcugaauaauaaacuuuuuugaaauaauaaaucugguagaaaaaugagaucucaaaggcucuuuucagagccaccaaaaaaaaaaaaaaaaaaaaaaaaaaaaaaaaaaaaaaaaaaaaaaaaaaaaaaaaaaaaaaaaagaauu

SEQ ID NO: 34163 - RNA, 1778 nt, Artificial Sequence
  mRNA product Design b-4 (hSL-A64-N5) comprising derived and/or modified sequence from LASV(LASV003-NIG-2008;Clade II)__AIT17580__GPCmut8 (opt5)
aggagagucccgcagucggcguccagcggcucugcuuguucgugugugugucguugcaggccuuauucaagcuuaccaugggccagaucauuaccuucuuucaagaggugccccacgucaucgaagagguuaugaacauugugcugaucgcccucagccugcuugcuauucugaaggggaucuacaauguggccacaugcggacucuucggccuggucuccuuucuucugcucugugggagaucuugcagcacgaccuauaaaggaguguacgaacugcagacacuggagcucgacauggcgucccugaacauguguaugccucuuucuugcaccaagaauaacagccaucacuauaucaugguuggcaaugaaacagggcuggagcucacccugacaaacaccuccauuaucaaucauaaauucuguaaccuuucugaugcucacaagaaaaaucuguacgaccaugcccucaugagcauuaucuccacguuucaccugagcauuccgaacuucaaucaguaugaggccaugucuugcgauuuuaacggaggcaagaucuccgugcaguacaaucugagccacaccuaugcugucgacgccgcuaaccauuguggcacaauugccaauggggugcuccaaaccuucaugcggauggcguggggaggcucuuacaucgcccuggauuccgggaagggaagcugggacugcaucaugacaucuuaccaguaucuuauuauccagaacaccacgugggaagaucacugucaguuuucccgccccagcccuauuggcuaccuggggcuccugucccaaagaacacgggacaucuauauuucucgcagacuucugggaaccuucacauggacccucagcgauuccgagagcaacgaaacccccggcggcuacugccugacacgguggaugcugaucgaggcugagcucaaauguuuugggaauacggccguugcuaagugcaacgaaaaacaugacgaggaguucugcgauaugcugcgccuuuuugacuucuguaagcaggccaucagacggcugaaagcgccugcccagaugucuauucagcucaucaauaaggcugugaacgcccugauuaaugaucaacuuaucaugaagaaccaucugcgcgacauuaugggaauccccuauugcaauuacuccaaauauuguuaccucaaccacaccgucacaggcagaaccagccugccucggugcugucuggugucuaaugggagcuaccucaacgaaacacacuucuccgacgauaucgaacagcaggcugacaauaugauuaccgagcugcuucaaaaggaguauauggaucgccagggaaaaacgccgcugggccucguggaccuguuugucuucucuaccagcuuuuaccugaucuccauuuuccuucaccucguuaagauccccacacauagacacgugauugggaaaccuugccccaagccucaucggcugaaccacaugggaaucuguagcugcggccuguauaaacaccccggcgugccggucaaguggaagcgcugaggacuaguaauaaggaaacuguaugaaugucugugggcaggaagugaagagauccuucuguaaagguuuuuggaauuaugucugcugaauaauaaacuuuuuugaaauaauaaaucugguagaaaaaugagaucucaaaggcucuuuucagagccaccaaaaaaaaaaaaaaaaaaaaaaaaaaaaaaaaaaaaaaaaaaaaaaaaaaaaaaaaaaaaaaaaagaauu

SEQ ID NO: 34164 - RNA, 1778 nt, Artificial Sequence
  mRNA product Design b-4 (hSL-A64-N5) comprising derived and/or modified sequence from LASV(LASV035-NIG-2009;Clade II)__AIT17588__GPCmut8 (opt5)
aggagagucccgcagucggcguccagcggcucugcuuguucgugugugugucguugcaggccuuauucaagcuuaccaugggccagaucauuaccuucuuucaagaggugccccacgucaucgaagagguuaugaacauugugcugaucgcccucagccugcuugcuauucugaaggggaucuacaauguggccacaugcggacucuucggccuggucuccuuucuucugcucugugggagaucuugcagcacgaccuauaaaggaguguacgaacugcagacacuggagcucgacauggcgucccugaacauguguaugccucuuucuugcaccaagaauaacagccaucacuauaucaugguuggcaaugaaacagggcuggagcucacccugacaaacaccuccauuaucaaucauaaauucuguaaccuuucugaugcucacaagaaaaaucuguacgaccaugcccucaugagcauuaucuccacguuucaccugagcauuccgaacuucaaucaguaugaggccaugucuugcgauuuuaacggaggcaagaucuccgugcaguacaaucugagccacgcuuaugccgucgacgcugccaaccauuguggcaccauugcgaauggggugcuccaaacauucaugcggauggccuggggaggcucuuacaucgcucuggauuccgggaagggaagcugggacugcaucaugaccucuuaccaguaucuuauuauccagaacacaaccugggaagaucacugucaguuuucccgccccagcccuauuggcuaccuggggcuccugucccaaagaacgcgggacaucuauauuucucgcagacuucugggaacauucaccuggacacucagcgauuccgagggcaacgaaacccccggcggguacugccugacccgguggaugcugaucgaggccgagcucaaauguuuuggaaauacagcuguugccaagugcaacgaaaaacaugacgaggaguucugcgauaugcugcgccuuuuugacuucuguaagcaggcgaucagacggcugaaagccccugcucagaugagcauucagcucaucaauaaggccgugaacgcucugauuaaugaucaacuuaucaugaagaaccaucugcgcgacauuaugggcauccccuauugcaauuacucuaaauauuguuaccucaaccacacggucaccgggaagacaucccugccuagaugcugucuggugagcaauggaucuuaccucaacgaaacccacuucagcgacgauaucgaacagcaggccgacaauaugauuacagagcugcuucaaaaagaguauaucgaucggcagggcaagaccccgcuggggcucguggaccuguuugucuucuccacgucuuuuuaccugauuagcaucuuccuucaccucguuaaaauucccacacaucgccacgugaucggaaagccuugccccaaaccucauagacugaaccacaugggcauuuguuccugcggccuguauaagcaccccggggugccggucaaguggaaacggugaggacuaguaauaaggaaacuguaugaaugucugugggcaggaagugaagagauccuucuguaaagguuuuuggaauuaugucugcugaauaauaaacuuuuuugaaauaauaaaucugguagaaaaaugagaucucaaaggcucuuuucagagccaccaaaaaaaaaaaaaaaaaaaaaaaaaaaaaaaaaaaaaaaaaaaaaaaaaaaaaaaaaaaaaaaaagaauu

SEQ ID NO: 34165 - RNA, 1778 nt, Artificial Sequence
  mRNA product Design b-4 (hSL-A64-N5) comprising derived and/or modified sequence from LASV(LASV1000-NIG-2009;Clade II)__AIT17782__GPCmut8 (opt5)
aggagagucccgcagucggcguccagcggcucugcuuguucgugugugugucguugcaggccuuauucaagcuuaccaugggccagaucauuaccuucuuucaagaggugccccacgucaucgaagagguuaugaacauugugcugaucgcccucagccugcuugcuauucugaaggggaucuacaauguggccacaugcggacucuucggccuggucuccuuucuucugcucugugggagaucuugcagcacgaccuauaaaggaguguacgaacugcagacacuggagcucgacauggcgucccugaacauguguaugccucuuucuugcaccaagaauaacagccaucacuauaucaugguuggcaaugaaacagggcuggagcucacccugacaaacaccuccauuaucaaucauaaauucuguaaccuuucugaugcucacaagaaaaaucuguacgaccaugcccucaugagcauuaucuccacguuucaccugagcauuccgaacuucaaucaguaugaggccaugucuugcgauuuuaacggaggcaagaucuccgugcaguacaaucugagccacaccuaugcugucgacgccgcuaaccauuguggcacaauugccaauggggugcuccaaaccuucaugcggauggcguggggaggcucuuacaucgcccuggauuccgggaagggaagcugggacugcaucaugacaucuuaccaguaucuuauuauccagaacaccacgugggaagaucacugucaguuuucccgccccagcccuauuggcuaccuggggcuccugucccaaagaacacgggacaucuauauuucucgcagacuucugggaaccuucacauggacccucagcgauuccgagggcaacgaaacccccggcggguacugccugacacgguggaugcugaucgaggcugagcucaaauguuuuggaaauacggccguugcuaagugcaacgaaaaacaugacgaggaguucugcgauaugcugcgccuuuuugacuucuguaagcaggccaucaaaagacugaagaccccugcgcagaugagcauucagcucaucaauaaggccgugaacgcucugauuaaugaucaacuuaucaugaaaaaccaucugcgggacauuaugggcauccccuauugcaauuacucuaaguauuguuaccucaaccacacagucaccgggaaaacaucccugccucgcugcugucuggugagcaauggaucuuaccucaacgaaacccacuucagcgacgauaucgaacagcaggccgacaauaugauuacggagcugcuucaaaaggaguauaucgauagacagggcaaaacaccgcuggggcucguggaccuguuugucuucuccaccucuuuuuaccugauuagcaucuuccuucaccucguuaagauucccacccaucggcacguggugggaaaaccuugccccaagccucaucgccugaaccacaugggcaucuguuccugcggccuguauaagcaccccggggucccggugaaauggaagagaugaggacuaguaauaaggaaacuguaugaaugucugugggcaggaagugaagagauccuucuguaaagguuuuuggaauuaugucugcugaauaauaaacuuuuuugaaauaauaaaucugguagaaaaaugagaucucaaaggcucuuuucagagccaccaaaaaaaaaaaaaaaaaaaaaaaaaaaaaaaaaaaaaaaaaaaaaaaaaaaaaaaaaaaaaaaaagaauu

SEQ ID NO: 34166 - RNA, 1778 nt, Artificial Sequence
  mRNA product Design b-4 (hSL-A64-N5) comprising derived and/or modified sequence from LASV(LASV221-NIG-2010;Clade II)__AIT17624__GPCmut8 (opt5)
aggagagucccgcagucggcguccagcggcucugcuuguucgugugugugucguugcaggccuuauucaagcuuaccaugggccagaucauuaccuucuuucaagaggugccccacgucaucgaagagguuaugaacauugugcugaucgcccucagccugcuugcuauucugaaggggaucuacaauguggccacaugcggacucuucggccuggucuccuuucuucugcucugugggagaucuugcagcacgaccuauaaaggaguguacgaacugcagacacuggagcucgacauggcgucccugaacauguguaugccucuuucuugcaccaagaauaacagccaucacuauaucaugguuggcaaugaaacagggcuggagcucacccugacaaacaccuccauuaucaaucauaaauucuguaaccuuucugaugcucacaagaaaaaucuguacgaccaugcccucaugagcauuaucuccacguuucaccugagcauuccgaacuucaaucaguaugaggccaugucuugcgauuuuaacggaggcaagaucuccgugcaguacaaucugagccacaccuaugcuauugacgccgcuaaccauuguggcacaaucgccaaugggguccuccaaaccuucaugcggauggcguggggaggcucuuacaucgcccuggauuccgggaagggaagcugggacugcauuaugacaucuuaccaguaucuuaucauucagaacaccacgugggaagaucacugucaguuuucccgccccagcccuaucggcuaccuggggcuccugucccaaagaacacgggacauuuauaucucucgcagacuucugggaaccuucacauggacccucagcgauuccgagggcaacgaaacccccggcggguacugccugacacgguggaugcugaucgaggcugagcucaaauguuuuggaaauacggccguggcuaagugcaacgaaaaacaugacgaggaguucugcgauaugcugcgccuuuuugacuucuguaagcaggccauuagacggcugaaaaccccugcgcagaugagcauccagcucauuaauaaggccguuaacgcucugaucaaugaucaacuuauuaugaagaaccaucugcgcgacaucaugggcauccccuauugcaauuacucuaaauauuguuaccucaaccacacagugaccgggaagacaucccugccuagaugcugucuggucagcaauggaucuuaccucaacgaaacccacuucagcgacgauauugaacagcaggccgacaauaugaucacggagaugcugcaaaaagaguauauggaucggcagggcaagacaccgcuugggcugguggaccucuuuguguucuccaccucuuuuuaccugauuagcaucuuccugcaccuugucaaaauucccacccaucgccacguuaucggaaagccuugccccaaaccucauagacucaaccacaugggcauuuguuccugcggccuguauaagcaccccggggugccggugaaguggaaacggugaggacuaguaauaaggaaacuguaugaaugucugugggcaggaagugaagagauccuucuguaaagguuuuuggaauuaugucugcugaauaauaaacuuuuuugaaauaauaaaucugguagaaaaaugagaucucaaaggcucuuuucagagccaccaaaaaaaaaaaaaaaaaaaaaaaaaaaaaaaaaaaaaaaaaaaaaaaaaaaaaaaaaaaaaaaaagaauu

SEQ ID NO: 34167 - RNA, 1778 nt, Artificial Sequence
  mRNA product Design b-4 (hSL-A64-N5) comprising derived and/or modified sequence from LASV(LASV237-NIG-2010;Clade II)__AIT17638__GPCmut8 (opt5)
aggagagucccgcagucggcguccagcggcucugcuuguucgugugugugucguugcaggccuuauucaagcuuaccaugggccagaucauuaccuucuuucaagaggugccccacgucaucgaagagguuaugaacauugugcugaucgcccucagccugcuugcuauucugaaggggaucuacaauguggccacaugcggacucuucggccuggucuccuuucuucugcucugugggagaucuugcagcacgaccuauaaaggaguguacgaacugcagacacuggagcucgacauggcgucccugaacauguguaugccucuuucuugcaccaagaauaacagccaucacuauaucaugguuggcaaugaaacagggcuggagcucacccugacaaacaccuccauuaucaaucauaaauucuguaaccuuucugaugcucacaagaaagaccuguacgaucaugcccucaugagcauuaucuccacguuucaccugagcauuccgaauuucaaccaguaugaggccaugucuugcgacuuuaauggaggcaagaucuccgugcaguacaaccugagccacaccuaugcugucgaugccgcuaaucauuguggcacaauugccaacggggugcuccaaaccuucaugcggauggcguggggaggcucuuacaucgcccuggacuccgggaagggaagcugggauugcaucaugacaucuuaccaguaucuuauuauccagaauaccacgugggaagaccacugucaguuuucccgccccagcccuauuggcuaccuggggcuccugucccaaagaacacgggauaucuauauuucucgcagacuucugggaaccuucacauggacccucagcgacuccgagggcaacgaaacccccggcggguacugccugacacgguggaugcugaucgaggcugagcucaaauguuuuggaaacacggccguugcuaagugcaaugaaaaacaugaugaggaguucugcgacaugcugcgccuuuuugauuucuguaagcaggccaucagacggcugaaaaccccugcgcagaugagcauucagcucaucaacaaggccgugaaugcucugauuaacgaccaacuuaucaugaagaaucaucugcgcgacauuaugggcauccccuauugcaacuacucuaaauauuguuaccucaaucacacagucaccgggaagacaucccugccuagaugcugucuggugagcaacggaucuuaccucaaugaaacccacuucagcgaugacaucgaacagcaggccgauaacaugauuacggagcugcuucaaaaagaguauauggaccggcagggcaagacaccgcuggggcucguggaucuguuugucuucuccaccucuuuuuaccugaucagcauuuuccuucaccucaucaaaauucccacccaucgccacaucacaggaaagccuugccccaaaccucauagacugaaucacaugggcauuuguuccugcggccuguauaagcaccccgggguuccggugaaguggaaacggugaggacuaguaauaaggaaacuguaugaaugucugugggcaggaagugaagagauccuucuguaaagguuuuuggaauuaugucugcugaauaauaaacuuuuuugaaauaauaaaucugguagaaaaaugagaucucaaaggcucuuuucagagccaccaaaaaaaaaaaaaaaaaaaaaaaaaaaaaaaaaaaaaaaaaaaaaaaaaaaaaaaaaaaaaaaaagaauu

SEQ ID NO: 34168 - RNA, 1778 nt, Artificial Sequence
  mRNA product Design b-4 (hSL-A64-N5) comprising derived and/or modified sequence from LASV(LASV253-NIG-2011;Clade II)__AIT17670__GPCmut8 (opt5)
aggagagucccgcagucggcguccagcggcucugcuuguucgugugugugucguugcaggccuuauucaagcuuaccaugggccagaucauuaccuucuuucaagaggugccccacgucaucgaagagguuaugaacauugugcugaucgcccucagccugcuugcuauucugaaggggaucuacaauguggccacaugcggacucuucggccuggucuccuuucuucugcucugugggagaucuugcagcacgaccuauaaaggaguguacgaacugcagacacuggagcucgacauggcgucccugaacauguguaugccucuuucuugcaccaagaauaacagccaucacuauaucaugguuggcaaugaaacagggcuggagcucacccugacaaacaccuccauuaucaaucauaaauucuguaaccuuucugaugcucacaagaaaaaucuguacgaccaugcccucaugagcauuaucuccacguuucaccugagcauuccgaacuucaaucaguaugaggccaugucuugcgauuuuaacggaggcaagaucuccgugcaguacaaucugagccacaccuaugcugucgacgccgcuaaccauuguggcacaauugccaauggggugcuccaaaccuucaugcggauggcguggggaggcucuuacaucgcccuggauuccgggaagggaagcugggacugcaucaugacaucuuaccaguaucuuauuauccagaacaccacgugggaagaucacugucaguuuucccgccccagcccuauuggcuaccuggggcuccugucccaaagaacacgggacaucuauauuucucgcagacuucugggaaccuucacauggacccucagcgauuccgagggcaacgaaacccccggcggguacugccugacacgguggaugcugaucgaggcugagcucaaauguuuuggaaauacggccguugcuaagugcaacgaaaaacaugacgaggaguucugcgauaugcugcgccuuuuugacuucuguaagcaggccaucagacggcugaaagcgccugcccagaugagcauucagcucaucaauaaggcugugaacgcccugauuaaugaucaacuuaucaugaagaaccaucugcgcgacauuaugggcauccccuauugcaauuacucuaaauauuguuaccucaaccacaccgucacagggagaaccucccugccucggugcugucuggugagcaauggaucuuaccucaacgaaacacacuucagcgacgauaucgaacagcaggcugacaauaugauuaccgagcugcuucaaaaggaguauaucgaucgccagggcaaaacgccgcuggggcucguggaccuguuugucuucuccacaucuuuuuaccugauuagcaucuuccuucaccucguuaagauucccacccauagacacaucauuggaaaaccuugccccaagccucaucggcugaaccacaugggcaucuguuccugcggccuguauaaacaccccggggugccggugaaguggaagcgcugaggacuaguaauaaggaaacuguaugaaugucugugggcaggaagugaagagauccuucuguaaagguuuuuggaauuaugucugcugaauaauaaacuuuuuugaaauaauaaaucugguagaaaaaugagaucucaaaggcucuuuucagagccaccaaaaaaaaaaaaaaaaaaaaaaaaaaaaaaaaaaaaaaaaaaaaaaaaaaaaaaaaaaaaaaaaagaauu

SEQ ID NO: 34169 - RNA, 1778 nt, Artificial Sequence
  mRNA product Design b-4 (hSL-A64-N5) comprising derived and/or modified sequence from LASV(LASV254-NIG-2011;Clade II)__AIT17674__GPCmut8 (opt5)
aggagagucccgcagucggcguccagcggcucugcuuguucgugugugugucguugcaggccuuauucaagcuuaccaugggccagaucauuaccuucuuucaagaggugccccacgucaucgaagagguuaugaacauugugcugaucgcccucagccugcuugcuauucugaaggggaucuacaauguggccacaugcggacucuucggccuggucuccuuucuucugcucugugggagaucuugcagcacgaccuauaaaggaguguacgaacugcagacacuggagcucgacaugaccaaccugaauauguguaugccucuuuccugcacaaagaacaauucucaucacuauaucaugguuggcaacgaaaccgggcuggagcucacacugaccaauacgagcauuaucaaccauaaauucuguaaucuuuccgaugcgcacaagaaaaaccuguacaaucaugcucucaugucuauuaucagcaccuuucaccuguccauuccgaacuucaaucaguaugaggccaugagcugcgacuuuaacggaggcaagaucucugugcaguacaaucugucccacagcuaugccgucgaugcugccaaccauuguggcacaauugcuaacggggugcuccaaaccuucaugcggauggccuggggaggcucuuacaucgcgcuggacuccgggaagggaaauugggauugcaucaugacaagcuaccaguaucuuauuauccagaacaccacgugggaagaccacugucaguuuucucgccccuccccuauuggcuaccuggggcuccugagccaaagaacacgggauaucuauauuucccgcagacuucugggaaccuucacauggacccucucugacagcgagggcaaugaaacccccggcggguacugccugacacgguggaugcugaucgaggccgagcucaaauguuuuggaaacacggcuguugccaagugcaaugaaaaacaugaugaggaguucugcgacaugcugcgccuuuuugauuucuguaagcaggcuaucagacggcugaaaaccccugcccaggcgaacauucagcucaucaauaaggccgugaacgcucugauuaaugaccaacuuaucaugaagaaccaucugcgcgauauuaugggcauccccuauugcaauuacuccaaauauuguuaccucaaccacacagucaccgggaagacaagccugccuagaugcugucuggugucuaauggauccuaccucaacgaaacccacuucagcgacgacaucgaacagcaggccgauaauaugauuacggagcugcuucaaaaagaguauauggaccggcagggcaagacaccgcuggggcucguggaucuguuugucuucucuaccagcuuuuaccugaucuccauuuuccuucaccucguuaaaauccccacccaucgccacgugauuggaaagccuugccccaaaccucauagacugaaccacaugggcaucuguucuugcggccuguauaagcaccccggggugccggucaaguggaaacggugaggacuaguaauaaggaaacuguaugaaugucugugggcaggaagugaagagauccuucuguaaagguuuuuggaauuaugucugcugaauaauaaacuuuuuugaaauaauaaaucugguagaaaaaugagaucucaaaggcucuuuucagagccaccaaaaaaaaaaaaaaaaaaaaaaaaaaaaaaaaaaaaaaaaaaaaaaaaaaaaaaaaaaaaaaaaagaauu

SEQ ID NO: 34170 - RNA, 1778 nt, Artificial Sequence
  mRNA product Design b-4 (hSL-A64-N5) comprising derived and/or modified sequence from LASV(Nig08-A19;Clade III)__ADU56618__GPCmut8 (opt5)
aggagagucccgcagucggcguccagcggcucugcuuguucgugugugugucguugcaggccuuauucaagcuuaccaugggccagaucgugaccuucuuucaagaggucccccacguuauugaagaggugaugaacaucgugcugauugcccucagcauccuggcuauucuuaaggggcuguacaauaucgccacaugcggacucaucggccuggucacguuccuucugcucuccgggagaucuuguagcaugaccuauaaaggaguguacgaacugcagacacuggagcucaacaugaauacccugaacaugugcaugccucuuuccuguacaaagaauaacucucaucacuauauuaugguuggcaaugaaaccgggcuggagcucacacugaccaacacgagccuucugcaucacaaauuuugcaaucucuccgacgcgcauaagaaaaaccuguacgaucacacccugaugucuaucauuagcacauuccaccucuccaucccgaauuuuaaccaguaugaggcuaugagcugugacuucaauggaggcaagauuaccgugcaguacaaccugucucauuccuaugccaucgaugccgcuaaucacugcggcacagucgccaacggggugcuucaaaccuuuaugcggauggcuuggggaggcagcuacauugcccuggacucugggcgcggaaagugggauuguaucaugacguccuaccaguaucucaucauucagaacacaaccugggaagaccauugccaguucagcagacccucuccuaucggcuaccuggggcuucugucccaacggacacgcgauauuuauaucagcagacggcuccugggaaccuuuaccuggacacuguccgacucugagggcaaugaaacgcccggcggguacugucucacccgcuggaugcugauugaggcggagcuuaaaugcuucggaaacacagccguugcuaaguguaaugaaaaacacgaugaggaauuuugcgacaugcugagacucuucgauuuuugcaagcaggccauccggcgccugaaagcuccugcccagaugagcauccagcuuauuaacaaggcggugaaugcccugaucaacgaccaacucauuaugaagaaucaccugagagauaucaugggcauucccuauuguaacuacuccaaauauugcuaccugaaucauaccagcacagggcggaccucucucccucgcuguugccuggucuccaacggaagcuaccuuaaugagacgcacuucucugacgacaucgaacagcaggcugauaacaugaucacagagaugcugcaaaaggaguaucucgacagacagggcaaaaccccgcuggggcugguggaucuuuucguguuuagcaccuccuucuaccucauuucuaucuuucugcaucuggucaagauucccacacaccggcauaucguuggaaaaccuugucccaagccucaccgccucaaucacaugggcauuugcagcuguggccuguauaaacagcccggggugccggugagauggaagcggugaggacuaguaauaaggaaacuguaugaaugucugugggcaggaagugaagagauccuucuguaaagguuuuuggaauuaugucugcugaauaauaaacuuuuuugaaauaauaaaucugguagaaaaaugagaucucaaaggcucuuuucagagccaccaaaaaaaaaaaaaaaaaaaaaaaaaaaaaaaaaaaaaaaaaaaaaaaaaaaaaaaaaaaaaaaaagaauu

SEQ ID NO: 34171 - RNA, 1781 nt, Artificial Sequence
  mRNA product Design b-4 (hSL-A64-N5) comprising derived and/or modified sequence from LASV(G1180-SLE-2010;Clade IV)__AIT17168__GPCmut8 (opt5)
aggagagucccgcagucggcguccagcggcucugcuuguucgugugugugucguugcaggccuuauucaagcuuaccaugggccagaucgugaccuucuuucaagaggucccccacguuauugaagaggugaugaacaucgugcugauugcccucagcauccuggcuguccuuaaggggcuguacaauuucgccacaugcggacucgugggccugcuuacguuucugcuccugugugggagauccugcaccgcgucucgguauaaaggaguuuacgaacugcagacacucgagcugaacauggaaacccuuaauauguguaugccucugagcugcacaaagaacaauucccaucacuauauuauggugggcaacgagaccgggcucgagcugacacuuaccaauacgucuaucaucaaccauaaauucuguaaucugagcgacgcucacaagaaaaaccucuacgaucaugcccugauguccauuaucucuaccuuucaccugagcauuccgaauuucaaccaguaugaagccauguccugcgacuuuaauggaggcaagaucagcguccaguacaaccucucucacuccuaugcuggcgaugccgcuaaucauugugggacaguggccaacggaguucugcaaaccuucaugcgcauggcguggggcgggagcuacauugcccuugacucuggacacggcuccugggauugcaucaugacaagcuaccaguaucugauuauccagaacaccacgugggaggaccauugucaguuuucuagacccuccccuaucggguaccucggacugcuuagccaacggacacgcgauauuuauaucuccagacggcugcucggcaccuucacauggacccugucugacagcgaaggcaaggauacccccgggggauacugccugacacgcuggaugcucauugaggcugagcugaaauguuuuggcaauacggccguggcuaagugcaacgaaaaacacgacgaggaguucugcgauaugcuuagacuguuugacuucuguaagcaggccauccagcggcucaaagcgccugcccagauguccauucaacugaucaauaaggcugucaacgcccuuaucaaugaucagcugauuaugaagaaccaccuccgcgacaucauggggauucccuauugcaauuacagcaaauauuguuaccugaaccauaccacaaccggaaagacaucucugccuaaaugcugucucguguccaauggcagcuaccugaacgaaacccacuucucugacgauaucgaacagcaagcugacaauaugauuacggagaugcuucagaaggaguauauggaaagacaggggaaaacaccgcugggacucguggaucuguuugucuucagcaccuccuuuuaccugaucucuaucuuccuucaucucguuaagauucccacccaccggcauaucgugggcaaaagcugcccuaagccccaccgccugaaccacaugggcauuuguuccugcgggcuguauaagcagccuggagugcccgucaaauggaagagaugaggacuaguaauaaggaaacuguaugaaugucugugggcaggaagugaagagauccuucuguaaagguuuuuggaauuaugucugcugaauaauaaacuuuuuugaaauaauaaaucugguagaaaaaugagaucucaaaggcucuuuucagagccaccaaaaaaaaaaaaaaaaaaaaaaaaaaaaaaaaaaaaaaaaaaaaaaaaaaaaaaaaaaaaaaaaagaauu

SEQ ID NO: 34172 - RNA, 1781 nt, Artificial Sequence
  mRNA product Design b-4 (hSL-A64-N5) comprising derived and/or modified sequence from LASV(G1442-SLE-2011;Clade IV)__AIT17180__GPCmut8 (opt5)
aggagagucccgcagucggcguccagcggcucugcuuguucgugugugugucguugcaggccuuauucaagcuuaccaugggccagaucgugaccuucuuucaagaggucccccacguuauugaagaggugaugaacaucgugcugauugcccucagcauccuggcuguccuuaaggggcuguacaauguggccacaugcggacucauuggccugguuacguuccuucugcucugugggagauccugcaccacaacccuguauaaaggaguguacgaacugcagacacucgagcugaacauggaaacccuuaauauguguaugccucugucuugcacaaagaacaauagccaucacuauauccgggucggcaacgagaccgggcucgagcugacgcuuaccaauacauccaucauuaaccauaaauuuuguaaucugucugacgcgcacaagaaaaaccucuacgaucaugcucugaugagcaucauuuccaccuuccaccugucuaucccgaauuuuaaccaguaugaagccaugagcugcgacuucaauggaggcaagauuuccgugcaguacaaccucagccacucuuaugccggcgaugcugccaaucauugugggacaguugcuaacggagugcugcaaaccuuuaugcgcauggccuggggcggguccuacaucgcgcuugacagcggaagaggcaacugggauugcauuaugacgucuuaccaguaucugaucauccagaauacaaccugggacgaucacugucaguucucccggcccagcccuauuggguaccucggacugcuuucucaacgcacaagagacgucuauaucucccggcgccugcucggcaccuuuaccuggacacugagcgauuccgagggcaaggacacgcccgggggauacugccugaccagauggaugcucauugaagccgagcugaaauguuucggcaacacagcuguggccaagugcaaugagaaacaugaugaagaguuuugcgacaugcuucggcuguucgauuuuuguaagcaggcuauccagcgccucaaagccccugcgcagaugucuauucaacugaucaacaaggccgugaaugcucuuaucaacgaccagcugauuaugaagaaucaccucagagacaucauggggauucccuauugcaacuacagcaaauauuguuaccugaauaacaccgccacaggaaagaccucccugccuaaaugcugucucaucagcaauggcucuuaccugaacgaaacgcacuucuccgaugacauugagcaggaagcugauaauaugaucacagagaugcuucaaaaggaguauauggaacggcaggggaaaaccccgcugggacucgucgaccuguucguuuuuagcaccucuuucuaccugaucagcauuuuucuucaucucgugaagauccccacacaccgccauauugugggcaaauccugcccuaagccccacagacugaaccauaugggcaucuguucuugcgggcuguauaagcagccuggaguccccgugcgguggaaacgcugaggacuaguaauaaggaaacuguaugaaugucugugggcaggaagugaagagauccuucuguaaagguuuuuggaauuaugucugcugaauaauaaacuuuuuugaaauaauaaaucugguagaaaaaugagaucucaaaggcucuuuucagagccaccaaaaaaaaaaaaaaaaaaaaaaaaaaaaaaaaaaaaaaaaaaaaaaaaaaaaaaaaaaaaaaaaagaauu

SEQ ID NO: 34173 - RNA, 1781 nt, Artificial Sequence
  mRNA product Design b-4 (hSL-A64-N5) comprising derived and/or modified sequence from LASV(G3010-SLE-2013;Clade IV)__AIT17344__GPCmut8 (opt5)
aggagagucccgcagucggcguccagcggcucugcuuguucgugugugugucguugcaggccuuauucaagcuuaccaugggccagaucgugaccuucuuucaagaggucccccacguuauugaagaggugaugaacaucgugcugauugcccucagcauccuggcuguccuuaaggggcuguacaauuucgccacaugcggacucgugggccugguuacguuucuucugcucugugggagauccugcaccacaucucuguauaaaggaguguacgaacugcagacccucgagcugaacauggaaacacuuaauauguguaugccucugagcugcaccaagaacaauucccaucacuauauuauggucggcaacgagacagggcucgagcugacccuuacgaauaccucuaucaucaaccauaaauucuguaaucugagcgacgcgcacaagaaaaaccucuacaaucaugcucugauguccauuaucucuacauuucaccugagcauuccgaacuucaaucaguaugaagccauguccugcgauuuuaacggaggcaagaucagcgugcaguacaaucucucucacuccuaugccggcgacgcugccagccauugugggaccguugcuaacggagugcugcaaacauucaugcggauggccuggggcgggucuuacauugcgcuugauuccggauacggcaagugggacugcaucaugaccagcuaucaguaccugauuauccagaacacgacaugggaggaucacugucaguuuucucgccccuccccuaucggguaucucggacugcuuagccaaagaacccgggacauuuacaucucccgcagacugcucggcacauucaccuggacccugucugauagcgaaggcaaagacacacccgggggauauugccugacgcgguggaugcucauugaggccgagcugaaguguuuuggcaauaccgcugucgccaaaugcaacgaaaagcaugaugaggaguucugcgacaugcuucgccuguuugauuucuguaaacaggcuauccagagacucaagaccccugcccagauguccauucaacugaucaauaaggcggugaacgcccuuaucaaugaccagcugauuaugaaaaaccaccuccgggauaucauggggauucccuacugcaauuauagcaaguacuguuaccugaaccacacaacaaccggaaaaacgucucugccuaagugcugucucguguccaauggcagcuaucugaacgaaacacauuucucugacgacaucgaacagcaagcugauaauaugauuaccgagaugcuucagaaagaguacauggaacgccaggggaagaccccgcugggacucgucgaccuguuuguuuucagcacauccuuuuaucugaucucuaucuuccuucaccucgugaaaauucccacccauagacacaucgugggcaagagcugcccuaagccccaucggcugaaccacaugggcauuuguuccugcgggcuguacaaacagccuggaguccccgugcgcuggaagagaugaggacuaguaauaaggaaacuguaugaaugucugugggcaggaagugaagagauccuucuguaaagguuuuuggaauuaugucugcugaauaauaaacuuuuuugaaauaauaaaucugguagaaaaaugagaucucaaaggcucuuuucagagccaccaaaaaaaaaaaaaaaaaaaaaaaaaaaaaaaaaaaaaaaaaaaaaaaaaaaaaaaaaaaaaaaaagaauu

SEQ ID NO: 34174 - RNA, 1781 nt, Artificial Sequence
  mRNA product Design b-4 (hSL-A64-N5) comprising derived and/or modified sequence from LASV(G502-SLE-2009;Clade IV)__AIT17126__GPCmut8 (opt5)
aggagagucccgcagucggcguccagcggcucugcuuguucgugugugugucguugcaggccuuauucaagcuuaccaugggccagaucgugaccuucuuucaagaggucccccacguuauugaagaggugaugaacaucgugcugauugcccucagcauccuggcuguccuuaaggggcuguacaauuucgccacaugcggacucgugggccugcuuacguuucugcuccugugugggagauccugcaccacaggacuguauaaaggcguuuacgaacuccagacccuggagcuuaacauggaaacacugaauauguguaugccucucucuugcaccaagaacaauagccaucacuauauuaugguggggaacgagacaggacuggagcuuacccugacgaauaccuccaucaucaaccauaaauucuguaaucucucugacgcgcacaagaaaaaccuguacgaucaugcucugaugagcauuaucuccacauuucaccucucuauuccgaauuucaaccaguaugaagccaugagcugcgacuuuaauggcggcaagaucuccguccaguacaaccugagccacucuuaugccggggaugcugccgaccauuguggaaccguggcuaauggcguucuucaaacauucaugcggauggccuggggaggguccuacauugcgcuggauagcggccgcgggagaugggacugcaucaugaccucuuaccaguaucucauuauccagaacacgacaugggaggaucacugucaguuuucccggcccagcccuaucggauaccugggccuucugucucaacgcaccagagacauuuauaucucccggcgccuccugggcacauucaccuggacccugagcgauuccgaagggaaggacacacccggaggcuacugccucacgagauggaugcugauugaggccgagcuuaaauguuuugggaacaccgcuguggccaagugcaaugaaaaacaugaugaggaguucugcgacaugcugcggcucuuugauuucuguaagcaggcuauccagcgccugaaagccccugcgcagaugucuauucaacuuaucaacaaggccgucaaugcucugaucaacgaccagcucgugaugaagaaucaccugagagacauuaugggaauccccuauugcaacuacagccgguauuguuaccugaaucacacaaccacaggccgcaccucccucccuaaaugcugucuggugagcaacgggucuuaccuuaaugaaacgcauuucuccgaugacauugaacagcaagccgauaacaugaucacagagaugcugcagaaggaguauauggaaagacagggaaaaaccccgcucggccuggucgaccuguuuguuuucagcaccucuuuuuaccuuauuagcaucuuccuccaccuggugaagauccccacacaucggcacauugugggcaaauccugcccuaagccccaucgccugaaucacauggggaucuguucuugcggacucuauaaacagccuggcguccccgugaaguggaagagaugaggacuaguaauaaggaaacuguaugaaugucugugggcaggaagugaagagauccuucuguaaagguuuuuggaauuaugucugcugaauaauaaacuuuuuugaaauaauaaaucugguagaaaaaugagaucucaaaggcucuuuucagagccaccaaaaaaaaaaaaaaaaaaaaaaaaaaaaaaaaaaaaaaaaaaaaaaaaaaaaaaaaaaaaaaaaagaauu

SEQ ID NO: 34175 - RNA, 1781 nt, Artificial Sequence
  mRNA product Design b-4 (hSL-A64-N5) comprising derived and/or modified sequence from LASV(G733-SLE-2010;Clade IV)__AIT17154__GPCmut8 (opt5)
aggagagucccgcagucggcguccagcggcucugcuuguucgugugugugucguugcaggccuuauucaagcuuaccaugggccagaucgugaccuucuuucaagaggucccccacguuauugaagaggugaugaacaucgugcugauugcccucagcauccuggcuguccuuaaggggcuguacaauuucgccacaugcggaauugugggccucguuuccuuucugcuucugugugggagaucuugcacgaccagccucuauaaaggaguguacgaacugcagacacuggagcucaacauggaaacccugaauauguguaugccucuuuccugcacaaagaacaauucucaucacuauaucauggucggcaacgagaccgggcuggagcucacacugaccaauacgagcaucauuaaccauaaauucuguaaucuuuccgacgcgcacaagaaaaaccuguacgaucaugcucucaugucuaucauuagcaccuuucaccuguccaucccgaauuucaaccaguaugaagccaugagcugcgacuuuaauggaggcaagauuucugugcaguacaaccugucccacagcuaugccggcgaugcugccaaucauugugggacaaucgcuaacggaguucuccaaaccuucaugcggauggccuggggcgggucuuacauugcgcuggacuccggacgcgauagaugggacugcaucaugacaagcuaccaguaucuuaucauucagaacaccacgugggaggaucacugucaguuuucucggcccuccccuaucggcuaccuggggcuccugagccaacgcacaagagacauuuauaucucccggcgccuucugggaaccuucacauggacccucucugauagcgaaggcaaggacacccccggcggguacugccugacaagauggaugcugauugaggccgagcucaaauguuuuggaaauacggcuguggccaagugcaacgaaaaacaugaugaggaguucugcgacaugcugcggcuuuuugauuucuguaagcaggcuauccagcgccugaaagccccugcgcagauguccauccaacucauuaauaaggccgucaacgcucugaucaaugaccagcuuauuaugaagaaccaccugagagacaucaugggcauucccuauugcaauuacagcaaauauuguuaccucaaccacaccacaaccgggaagacaucucugccuaaaugcugucugguguccaauggaagcuaccucaacgaaacccauuucucugaugacaucgaacagcaagccgauaauaugaucacggagaugcugcagaaggaguauauggaacggcagggcaaaacaccgcuugggcugguggaccucuuugucuucagcaccuccuuuuaccugauuucuaucuuccugcaccuuguuaagauucccacccaucgccacguggugggaaaaagcugcccuaagccccauagacucaaccacaugggcaucuguuccugcggccuguaugggcagccuggaguccccgugaaguggaaacggugaggacuaguaauaaggaaacuguaugaaugucugugggcaggaagugaagagauccuucuguaaagguuuuuggaauuaugucugcugaauaauaaacuuuuuugaaauaauaaaucugguagaaaaaugagaucucaaaggcucuuuucagagccaccaaaaaaaaaaaaaaaaaaaaaaaaaaaaaaaaaaaaaaaaaaaaaaaaaaaaaaaaaaaaaaaaagaauu

SEQ ID NO: 34176 - RNA, 1781 nt, Artificial Sequence
  mRNA product Design b-4 (hSL-A64-N5) comprising derived and/or modified sequence from MOPV/LASV reassortant(IGS-1;Clade IV)__AFY05576__GPCmut8 (opt5)
aggagagucccgcagucggcguccagcggcucugcuuguucgugugugugucguugcaggccuuauucaagcuuaccaugggccagaucgugaccuucuuucaagaggucccccacguuauugaagaggugaugaacaucgugcugauugcccucagcguccuggcugugcuuaaggggcuguacaauuucgccacaugcggacucguuggccuggugacguuucuucugcucugugggagauccugcaccacaucucuguauaaaggagucuacgaacugcagacccucgagcugaacauggaaacacuuaauauguguaugccucugagcugcaccaagaacaauucccaucacuauaucauggugggcaacgagacagggcucgagcugacccuuacgaauaccucuauuaucaaccauaaauucuguaaucugagcgacgcgcacaagaaaaaccucuacgaucaugcucugauguccaucauuucuacauuucaccugagcaucccgaauuucaaccaguaugaagccauguccugcgacuuuaauggaggcaagauuagcguucaguacaaccucucucacuccuaugccggcgaugcugccaaucauugugggaccguggcuaacggaguccugcaaacauucaugcggauggccuggggcgggagcuacaucgcgcuugacucuggacgcggcaacugggauugcauuaugaccuccuaccaguaucugaucauucagaauacgacaugggaggaccacugucaguuuagcagacccucuccuaucggguaccucggacugcuuucccaacggacccgcgauaucuauauuagcagacggcugcucggcacauucaccuggacccuguccgacucugaaggcgaggauacacccgggggauacugccugacgcgcuggaugcucaucgaggccgaacugaaguguuuuggcaacaccgcuguggccaaaugcaaugagaagcaugacgaagaguucugcgauaugcuuagacuguuugacuucuguaaacaggcuauucagcggcucaaggccccugcgcagaugagcauccaacugauuaacaaagccgugaaugcucuuaucaacgaucagcugaucaugaagaaucaccuccgcgacauuauggggauccccuauugcaacuacuccaaguauuguuaccugaaucacacaaccacaggaagaaccagccugccuaaaugcugucucgucucuaacggcuccuaccugaaugaaacgcauuucagcgacgauauugagcagcaagccgacaacaugaucacagagaugcuucagaaggaauauauggagcggcaggggaaaaccccgcugggacucguugaucuguuuguguucucuaccagcuuuuaccugauuuccaucuuccuucaccucgugaagauccccacacaucgccacauugucggcaaaucuugcccuaagccccauagacugaaucacaugggcaucuguagcugcgggcuguauaaacagccuggagugcccguuaaguggaagcggugaggacuaguaauaaggaaacuguaugaaugucugugggcaggaagugaagagauccuucuguaaagguuuuuggaauuaugucugcugaauaauaaacuuuuuugaaauaauaaaucugguagaaaaaugagaucucaaaggcucuuuucagagccaccaaaaaaaaaaaaaaaaaaaaaaaaaaaaaaaaaaaaaaaaaaaaaaaaaaaaaaaaaaaaaaaaagaauu

SEQ ID NO: 34177 - RNA, 1781 nt, Artificial Sequence
  mRNA product Design b-4 (hSL-A64-N5) comprising derived and/or modified sequence from LASV(LM765-SLE-2012;Clade IV)__AIT17814__GPCmut8 (opt5)
aggagagucccgcagucggcguccagcggcucugcuuguucgugugugugucguugcaggccuuauucaagcuuaccaugggccagaucgugaccuucuuucaagaggucccccacguuauugaagaggugaugaacaucgugcugauugcccucagcauccuggcuguccuuaaggggcuguacaauuucgccacaugcggacucgugggccugguuacguuucuucugcucugugggagauccugcaccacaucucuguauaaaggaguguacgaacugcagacccucgagcugaacauggaaacacuuaauauguguaugccucugagcugcaccaagaacaauucccaucacuauauuauggucggcaacgagacagggcucgagcugacccuuacgaauaccucuaucaucgaccauaaauucuguaaccugagcgaugcgcaccggaagaaucucuacgaccaugcucugauguccauuaucucuacauuucaccugagcauuccgaacuucaaucaguaugaagccauguccugcgauuuuaacggaggcaaaaucagcgugcaguacaaucucucucacuccuaugccaaggacgcugccgaucauuguggcaccguugcuaacggggugcugcaaacauucaugcgcauggccuggggaggcagcuacauugcgcuugacucugggagaggacggugggauugcaucaugaccuccuaccaguaucugauuauccagaauacgacaugggaggaccacugucaguuuagccgccccucuccuaucggcuaccucgggcugcuuucccaaagaacccgggauauuuauaucagccgcagacugcucggaacauucaccuggacccuguccgacucugaaggcaaggauacacccggcggguacugccugacgcgguggaugcucauugaggccgagcugaaauguuuuggaaacaccgcugucgccaagugcaacgaaaaacaugacgaggaguucugcgauaugcuucgccuguuugacuucuguaagcaggcuauccagagacucaaagccccugcgcagaugagcauucaacugaucaauaaggccgugaacgcucuuaucaaugaccagcugauuaugaagaaccaccuccgggauaucaugggcauucccuauugcaauuacuccaaauauuguuaccugaaccacacaaccacagggaagaccagccugccuaaaugcugucucgugucuaauggauccuaccugaacgaaacgcauuucagcgacgauaucgaacagcaagccgacaauaugauuacagagaugcuucagaaggaguauauggaacgccagggcaaaaccccgcuggggcucgucgaucuguuuguuuucucuaccagcuuuuaccugaucuccaucuuccuucaccucgugaagauucccacacauagacacaucgugggaaaaccuugccccaagccucaucggcugaaccacaugggcauuuguucuugcggccuguauaagcagcccggggucccggugaaauggaagcgcugaggacuaguaauaaggaaacuguaugaaugucugugggcaggaagugaagagauccuucuguaaagguuuuuggaauuaugucugcugaauaauaaacuuuuuugaaauaauaaaucugguagaaaaaugagaucucaaaggcucuuuucagagccaccaaaaaaaaaaaaaaaaaaaaaaaaaaaaaaaaaaaaaaaaaaaaaaaaaaaaaaaaaaaaaaaaagaauu

SEQ ID NO: 34178 - RNA, 1781 nt, Artificial Sequence
  mRNA product Design b-4 (hSL-A64-N5) comprising derived and/or modified sequence from LASV(LM776-SLE-2012;Clade IV)__AIT17824__GPCmut8 (opt5)
aggagagucccgcagucggcguccagcggcucugcuuguucgugugugugucguugcaggccuuauucaagcuuaccaugggccagaucgugaccuucuuucaagaggucccccacguuauugaagaggugaugaacaucgugcugauugcccucagcauccuggcuguccuuaaggggcuguacaauuucgccacaugcggacucgugggccugguuacguuucuucugcucugugggagauccugcaccacaucuguguauaaaggagucuacgaacugcagacccuggagcucaacauggaaacacugaauauguguaugccucuuagcugcaccaagaacaauucccaucacuauauuauggugggcaacgagacagggcuggagcucacccugacgaauaccucuaucaucaaccauaaauucuguaaucuuagcgacgcgcacaagaaaaaccuguacgaucaugcucucauguccauuaucucuacauuucaccugagcauuccgaauuucaaccaguaugaagccauguccugcgacuuuaauggaggcaagaucagcguucaguacaaccugucucacuccuaugccggcgaugcugccaaucauugugggaccguggcuaacggaguccuccaaacauucaugcggauggccuggggcgggagcuacauugcgcuggacucuggacacggcaagugggauugcaucaugaccuccuaccaguaucuuauuauccagaacacgacaugggaggaccauugucaguuuagccgccccucuccuaucggguaccugggacuccugucccaaagaacccgggauauuuauaucagccgcagacuucugggcacauucaccuggacccucuccgacucugaaggcaaagauacacccgggggauacugccugacgcgguggaugcugauugaggccgagcucaaguguuuuggcaauaccgcuguggccaaaugcaacgaaaagcacgacgaggaguucugcgauaugcugcgccuuuuugacuucuguaaacaggcuauccagagacugaaggccccugcgcagaugagcauucaacucaucaauaaggccgugaacgcucugaucaaugaucagcuuauuaugaaaaaccaucugcgggacaucauggggauucccuauugcaauuacuccaaguauuguuaccucaaccacacaaccacaggaaaaaccagccugccuaagugcugucuggucucuaauggcuccuaccucaacgaaacgcacuucagcgacgauaucgaacagcaagccgacaauaugauuacagagaugcugcagaaagaguauauggaacgccaggggaagaccccgcuuggacugguugaucucuuuguguucucuaccagcuuuuaccugaucuccaucuuccugcaucuugugaaaauucccacacacagacauaucgucggcaagucuugcccuaagccccaccggcucaaccacaugggcauuuguagcugcgggcuguauaaacagccuggagugcccguucgcuggaagagaugaggacuaguaauaaggaaacuguaugaaugucugugggcaggaagugaagagauccuucuguaaagguuuuuggaauuaugucugcugaauaauaaacuuuuuugaaauaauaaaucugguagaaaaaugagaucucaaaggcucuuuucagagccaccaaaaaaaaaaaaaaaaaaaaaaaaaaaaaaaaaaaaaaaaaaaaaaaaaaaaaaaaaaaaaaaaagaauu

SEQ ID NO: 34179 - RNA, 1781 nt, Artificial Sequence
  mRNA product Design b-4 (hSL-A64-N5) comprising derived and/or modified sequence from LASV(Mad39;Clade IV)__ANH09722__GPCmut8 (opt5)
aggagagucccgcagucggcguccagcggcucugcuuguucgugugugugucguugcaggccuuauucaagcuuaccaugggccagaucgugaccuucuuucaagaggucccccacguuauugaagaggugaugaacaucgugcugauugcccucagcauccuggcuguccuuaaggggcuguacaauguggccacaugcggacucauuggccugguuacguuccuucugcucugugggagauccugcaccacaacccuguauaaaggaguguacgaacugcaggcgcucgagcugaacauggaaacacuuaauauguguaugccucugucuugcaccaagaacaauagccaucacuauauccgggucggcaacgagacagggcucgagcugacccuuacgaauaccucccugaucaaccauaaauuuuguaaucucucugacgcucacaagaaaaaccuguacgaucaugcccugaugagcauuaucuccacauuccaccucucuauuccgaauuuuaaccaguaugaagccaugagcugcgacuucaaugauggaaagaucuccgugcaguacaaccugagccacaccuaugcuggcgacacagccaaucauuguggcaccguugcuaacggggugcuucaaacguuuaugcgcauggccuggggaggcucuuacauugcgcuggauuccgggagaggaggcugggacugcaucaugacaagcuaccaguaucucauuauccagaacaccacaugggaggaucacugucaguucucucggcccuccccuaucggguaccugggacuucugagccaacgcaccagagacauuuauaucucucggcgccuccugggcaccuuuacauggacgcuguccgauagcgaaggcaaggacacccccgggggauacugccucacaagauggaugcugauugaggccgagcuuaaauguuucggcaauaccgcugucgccaagugcaacgaaaaacaugaugaggaauuuugcgacaugcugcgccucuucgauuuuuguaagcaggcuauccagcggcugaaagccccugcgcagauguccauucaacuuaucaauaaggccgugaacgcucugaucaaugaccagcucauuaugaagaaccaccugagagacaucauggggauucccuauugcaauuacucuaaauauuguuaccugaaccacacagugaccggaaagacgagccucccuaaaugcugucuggucuccaauggcagcuaccuuaacgagacacauuucucugaugacaucgaacagcaagccgauaauaugauuaccgagaugcugcagaaggaguauauggaacggcaggggaaaaccccgcucggacugguugaccuguucguguuuuccaccagcuucuaccuuaucucuaucuuucuccaccuggugaagauucccacacaucgccacgucgugggcaaaccuugccccaagccucauagacugaaccacaugggcaucuguagcugcggguucuauaagcagcccggaguuccggugcgguggaaacgcugaggacuaguaauaaggaaacuguaugaaugucugugggcaggaagugaagagauccuucuguaaagguuuuuggaauuaugucugcugaauaauaaacuuuuuugaaauaauaaaucugguagaaaaaugagaucucaaaggcucuuuucagagccaccaaaaaaaaaaaaaaaaaaaaaaaaaaaaaaaaaaaaaaaaaaaaaaaaaaaaaaaaaaaaaaaaagaauu

SEQ ID NO: 34180 - RNA, 1781 nt, Artificial Sequence
  mRNA product Design b-4 (hSL-A64-N5) comprising derived and/or modified sequence from LASV(Z0947-SLE-2011;Clade IV)__AIT17840__GPCmut8 (opt5)
aggagagucccgcagucggcguccagcggcucugcuuguucgugugugugucguugcaggccuuauucaagcuuaccaugggccagaucgugaccuucuuucaagaggucccccacguuauugaagaggugaugaacaucgugcugauugcccucagcauccuggcuguccuuaaggggcuguacaauuucgccacaugcggacucgugggccugguuacguuucuucugcucugugggagauccugcaccauuucucuguauaaaggaguguacgaacugcagacacucgagcugaacauggaaacccuuaauauguguaugccucugagcugcacaaagaacaauucccaucacuauaucauggucggcaacgagaccgggcucgagcugacacuuaccaauacgucuaucauuaaccauaaauucuguaaucugagcgacgcgcacaagaaaaaccucuacgaucaugcucugauguccaucauuucuaccuuucaccugagcaucccgaauuucaaccaguaugaagccauguccugcgacuuuaauggaggcaagauuagcgugcaguacaaccucucucacuccuaugccggcgaugcugccaaucauugugggacaguugcuaacggagugcugcaaaccuucaugcggauggccuggggcgggagcuacaucgcgcuugacucuggacgcgauagaugggacugcauuaugacauccuaccaguaucugaucauccagaacaccacgugggaggaucacugucaguuuagccggcccucuccuauuggcuaccucgggcugcuuucccaacgcacaagagacaucuauauuagccggcgccugcucggaaccuucacauggacccuguccgauucugaaggcaaggacacccccggcggguacugccugacaagauggaugcucaucgaggccgagcugaaauguuuuggaaauacggcugucgccaagugcaacgaaaaacaugaugaggaguucugcgacaugcuucggcuguuugauuucuguaagcaggcuauucagcgccucaaagccccugcgcagaugagcauccaacugaucaauaaggccgugaacgcucuuauuaaugaccagcugaucaugaagaaccaccucagagacauuaugggcauccccuauugcaauuacuccaaauauuguuaccugaaccacaccacaaccgggaagacaagccugccuaaaugcugucucgugucuaauggauccuaccugaacgaaacccauuucagcgaugacauugaacagcaagccgauaauaugaucacggagaugcuucagaaggaguauauggaacggcagggcaaaacaccgcuggggcucgucgaccuguuuguuuucucuaccagcuuuuaccugaucuccauuuuccuucaccucgugaagauccccacccaucgccacauugugggaaaaccuugccccaagccucauagacugaaccacaugggcaucuguucuugcggccuguauaagcagcccggggucccggugaaauggaagcggugaggacuaguaauaaggaaacuguaugaaugucugugggcaggaagugaagagauccuucuguaaagguuuuuggaauuaugucugcugaauaauaaacuuuuuugaaauaauaaaucugguagaaaaaugagaucucaaaggcucuuuucagagccaccaaaaaaaaaaaaaaaaaaaaaaaaaaaaaaaaaaaaaaaaaaaaaaaaaaaaaaaaaaaaaaaaagaauu

SEQ ID NO: 34181 - RNA, 1812 nt, Artificial Sequence
  mRNA product Design b-4 (hSL-A100) comprising derived and/or modified sequence from LASV(Josiah;Clade IV)__NP_694870__GPCmut8 (opt1)
aggagagucccgcagucggcguccagcggcucugcuuguucgugugugugucguugcaggccuuauucaagcuuaccaugggccagaucgugaccuucuuccaggaggucccccacgugaucgaggaggugaugaacaucguccugaucgcccucagcgugcuggccgugcugaaggggcucuacaacuucgcgaccugcggccuggucgggcuggugacguuccuccugcugugcggccgcuccugcaccaccagccucuacaaggggguguacgagcugcagacccuggagcucaacauggagacgcugaacaugugcaugccgcuguccugcaccaagaacaacagccaccacuacaucauggucggcaacgagaccggccucgagcugacgcugaccaacaccuccaucaucaaccacaaguucugcaaccucagcgacgcccacaagaagaaccuguacgaccacgcccugauguccaucaucagcaccuuccaccucuccauccccaacuucaaccaguacgaggccaugagcugcgacuucaacgggggcaagaucuccgugcaguacaaccugagccacuccuacgccggggacgcggccaaccacugcggcacgguggccaacgggguccugcagaccuucaugcggauggccuggggcggcagcuacaucgcgcucgacuccgggcgcggcaacugggacugcaucaugaccagcuaccaguaccugaucauccagaacaccacgugggaggaccacugccaguucucccggcccagccccaucggguaccugggccuccugucccagcgcacccgggacaucuacaucagccgccggcugcucggcaccuucaccuggacgcugagcgacuccgaggggaaggacaccccgggcggguacugccugacccgcuggaugcucaucgaggccgagcugaagugcuucggcaacaccgccguggccaagugcaacgagaagcacgacgaggaguucugcgacaugcugcggcuguucgacuucugcaagcaggccauccagcgccugaaggcgcccgcccagaugagcauccagcugaucaacaaggccgugaacgcccucaucaacgaccagcugaucaugaagaaccaccuccgggacaucauggggauccccuacugcaacuacuccaaguacugcuaccucaaccacacgaccaccggccgcaccagccugcccaagugcugccuggucuccaacggcagcuaccucaacgagacgcacuucuccgacgacaucgagcagcaggccgacaacaugaucaccgagaugcugcagaaggaguacauggagcggcaggggaagacgccccugggccucguggaccuguucguguucagcaccuccuucuaccugaucagcaucuuccugcaccucgucaagaucccgacccaccgccacaucguggggaaguccugccccaagccccaccggcugaaccacaugggcaucugcagcugcgggcuguacaagcagcccggcgugccggucaaguggaagcgcugaggacuaguaauaaggaaacuguaugaaugucugugggcaggaagugaagagauccuucuguaaagguuuuuggaauuaugucugcugaauaauaaacuuuuuugaaauaauaaaucugguagaaaaaugagaucucaaaggcucuuuucagagccaccaaaaaaaaaaaaaaaaaaaaaaaaaaaaaaaaaaaaaaaaaaaaaaaaaaaaaaaaaaaaaaaaaaaaaaaaaaaaaaaaaaaaaaaaaaaaaaaaaaaaa

SEQ ID NO: 34182 - RNA, 1809 nt, Artificial Sequence
  mRNA product Design b-4 (hSL-A100) comprising derived and/or modified sequence from LASV(LP;Clade I)__AAF86701__GPCmut8 (opt1)
aggagagucccgcagucggcguccagcggcucugcuuguucgugugugugucguugcaggccuuauucaagcuuaccaugggccagaucaucaccuucuuccaggaggugccccacgucaucgaggaggugaugaacaucgugcugaucgcccucagccugcuggccauccucaaggggcuguacaacaucgcgaccugcggcaucaucgggcuggucgccuuccucuuccugugcggcaaguccugcagccugacgcucaagggcggguacgagcugcagacccuggagcucaacauggagacccugaacaugugcaugccgcuguccugcacgaagaacagcucccaccacuacauccgcgugggcaacgagaccgggcucgagcugacccugaccaacacgagcaucaucaaccacaaguucugcaaccucuccgacgcccacaagaagaaccuguacgaccacgcccugaugagcaucaucuccaccuuccaccucagcauccccaacuucaaccaguacgaggccauguccugcgacuucaacggcgggaagaucagcgugcaguacaaccugucccacagcuacgcgggcgacgccgccgagcacugcgggaccgucgccaacggcgugcugcagaccuucaugcggauggcguggggcgggcgcuacaucgcccucgacuccggcaaggggaacugggacugcaucaugacgagcuaccaguaccugaucauccagaacaccaccugggaggaccacugccaguucucccggcccagccccaucggcuaccugggccuccugucccagcgcacccgggacaucuacaucagccgccggcugcucgggacguucaccuggacccugagcgacuccgagggcaacgagacccccgggggcuacugccugacgcgcuggaugcucaucgaggccgagcugaagugcuucgggaacaccgccguggccaagugcaacgagaagcacgacgaggaguucugcgacaugcugcggcuguucgacuucugcaagcaggcgauccgccggcugaaggcccccgcccagaugagcauccagcugaucaacaaggccgucaacgcccucaucaacgaccagcugaucaugaagaaccaccuccgcgacaucaugggcauccccuacugcaacuacuccaaguacugcuaccucaaccacaccagcuccggccggaccagccugcccaagugcugccugaucuccaacgggagcuaccucaacgagacgcaguucuccgacgacaucgagcagcaggcggacaacaugaucaccgagaugcugcagaaggaguacaucgagcgccagggcaagaccccgcuggggcucguggacaucuucaucuucagcaccuccuucuaccugaucagcaucuuccugcaccugaucaagaucccgacgcaccggcacaucgugggcaagcccugccccaagccccaccgccucaaccacaugggggucugcuccugcggccuguacaagcacccgggcgugcccaccaaguggaagcggugaggacuaguaauaaggaaacuguaugaaugucugugggcaggaagugaagagauccuucuguaaagguuuuuggaauuaugucugcugaauaauaaacuuuuuugaaauaauaaaucugguagaaaaaugagaucucaaaggcucuuuucagagccaccaaaaaaaaaaaaaaaaaaaaaaaaaaaaaaaaaaaaaaaaaaaaaaaaaaaaaaaaaaaaaaaaaaaaaaaaaaaaaaaaaaaaaaaaaaaaaaaaaaaaa

SEQ ID NO: 34183 - RNA, 1809 nt, Artificial Sequence
  mRNA product Design b-4 (hSL-A100) comprising derived and/or modified sequence from LASV(803213;Clade II)__AAF86703__GPCmut8 (opt1)
aggagagucccgcagucggcguccagcggcucugcuuguucgugugugugucguugcaggccuuauucaagcuuaccaugggccagaucaucaccuucuuccaggaggugccccacgucaucgaggaggugaugaacaucgugcugaucgcccucagccugcuggccauccucaaggggaucuacaacgucgcgaccugcggccuguucgggcugaucuccuuccuccugcugugcggccgcagcugcuccgugacguacaaggggguguacgagcuccagacccuggagcugaacauggccaaccucaacaugugcaugccgcugagcugcaccaagaacaacucccaccacuacaucauggucggcaacgagacgggccuggagcucacccugaccaacaccagcaucaucaaccacaaguucugcaaccuguccgacgcccacaagaagaaccucuacgaccacgcccugaugagcaucaucuccacguuccaccugagcauccccaacuucaaccaguacgaggccauguccugcgacuucaacgggggcaagaucagcgugcaguacaaccucucccacagcuucgcgguggacgccgccaaccacugcgggaccaucgccaacggcguccugcagaccuucaugcggauggcguggggcggguccuacaucgcccuggacagcggcaaggggaacugggacugcaucaugaccuccuaccaguaccucaucauccagaacacgaccugggaggaccacugccaguucagccgccccucccccaucggcuaccuggggcugcucagccagcggacccgcgacaucuacaucagccggcgccugcugggcaccuucacguggacccucuccgacagcgagggcaacgaggcccccgggggcuacugccugacccgguggaugcugaucgaggccgagcucaagugcuucgggaacaccgccguggcgaagugcaacgagaagcacgacgaggaguucugcgacaugcugcgccuguucgacuucugcaagcaggccaucaagcggcucaagacgcccgcccagauguccauccagcugaucaacaaggccgugaacgcccugaucaacgaccagcucaucaugaagaaccaccuccgcgacaucaugggcauccccuacugcaacuacagccgguacugcuaccugaaccacaccgucaccgggaagaccucccugccccgcugcugccuggugagcaacggcuccuaccugaacgagacgcacuucagcgacgacaucgagcagcaggcggacaacaugaucaccgagaugcuccagaaggaguacauggaccggcagggcaagaccccgcuggggcugguggaccucuucgucuucuccaccagcuucuaccugaucuccaucuuccugcaccuggugaagaucccgacgcaccgccacaucgugggcaagcccugccccaagccccaccggcucaaccacauggggaucugcagcugcggccuguacaagcacccggggguccccgugaaguggaagcgcugaggacuaguaauaaggaaacuguaugaaugucugugggcaggaagugaagagauccuucuguaaagguuuuuggaauuaugucugcugaauaauaaacuuuuuugaaauaauaaaucugguagaaaaaugagaucucaaaggcucuuuucagagccaccaaaaaaaaaaaaaaaaaaaaaaaaaaaaaaaaaaaaaaaaaaaaaaaaaaaaaaaaaaaaaaaaaaaaaaaaaaaaaaaaaaaaaaaaaaaaaaaaaaaaa

SEQ ID NO: 34184 - RNA, 1809 nt, Artificial Sequence
  mRNA product Design b-4 (hSL-A100) comprising derived and/or modified sequence from LASV(GA391;Clade III)__CAA36645__GPCmut8 (opt1)
aggagagucccgcagucggcguccagcggcucugcuuguucgugugugugucguugcaggccuuauucaagcuuaccaugggccagaucgugaccuucuuccaggaggucccccacgugaucgaggaggugaugaacaucguccugaucgcccucagcauccuggccauccugaaggggcucuacaacguggcgaccugcggccugaucgggcuggugacguuccuccugcuguccggccgcagcugcucccucaucuacaaggggaccuacgagcugcagacccuggagcucaacauggagacccugaacaugugcaugccgcugagcugcaccaagaacaacucccaccacuacauccgggucggcaacgagaccggccucgagcugacccugacgaacaccagcauccucaaccacaaguucugcaaccuguccgacgcccacaagcgcaaccuguacgaccacagccucauguccaucaucagcaccuuccaccuguccauccccaacuucaaccaguacgaggccaugagcugcgacuucaacgggggcaagaucaccgugcaguacaaccugucccacagcuucgccguggacgccgcggggcacugcggcacgcucgccaacgggguccugcagaccuucaugcggauggccuggggcggcuccuacaucgcccuggacagcgggcgcggcaacugggacugcaucaugaccuccuaccaguaccucaucauccagaacaccacgugggacgaccacugccaguucagccggcccucccccaucggguaccugggccugcucagccagcgcacccgggacaucuacaucagccgccggcugcugggcaccuucaccuggacgcucuccgacagcgaggggaacgagaccccgggcggguacugccugacccgcuggaugcugaucgaggcggagcucaagugcuucggcaacaccgccguggccaagugcaacgagaagcacgacgaggaguucugcgacaugcugcggcuguucgacuucugcaagcaggccauccgccggcucaagacgcccgcccagauguccauccagcugaucaacaaggcggugaacgcccugaucaacgaccagcucaucaugaagaaccaccuccgcgacaucauggggauccccuacugcaacuacagccgguacugcuaccugaaccacaccuccaccggcaagaccagccugccccgcugcugccugaucuccaacggcagcuaccugaacgagacgaaguucuccgacgacaucgagcagcaggccgacaacaugaucaccgagaugcuccagaaggaguacaucgaccggcaggggaagacgccccugggccuggucgaccuguucguguucagcaccuccuucuaccucaucagcaucuuccugcaccuggugaagaucccgacccaccgccacaucgucgggaagcccugccccaagccccaccggcucaaccacaugggcaucugcuccugcgggcuguacaagcagccgggcgugcccgugcgcuggaagcggugaggacuaguaauaaggaaacuguaugaaugucugugggcaggaagugaagagauccuucuguaaagguuuuuggaauuaugucugcugaauaauaaacuuuuuugaaauaauaaaucugguagaaaaaugagaucucaaaggcucuuuucagagccaccaaaaaaaaaaaaaaaaaaaaaaaaaaaaaaaaaaaaaaaaaaaaaaaaaaaaaaaaaaaaaaaaaaaaaaaaaaaaaaaaaaaaaaaaaaaaaaaaaaaaa

SEQ ID NO: 34185 - RNA, 1812 nt, Artificial Sequence
  mRNA product Design b-4 (hSL-A100) comprising derived and/or modified sequence from LASV(AV;Clade V)__CCA30314__GPCmut8 (opt1)
aggagagucccgcagucggcguccagcggcucugcuuguucgugugugugucguugcaggccuuauucaagcuuaccaugggccagaucgugaccuucuuccaggaggucccccacgugaucgaggaggugaugaacaucguccugaucgcccucagcauccuggccgugcugaaggggcucuacaacaucgcgaccugcggccugaucgggcugaucacguuccuccugcugugcggccgcuccugcagcuccaaccucuacaaggggguguacgagcugcagagccuggaccucaacauggagacccugaacaugugcaugccgcuguccugcaccaagaacaacagccaccacuacauccgggucggcaacgacacgggccucgagcugacccugaccaacaccuccauccucaaccacaaguucugcaaccugagcgacgcccacaagaaggaccuguacgaccacgcccucauguccaucaucagcacguuccaccuguccauccccaacuucaaccaguacgaggccaugagcugcgacuucaacgggggcaagaucuccgugcaguacaaccugagccacuccuacgccaucgacgcggccaaccacugcgggaccguggccaacggcauccuccagaccuucaugcgcauggccuggggcgggagcuacaucgcgcuggacuccggccgggggaacugggacugcaucaugaccagcuaccaguaccugaucauccagaacacgaccugggagaaccacugccaguucucccgccccagccccaucggcuaccucgggcugcugagccagcggacccgcgacaucuacaucucccggcgccuccugggcaccuucacguggacccugagcgacuccgagggcaacgccacccccgggggcuacugccucacccgguggaugcugaucgaggccgagcugaagugcuucgggaacacggccgucgccaagugcaacgagaagcacgacgaggaguucugcgacaugcuccgccuguucgacuucugcaagcaggcgaucagccggcugaagucccccgcccagaugagcauccagcucaucaacaaggccgugaacgcccugaucaacgaccagcugaucaugaagaaccaccuccgcgacaucaugggcauccccuacugcaacuacuccaaguacugcuaccugaaccacaccaucaccgggaagaccagccugcccaagugcugccucguguccaacggcagcuaccugaacgagacgcacuucuccgacgacaucgagcagcaggccgacaacaugaucaccgagaugcugcagaaggaguacauggagcggcagggcaagaccccgcucgggcuggucgaccuguucguguucagcaccuccuucuaccugaucagcaucuuccuccgccuggugaagaucccgacgcaccggcacaucgucggcaagcccugccccaagccccaccgccugaaccacauggggaucugcuccugcggccucuacaagcagccgggggugcccgugcgguggaagcgcugaggacuaguaauaaggaaacuguaugaaugucugugggcaggaagugaagagauccuucuguaaagguuuuuggaauuaugucugcugaauaauaaacuuuuuugaaauaauaaaucugguagaaaaaugagaucucaaaggcucuuuucagagccaccaaaaaaaaaaaaaaaaaaaaaaaaaaaaaaaaaaaaaaaaaaaaaaaaaaaaaaaaaaaaaaaaaaaaaaaaaaaaaaaaaaaaaaaaaaaaaaaaaaaaa

SEQ ID NO: 34186 - RNA, 1809 nt, Artificial Sequence
  mRNA product Design b-4 (hSL-A100) comprising derived and/or modified sequence from LASV(Togo/2016/7082;Clade VI)__AMR44577__GPCmut8 (opt1)
aggagagucccgcagucggcguccagcggcucugcuuguucgugugugugucguugcaggccuuauucaagcuuaccaugggccagaucaucaccuucuuccaggaggugccccacgucaucgaggaggugaugaacaucgugcugaucgcccucagccugcuggccauccucaagggggucuacaacguggcgaccugcggcaucaucgggcuggugacguuccuguuccucugcggccgcuccugcagccugaucuacaagggguccuacgagcugcagacccucgagcugaacauggagacccugaacaugugcaugccgcucagcugcacgaagaacuccagccaccacuacauccgggucggcaacgagaccggccuggagcugacccucaccaacacguccaucaucaaccacaaguucugcaaccugagcgacgcccacaagcgcaaccuguacgaccacgcccucauguccauccugagcaccuuccaccuguccauccccaacuucaaccaguacgaggccaugagcugcgacuucaacgggggcaagaucuccgugcaguacaaccucagccacgccuacgcgguggacgccgccgagcacugcgggaccgucgccaacggcgugcugcagaccuucaugcggauggcguggggcggguccuacaucgcccuggacagcggccgcgggaacugggacugcaucaugacguccuaccaguaccucaucauccagaacaccaccugggaggaccacugccaguucagccggcccucccccaucggcuaccuggggcugcucagccagcgcacccgggacaucuacaucagccgccggcugcugggcacguucaccuggacccucuccgacagcgagggcaacgagacccccgggggcuacugccugacgcgcuggaugcugaucgaggccgagcucaagugcuucgggaacaccgccguggccaagugcaacgagaagcacgacgaggaguucugcgacaugcugcggcuguucgacuucugcaagcaggcgauccagcgccucaagucccccgcccagaugagcauccagcugaucaacaaggccgucaacgcccugaucaacgaccagcucaucaugaagaaccaccuccgggacaugaugggcauccccuacugcaacuacuccaaguacugcuaccugaaccacaccagcuccgggcgcaccagccugcccaagugcugccugguguccaacggcagcuaccugaacgagacgcacuucuccgacgacaucgagcagcaggccgacaacaugaucaccgagaugcuccagaaggaguacaucgaccggcagggcaagaccccgcuggggcugguggaccucuucgucuucagcaccuccuucuaccugaucagcaucuuccugcaccugaucaagaucccgacgcaccgccacaucgugggcaagcccugccccaagccccaccggcucaaccacauggggaucugcuccugcggccuguacaagcagccgggggugcccacccgcuggaagcggugaggacuaguaauaaggaaacuguaugaaugucugugggcaggaagugaagagauccuucuguaaagguuuuuggaauuaugucugcugaauaauaaacuuuuuugaaauaauaaaucugguagaaaaaugagaucucaaaggcucuuuucagagccaccaaaaaaaaaaaaaaaaaaaaaaaaaaaaaaaaaaaaaaaaaaaaaaaaaaaaaaaaaaaaaaaaaaaaaaaaaaaaaaaaaaaaaaaaaaaaaaaaaaaaa

SEQ ID NO: 34187 - RNA, 1809 nt, Artificial Sequence
  mRNA product Design b-4 (hSL-A100) comprising derived and/or modified sequence from LASV(KAK-428;Clade n.d. (VII))__ANH09740__GPCmut8 (opt1)
aggagagucccgcagucggcguccagcggcucugcuuguucgugugugugucguugcaggccuuauucaagcuuaccaugggccagaucgugaccuucuuccaggaggucccccacgugaucgaggaggugaugaacaucguccugaucgcccucagccugcuggccauccucaaggggcuguacaacuucgcgaccugcggcgugaucgggcugaucacguuccuccugcugugcggccgcuccugcagcgccaccuacaaggggcaguacgagcuccagacccuggagcugaacauggagucccucaacaugugcaugccgcugagcugcacgaagaacaacucccaccacuacauccgggccggcaacaacaccggccuggagcucacccugaccaacacgagcaucaucucccacaaguucugcaaccugagcgacgcccacaagaagaaccucuacgaccacacccugauguccaucaucaccaccuuccaccugagcauccccaacuucaaccaguacgaggccauguccugcgacuucaacgggggcaagaucagcauccaguacaaccucucccacagcuacgcgggggacgccgcccagcacugcggcacgguggccaacgggguccugcagaccuucaugcgcauggcguggggcggcuccuaccuggcccucgacagcgggcggcgcggcugggacugcaucaucuccagcuaccaguaccugaucauccagaacaccaccugggacgaccacugccaguucucccggcccagccccaucggguaccugggcuucgugagccagaagacgcgcgacaucuacaucucccggcgccuccugggcaccuucaccuggacccugagcgacuccgaggggcacgacaugccgggcggguacugccucacgcgguggaugcugaucgaggccgaccugaagugcuucggcaacaccgccguggccaagugcaacgagaagcacgacgaggaguucugcgacauguggcgccucuucgacuucugcaagcaggcgauccagcggcugaaggcccccgcccagaugaacauccagcugaucaacaaggccgucaacgcccucaucaacgaccagcugaugaugaagaaccaccuccgcgacaucauggggauccccuacugcaacuacagcaaguucugcuaccugaacaacaccaccacgggccggaccucccugccccgcugcugccugaucagcaacggcuccuaccucaacgagacccacuucagcgacgacaucgagcagcaggcggacaacaugaucaccgagaugcugcagaaggaguacauggaccggcaggggaagacgccccugggccucguggaccuguucguguucuccaccagcuucuaccugaucaccaucuuccuccaccuggucaagaucccgacccaccgccacaucguggggaagcccugccccaagccccaccggcugaaccacaugggcaucugcuccugcgggcuguacaagcagccgggcgugcccguccgcuggaagcggugaggacuaguaauaaggaaacuguaugaaugucugugggcaggaagugaagagauccuucuguaaagguuuuuggaauuaugucugcugaauaauaaacuuuuuugaaauaauaaaucugguagaaaaaugagaucucaaaggcucuuuucagagccaccaaaaaaaaaaaaaaaaaaaaaaaaaaaaaaaaaaaaaaaaaaaaaaaaaaaaaaaaaaaaaaaaaaaaaaaaaaaaaaaaaaaaaaaaaaaaaaaaaaaaa

SEQ ID NO: 34188 - RNA, 1809 nt, Artificial Sequence; identical to SEQ ID NO: 34182
  mRNA product Design b-4 (hSL-A100) comprising derived and/or modified sequence from LASV(Pinneo-NIG-1969;Clade I)__AIT17836__GPCmut8 (opt1)

SEQ ID NO: 34189 - RNA, 1809 nt, Artificial Sequence
  mRNA product Design b-4 (hSL-A100) comprising derived and/or modified sequence from LASV(ISTH0009-NIG-2011;Clade II)__AIT17404__GPCmut8 (opt1)
aggagagucccgcagucggcguccagcggcucugcuuguucgugugugugucguugcaggccuuauucaagcuuaccaugggccagaucaucaccuucuuccaggaggugccccacgucaucgaggaggugaugaacaucgugcugaucgcccucagccugcuggccauccucaaggggaucuacaacgucgcgaccugcggccuguucgggcugguguccuuccuccugcugugcggccgcagcugcuccacgaccuacaaggggguguacgagcuccagacccuggagcuggacauggccagccucaacaugugcaugccgcuguccugcacgaagaacaacagccaccacuacaucauggucggcaacgagaccggccuggagcucacccugaccaacacguccaucaucaaccacaaguucugcaaccugagcgacgcccacaagaagaaccucuacgaccacgcccugauguccaucaucagcaccuuccaccuguccauccccaacuucaaccaguacgaggccaugagcugcgacuucaacgggggcaagaucuccgugcaguacaaccucagccacgcguacgccguggacgccgccaaccacugcgggaccaucgcgaacggcguccugcagaccuucaugcggauggccuggggcggguccuacaucgcccuggacagcggcaagggguccugggacugcaucaugacgagcuaccaguaccucaucauccagaacaccaccugggaggaccacugccaguucucccgccccagccccaucggcuaccuggggcugcucagccagcggacccgcgacaucuacaucucccggcgccugcugggcacguucaccuggacccucagcgacuccgagggcaacgagacccccgggggcuacugccugacgcgguggaugcugaucgaggccgagcucaagugcuucgggaacaccgccguggcgaagugcaacgagaagcacgacgaggaguucugcgacaugcugcgccuguucgacuucugcaagcaggccauccggcgccucaagacccccgcccagaugagcauccagcugaucaacaaggccgugaacgcccugaucaacgaccagcucaucaugaagaaccaccuccgggacaucaugggcaucccguacugcaacuacuccaaguacugcuaccugaaccacaccgucacggggaagaccagccugccccgcugcugccugguguccaacggcagcuaccugaacgagacccacuucuccgacgacaucgagcagcaggcggacaacaugaucaccgagcuccugcagaaggaguacauggaccggcagggcaagacgccccuggggcucguggaccuguucgucuucagcaccuccuucuaccugaucagcaucuuccugcaccucaucaagaucccgacccaccgccacaucaccggcaagcccugccccaagccccaccggcugaaccacauggggaucugcuccugcggccuguacaagcacccgggggugcccgugaaguggaagcgcugaggacuaguaauaaggaaacuguaugaaugucugugggcaggaagugaagagauccuucuguaaagguuuuuggaauuaugucugcugaauaauaaacuuuuuugaaauaauaaaucugguagaaaaaugagaucucaaaggcucuuuucagagccaccaaaaaaaaaaaaaaaaaaaaaaaaaaaaaaaaaaaaaaaaaaaaaaaaaaaaaaaaaaaaaaaaaaaaaaaaaaaaaaaaaaaaaaaaaaaaaaaaaaaaa

SEQ ID NO: 34190 - RNA, 1809 nt, Artificial Sequence
  mRNA product Design b-4 (hSL-A100) comprising derived and/or modified sequence from LASV(ISTH2010-NIG-2012;Clade II)__AIT17482__GPCmut8 (opt1)
aggagagucccgcagucggcguccagcggcucugcuuguucgugugugugucguugcaggccuuauucaagcuuaccaugggccagaucaucaccuucuuccaggaggugccccacgucaucgaggaggugaugaacaucgugcugaucgcccucagccugcuggccauccucaaggggaucuacaacgucgcgaccugcggccuguucgggcugguguccuuccuccugcugugcggccgcagcugcuccacgaccuacaaggggguguacgagcuccagacccuggagcuggacauggccagccucaacaugugcaugccgcuguccugcacgaagaacaacagccaccacuacaucauggucggcaacgagaccggccuggagcucacccugaccaacacguccaucaucaaccacaaguucugcaaccugagcgacgcccacaagaagaaccucuacgaccacgcccugauguccaucaucagcaccuuccaccuguccauccccaacuucaaccaguacgaggccaugagcugcgacuucaacgggggcaagaucuccgugcaguacaaccucagccacgcguacgccguggacgccgccaaccacugcgggaccaucgcgaacggcguccugcagaccuucaugcggauggccuggggcggguccuacaucgcccuggacagcggcaagggguccugggacugcaucaugacgagcuaccaguaccucaucauccagaacaucaccugggaggaccacugccaguucucccgccccagccccaucggcuaccuggggcugcucagccagcggacccgcgacaucuacaucucccggcgccugcugggcaccuucacguggacccucagcgacuccgagggcaacgagacccccgggggcuacugccugacccgguggaugcugaucgaggccgagcucaagugcuucgggaacacggccguggcgaagugcaacgagaagcacgacgaggaguucugcgacaugcugcgccuguucgacuucugcaagcaggccauccggcgccucaagacccccgcccagaugagcauccagcugaucaacaaggccgugaacgcccugaucaacgaccagcucaucaugaagaaccaccuccgggacaucaugggcauccccuacugcaacuacuccaaguacugcuaccugaaccacaccgucaccgggaagacgagccugccccgcugcugccugguguccaacggcagcuaccugaacgagacccacuucuccgacgacaucgagcagcaggcggacaacaugaucaccgagcuccugcagaaggaguacaucgaccggcagggcaagaccccgcuggggcucguggaccuguucgucuucagcacguccuucuaccugaucagcaucuuccugcaccucgugaagaucccgacccaccgccacguggucggcaagcccugccccaagccccaccggcugaaccacauggggaucugcuccugcggccuguacaagcacccgggggugcccgugaaguggaagcgcugaggacuaguaauaaggaaacuguaugaaugucugugggcaggaagugaagagauccuucuguaaagguuuuuggaauuaugucugcugaauaauaaacuuuuuugaaauaauaaaucugguagaaaaaugagaucucaaaggcucuuuucagagccaccaaaaaaaaaaaaaaaaaaaaaaaaaaaaaaaaaaaaaaaaaaaaaaaaaaaaaaaaaaaaaaaaaaaaaaaaaaaaaaaaaaaaaaaaaaaaaaaaaaaaa

SEQ ID NO: 34191 - RNA, 1809 nt, Artificial Sequence
  mRNA product Design b-4 (hSL-A100) comprising derived and/or modified sequence from LASV(Lassa virus/H.sapiens-wt/NGA/2015/ISTH_0543;Clade II)__AVO03639__GPCmut8 (opt1)
aggagagucccgcagucggcguccagcggcucugcuuguucgugugugugucguugcaggccuuauucaagcuuaccaugggccagaucaucaccuucuuccaggaggugccccacgucaucgaggaggugaugaacaucgugcugaucgcccucagccugcuggccauccucaaggggaucuacaacgucgcgaccugcggccuguucgggcugguguccuuccuccugcugugcggccgcagcugcuccacgaccuacaaggggguguacgagcuccagacccuggagcuggacauggccaaccucaacaugugcaugccgcugagcugcacgaagaacaacucccaccacuacaucauggucggcaacgagaccggccuggagcucacccugaccaacacgagcaucaucaaccacaaguucugcaaccuguccgacgcccacaagaagaaccucuacgaccacgcccugaugagcaucaucuccaccuuccaccugagcauccccaacuucaaccaguacgaggccauguccugcgacuucaacgggggcaagaucagcgugcaguacaaccucucccacaccuacgcgguggacgccgccaaccacugcgggaccaucgccaacggcguccugcagacguucaugcggauggcguggggcgggagcuacaucgcccuggacuccggcaaggggagcugggacugcaucaugaccuccuaccaguaccucgugauccagaacaccaccugggaggaccacugccaguucagccgccccucccccaucggcuaccuggggcugcucagccagcggacgcgcgacaucuacaucagccggcgccugcugggcaccuucaccuggacccucuccgacagcgagggcaacgagacgcccgggggcuacugccugacccgguggaugcugaucgaggccgagcucaagugcuucgggaacaccgccguggccaagugcaacgagaagcacgacgaggaguucugcgacaugcugcgccuguucgacuucugcaagcaggcgauccggcgccucaagacccccgcccagauguccauccagcugaucaacaaggccgucaacgcccugaucaacgaccagcucaucaugaagaaccaccuccgggacaucaugggcauccccuacugcaacuacagcaaguacugcuaccugaaccacacggugaccgggaagaccucccugccccgcugcugccuggugagcaacggcuccuaccugaacgagacccacuucagcgacgacaucgagcagcaggccgacaacaugaucacggagcuccugcagaaggaguacaucgaccggcagggcaagaccccgcuggggcucgucgaccuguucguguucuccaccagcuucuaccugaucuccaucuuccugcaccucgugaagaucccgacccaccgccacaucacgggcaagcccugccccaagccccaccggcugaaccacauggggaucugcagcugcggccuguacaagcacccggggguccccgugaaguggaagcgcugaggacuaguaauaaggaaacuguaugaaugucugugggcaggaagugaagagauccuucuguaaagguuuuuggaauuaugucugcugaauaauaaacuuuuuugaaauaauaaaucugguagaaaaaugagaucucaaaggcucuuuucagagccaccaaaaaaaaaaaaaaaaaaaaaaaaaaaaaaaaaaaaaaaaaaaaaaaaaaaaaaaaaaaaaaaaaaaaaaaaaaaaaaaaaaaaaaaaaaaaaaaaaaaaa

SEQ ID NO: 34192 - RNA, 1809 nt, Artificial Sequence
  mRNA product Design b-4 (hSL-A100) comprising derived and/or modified sequence from LASV(Lassa virus/H.sapiens-wt/NGA/2016/ISTH_0009;Clade II)__AVO03571__GPCmut8 (opt1)
aggagagucccgcagucggcguccagcggcucugcuuguucgugugugugucguugcaggccuuauucaagcuuaccaugggccagaucaucaccuucuuccaggaggugccccacgucaucgaggaggugaugaacaucgugcugaucgcccucagccugcuggccauccucaaggggaucuacaacgucgcgaccugcggccugcuggggcucguguccuuccugcugcucugcggccgcagcugcuccacgaccuacaaggggguguacgagcugcagacccuggagcucgacauggccagccugaacaugugcaugccgcuguccugcacgaagaacaacagccaccacuacaucauggucggcaacgagaccggccucgagcugacccugaccaacacguccaucaucaaccacaaguucugcaaccucagcgacgcccacaagaagaaccuguacgaccacgcccugauguccaucaucagcaccuuccaccucuccauccccaacuucaaccaguacgaggccaugagcugcgacuucaacgggggccggaucuccgugcaguacaaccugagccacuccuacgcgguggacgccgccaaccacugcgggaccaucgccaacggcguccugcagaccuucaugcgcauggcguggggcgggagcuacaucgcccucgacuccggcaaggggagcugggacugcaucaugacguccuaccaguaccugaucauccagaacaccaccugggaggaccacugccaguucagccggcccagccccaucggcuaccuggggcuccugucccagcgcacccgggacaucuacaucagccgccggcugcucggcacguucaccuggacccuguccgacagcgagggcaacgagacccccgggggcuacugccugacgcgcuggaugcucaucgaggccgagcugaagugcuucgggaacaccgccguggccaagugcaacgagaagcacgacgaggaguucugcgacaugcugcggcuguucgacuucugcaagcaggcgauccgccggcugaagacccccgcccagauguccauccagcugaucaacaaggccgugaacgcccucaucaacgaccagcugaucaugaagaaccaccuccgcgacaucaugggcaucccguacugcaacuacagcaaguacugcuaccucaaccacaccgucacggggaagaccucccugccccggugcugccuggugagcaacggcuccuaccucaacgagacccacuucagcgacgacaucgagcagcaggccgacaacaugaucaccgagcugcugcagaaggaguacaucgaccgccagggcaagacgccccucgggcugguggaccuguucgucuucuccaccagcuucuaccugaucuccaucuuccuccaccuggugaagaucccgacccaccggcacaucaccggcaagcccugccccaagccccaccgccugaaccacauggggaucugcagcugcggccucuacaaccacccgggggugcccgucaaguggaagcggugaggacuaguaauaaggaaacuguaugaaugucugugggcaggaagugaagagauccuucuguaaagguuuuuggaauuaugucugcugaauaauaaacuuuuuugaaauaauaaaucugguagaaaaaugagaucucaaaggcucuuuucagagccaccaaaaaaaaaaaaaaaaaaaaaaaaaaaaaaaaaaaaaaaaaaaaaaaaaaaaaaaaaaaaaaaaaaaaaaaaaaaaaaaaaaaaaaaaaaaaaaaaaaaaa

SEQ ID NO: 34193 - RNA, 1809 nt, Artificial Sequence
  mRNA product Design b-4 (hSL-A100) comprising derived and/or modified sequence from LASV(Lassa virus/H.sapiens-wt/NGA/2016/ISTH_0017;Clade II)__AVO03567__GPCmut8 (opt1)
aggagagucccgcagucggcguccagcggcucugcuuguucgugugugugucguugcaggccuuauucaagcuuaccaugggccagaucaucaccuucuuccaggaggugccccacgucaucgaggaggugaugaacaucgugcugaucgcccucagccugcuggccauccucaaggggaucuacaacgucgcgaccugcggccuguucgggcugguguccuuccuccugcugugcggccgcagcugcuccacgaccuacaaggggguguacgagcuccagacccuggagcuggacauggccagccucaacaugugcaugccgcuguccugcacgaagaacaacagccaccacuacaucauggucggcaacgagaccggccuggagcucacccugaccaacacguccaucaucaaccacaaguucugcaaccugagcgacgcccacaagaagaaccucuacgaccacgcccugauguccaucaucagcaccuuccaccuguccauccccaacuucaaccaguacgaggccaugagcugcgacuucaacgggggcaagaucuccgugcaguacaaccucagccacaccuacgcgaucgacgccgccaaccacugcgggaccaucgccaacggcgugcugcagacguucaugcggauggcguggggcggguccuacaucgcccuggacagcggcaagggguccugggacugcaucaugaccagcuaccaguaccucaucauccagaacaccaccugggaggaccacugccaguucucccgccccagccccaucggcuaccuggggcugcucagccagcggacgcgcgacaucuacaucucccggcgccugcugggcaccuucaccuggacccucagcgacuccgagggcaacgagacgcccgggggcuacugccugacccgguggaugcugaucgaggccgagcucaagugcuucgggaacaccgccgucgccaagugcaacgagaagcacgacgaggaguucugcgacaugcugcgccuguucgacuucugcaagcaggcgauccggcgccucaagacccccgcccagaugagcauccagcugaucaacaaggccgugaacgcccugaucaacgaccagcucaucaugaagaaccaccuccgggacaucaugggcauccccuacugcaacuacuccaaguacugcuaccugaaccacacggugaccgggaagaccagccugccccgcugcugccuggucuccaacggcagcuaccugaacgagacccacuucuccgacgacaucgagcagcaggccgacaacaugaucacggagcuccugcagaaggaguacauggaccggcagggcaagaccccgcuggggcucguggaccuguucguguucagcaccuccuucuaccugaucagcaucuuccugcaccucguccgcaucccgacccaccggcacgugaucggcaagcccugccccaagccccaccgccugaaccacauggggaucugcuccugcggccuguacaagcacccgggggugcccgucaaguggaagcggugaggacuaguaauaaggaaacuguaugaaugucugugggcaggaagugaagagauccuucuguaaagguuuuuggaauuaugucugcugaauaauaaacuuuuuugaaauaauaaaucugguagaaaaaugagaucucaaaggcucuuuucagagccaccaaaaaaaaaaaaaaaaaaaaaaaaaaaaaaaaaaaaaaaaaaaaaaaaaaaaaaaaaaaaaaaaaaaaaaaaaaaaaaaaaaaaaaaaaaaaaaaaaaaaa

SEQ ID NO: 34194 - RNA, 1809 nt, Artificial Sequence
  mRNA product Design b-4 (hSL-A100) comprising derived and/or modified sequence from LASV(Lassa virus/H.sapiens-wt/NGA/2018/ISTH_0959;Clade II)__AVV65099__GPCmut8 (opt1)
aggagagucccgcagucggcguccagcggcucugcuuguucgugugugugucguugcaggccuuauucaagcuuaccaugggccagaucaucaccuucuuccaggaggugccccacgucaucgaggaggugaugaacaucgugcugaucgcccucagccugcuggccauccucaaggggaucuacaacgucgugaccugcggccuguucgggcugguguccuuccuccugcugugcggccgcagcugcuccacgaccuacaagggggucuacgagcuccagacccuggagcuggacauggcgagccucaacaugugcaugccgcuguccugcacgaagaacaacagccaccacuacaucauggugggcaacgagaccggccuggagcucacccugaccaacacguccaucaucaaccacaaguucugcaaccugagcgacgcccacaagaagaaccucuacgaccacgcccugauguccaucaucagcaccuuccaccuguccauccccaacuucaaccaguacgaggccaugagcugcgacuucaacgggggcaagaucuccgugcaguacaaccucagccacgccuacgcgaucgacgccgccaaccacugcgggaccaucgccaacggcguccugcagaccuucaugcggauggcguggggcggguccuacaucgcccuggacagcggcaagggguccugggacugcaucaugacgagcuaccaguaccucaucauccagaacaccaccugggaggaccacugccaguucucccgccccagccccaucggcuaccuggggcugcucagccagcggacccgcgacaucuacaucucccggcgccugcugggcacguucaccuggacccucagcgacuccgagggcaacgagacccccgggggcuacugccugacgcgguggaugcugaucgaggccgagcucaagugcuucgggaacaccgccguggccaagugcaacgagaagcacgacgaggaguucugcgacaugcugcgccuguucgacuucugcaagcaggcgauccggcgccucaagacccccgcccagaugagcauccagcugaucaacaaggccgugaacgcccugaucaacgaccagcucaucaugaagaaccaccuccgggacaucaugggcaucccguacugcaacuacuccaaguacugcuaccugaaccacaccgucacggggaagaccagccugccccgcugcugccugguguccaacggcagcuaccugaacgagacccacuucuccgacgacaucgagcagcaggccgacaacaugaucaccgagcuccugcagaaggaguacaucgaccggcagggcaagacgccccuggggcucguggaccuguucgucuucagcaccuccuucuaccugaucagcaucuuccugcaccucgugaagaucccgacccaccgccacgugaucggcaagcccugccccaagccccaccggcugaaccacauggggaucugcuccugcggccuguacaagcacccggggguccccgugaaguggaagcgcugaggacuaguaauaaggaaacuguaugaaugucugugggcaggaagugaagagauccuucuguaaagguuuuuggaauuaugucugcugaauaauaaacuuuuuugaaauaauaaaucugguagaaaaaugagaucucaaaggcucuuuucagagccaccaaaaaaaaaaaaaaaaaaaaaaaaaaaaaaaaaaaaaaaaaaaaaaaaaaaaaaaaaaaaaaaaaaaaaaaaaaaaaaaaaaaaaaaaaaaaaaaaaaaaa

SEQ ID NO: 34195 - RNA, 1809 nt, Artificial Sequence
  mRNA product Design b-4 (hSL-A100) comprising derived and/or modified sequence from LASV(LASV003-NIG-2008;Clade II)__AIT17580__GPCmut8 (opt1)
aggagagucccgcagucggcguccagcggcucugcuuguucgugugugugucguugcaggccuuauucaagcuuaccaugggccagaucaucaccuucuuccaggaggugccccacgucaucgaggaggugaugaacaucgugcugaucgcccucagccugcuggccauccucaaggggaucuacaacgucgcgaccugcggccuguucgggcugguguccuuccuccugcugugcggccgcagcugcuccacgaccuacaaggggguguacgagcuccagacccuggagcuggacauggccagccucaacaugugcaugccgcuguccugcacgaagaacaacagccaccacuacaucauggucggcaacgagaccggccuggagcucacccugaccaacacguccaucaucaaccacaaguucugcaaccugagcgacgcccacaagaagaaccucuacgaccacgcccugauguccaucaucagcaccuuccaccuguccauccccaacuucaaccaguacgaggccaugagcugcgacuucaacgggggcaagaucuccgugcaguacaaccucagccacaccuacgcgguggacgccgccaaccacugcgggaccaucgccaacggcguccugcagacguucaugcggauggcguggggcggguccuacaucgcccuggacagcggcaagggguccugggacugcaucaugaccagcuaccaguaccucaucauccagaacaccaccugggaggaccacugccaguucucccgccccagccccaucggcuaccuggggcugcucagccagcggacgcgcgacaucuacaucucccggcgccugcugggcaccuucaccuggacccucagcgacuccgagagcaacgagacgccgggcggguacugccugacccgguggaugcugaucgaggccgagcucaagugcuucggcaacaccgccguggccaagugcaacgagaagcacgacgaggaguucugcgacaugcugcgccuguucgacuucugcaagcaggcgauccggcgccucaaggcccccgcccagauguccauccagcugaucaacaaggccgugaacgcccugaucaacgaccagcucaucaugaagaaccaccuccgggacaucauggggauccccuacugcaacuacagcaaguacugcuaccugaaccacaccgucacgggccgcaccucccugccccggugcugccuggugagcaacggguccuaccugaacgagacccacuucagcgacgacaucgagcagcaggcggacaacaugaucaccgagcuccugcagaaggaguacauggaccgccagggcaagacgccccugggccucguggaccuguucgucuucuccaccagcuucuaccugaucuccaucuuccugcaccucgugaagaucccgacccaccggcacgugaucgggaagcccugccccaagccccaccgccugaaccacaugggcaucugcagcugcgggcuguacaagcacccgggcguccccgugaaguggaagcggugaggacuaguaauaaggaaacuguaugaaugucugugggcaggaagugaagagauccuucuguaaagguuuuuggaauuaugucugcugaauaauaaacuuuuuugaaauaauaaaucugguagaaaaaugagaucucaaaggcucuuuucagagccaccaaaaaaaaaaaaaaaaaaaaaaaaaaaaaaaaaaaaaaaaaaaaaaaaaaaaaaaaaaaaaaaaaaaaaaaaaaaaaaaaaaaaaaaaaaaaaaaaaaaaa

SEQ ID NO: 34196 - RNA, 1809 nt, Artificial Sequence
  mRNA product Design b-4 (hSL-A100) comprising derived and/or modified sequence from LASV(LASV035-NIG-2009;Clade II)__AIT17588__GPCmut8 (opt1)
aggagagucccgcagucggcguccagcggcucugcuuguucgugugugugucguugcaggccuuauucaagcuuaccaugggccagaucaucaccuucuuccaggaggugccccacgucaucgaggaggugaugaacaucgugcugaucgcccucagccugcuggccauccucaaggggaucuacaacgucgcgaccugcggccuguucgggcugguguccuuccuccugcugugcggccgcagcugcuccacgaccuacaaggggguguacgagcuccagacccuggagcuggacauggccagccucaacaugugcaugccgcuguccugcacgaagaacaacagccaccacuacaucauggucggcaacgagaccggccuggagcucacccugaccaacacguccaucaucaaccacaaguucugcaaccugagcgacgcccacaagaagaaccucuacgaccacgcccugauguccaucaucagcaccuuccaccuguccauccccaacuucaaccaguacgaggccaugagcugcgacuucaacgggggcaagaucuccgugcaguacaaccucagccacgcguacgccguggacgccgccaaccacugcgggaccaucgcgaacggcguccugcagaccuucaugcggauggccuggggcggguccuacaucgcccuggacagcggcaagggguccugggacugcaucaugacgagcuaccaguaccucaucauccagaacaccaccugggaggaccacugccaguucucccgccccagccccaucggcuaccuggggcugcucagccagcggacccgcgacaucuacaucucccggcgccugcugggcacguucaccuggacccucagcgacuccgagggcaacgagacccccgggggcuacugccugacgcgguggaugcugaucgaggccgagcucaagugcuucgggaacaccgccguggcgaagugcaacgagaagcacgacgaggaguucugcgacaugcugcgccuguucgacuucugcaagcaggccauccggcgccucaaggcccccgcccagaugagcauccagcugaucaacaaggccgugaacgcgcugaucaacgaccagcucaucaugaagaaccaccuccgggacaucaugggcauccccuacugcaacuacuccaaguacugcuaccugaaccacaccgucaccgggaagacgagccugccccgcugcugccugguguccaacggcagcuaccugaacgagacccacuucuccgacgacaucgagcagcaggccgacaacaugaucaccgagcuccugcagaaggaguacaucgaccggcagggcaagaccccgcuggggcucguggaccuguucgucuucagcacguccuucuaccugaucagcaucuuccugcaccucgugaagaucccgacccaccgccacgugaucggcaagcccugccccaagccccaccggcugaaccacauggggaucugcuccugcggccuguacaagcacccggggguccccgugaaguggaagcgcugaggacuaguaauaaggaaacuguaugaaugucugugggcaggaagugaagagauccuucuguaaagguuuuuggaauuaugucugcugaauaauaaacuuuuuugaaauaauaaaucugguagaaaaaugagaucucaaaggcucuuuucagagccaccaaaaaaaaaaaaaaaaaaaaaaaaaaaaaaaaaaaaaaaaaaaaaaaaaaaaaaaaaaaaaaaaaaaaaaaaaaaaaaaaaaaaaaaaaaaaaaaaaaaaa

SEQ ID NO: 34197 - RNA, 1809 nt, Artificial Sequence
  mRNA product Design b-4 (hSL-A100) comprising derived and/or modified sequence from LASV(LASV1000-NIG-2009;Clade II)__AIT17782__GPCmut8 (opt1)
aggagagucccgcagucggcguccagcggcucugcuuguucgugugugugucguugcaggccuuauucaagcuuaccaugggccagaucaucaccuucuuccaggaggugccccacgucaucgaggaggugaugaacaucgugcugaucgcccucagccugcuggccauccucaaggggaucuacaacgucgcgaccugcggccuguucgggcugguguccuuccuccugcugugcggccgcagcugcuccacgaccuacaaggggguguacgagcuccagacccuggagcuggacauggccagccucaacaugugcaugccgcuguccugcacgaagaacaacagccaccacuacaucauggucggcaacgagaccggccuggagcucacccugaccaacacguccaucaucaaccacaaguucugcaaccugagcgacgcccacaagaagaaccucuacgaccacgcccugauguccaucaucagcaccuuccaccuguccauccccaacuucaaccaguacgaggccaugagcugcgacuucaacgggggcaagaucuccgugcaguacaaccucagccacaccuacgcgguggacgccgccaaccacugcgggaccaucgccaacggcguccugcagacguucaugcggauggcguggggcggguccuacaucgcccuggacagcggcaagggguccugggacugcaucaugaccagcuaccaguaccucaucauccagaacaccaccugggaggaccacugccaguucucccgccccagccccaucggcuaccuggggcugcucagccagcggacgcgcgacaucuacaucucccggcgccugcugggcaccuucaccuggacccucagcgacuccgagggcaacgagacgcccgggggcuacugccugacccgguggaugcugaucgaggccgagcucaagugcuucgggaacaccgccguggccaagugcaacgagaagcacgacgaggaguucugcgacaugcugcgccuguucgacuucugcaagcaggcgaucaagcggcucaagacccccgcccagaugagcauccagcugaucaacaaggccgugaacgcccugaucaacgaccagcucaucaugaagaaccaccuccgcgacaucaugggcauccccuacugcaacuacuccaaguacugcuaccugaaccacacggucaccgggaagaccagccugccccggugcugccugguguccaacggcagcuaccugaacgagacccacuucuccgacgacaucgagcagcaggccgacaacaugaucacggagcuccugcagaaggaguacaucgaccgccagggcaagaccccgcuggggcucguggaccuguucgucuucagcaccuccuucuaccugaucagcaucuuccugcaccucgugaagaucccgacccaccggcacguggucggcaagcccugccccaagccccaccgccugaaccacauggggaucugcuccugcggccuguacaagcacccgggggugcccgugaaguggaagcggugaggacuaguaauaaggaaacuguaugaaugucugugggcaggaagugaagagauccuucuguaaagguuuuuggaauuaugucugcugaauaauaaacuuuuuugaaauaauaaaucugguagaaaaaugagaucucaaaggcucuuuucagagccaccaaaaaaaaaaaaaaaaaaaaaaaaaaaaaaaaaaaaaaaaaaaaaaaaaaaaaaaaaaaaaaaaaaaaaaaaaaaaaaaaaaaaaaaaaaaaaaaaaaaaa

SEQ ID NO: 34198 - RNA, 1809 nt, Artificial Sequence
  mRNA product Design b-4 (hSL-A100) comprising derived and/or modified sequence from LASV(LASV221-NIG-2010;Clade II)__AIT17624__GPCmut8 (opt1)
aggagagucccgcagucggcguccagcggcucugcuuguucgugugugugucguugcaggccuuauucaagcuuaccaugggccagaucaucaccuucuuccaggaggugccccacgucaucgaggaggugaugaacaucgugcugaucgcccucagccugcuggccauccucaaggggaucuacaacgucgcgaccugcggccuguucgggcugguguccuuccuccugcugugcggccgcagcugcuccacgaccuacaaggggguguacgagcuccagacccuggagcuggacauggccagccucaacaugugcaugccgcuguccugcacgaagaacaacagccaccacuacaucauggucggcaacgagaccggccuggagcucacccugaccaacacguccaucaucaaccacaaguucugcaaccugagcgacgcccacaagaagaaccucuacgaccacgcccugauguccaucaucagcaccuuccaccuguccauccccaacuucaaccaguacgaggccaugagcugcgacuucaacgggggcaagaucuccgugcaguacaaccucagccacaccuacgcgaucgacgccgccaaccacugcgggaccaucgccaacggcgugcugcagacguucaugcggauggcguggggcggguccuacaucgcccuggacagcggcaagggguccugggacugcaucaugaccagcuaccaguaccucaucauccagaacaccaccugggaggaccacugccaguucucccgccccagccccaucggcuaccuggggcugcucagccagcggacgcgcgacaucuacaucucccggcgccugcugggcaccuucaccuggacccucagcgacuccgagggcaacgagacgcccgggggcuacugccugacccgguggaugcugaucgaggccgagcucaagugcuucgggaacaccgccgucgccaagugcaacgagaagcacgacgaggaguucugcgacaugcugcgccuguucgacuucugcaagcaggcgauccggcgccucaagacccccgcccagaugagcauccagcugaucaacaaggccgugaacgcccugaucaacgaccagcucaucaugaagaaccaccuccgggacaucaugggcauccccuacugcaacuacuccaaguacugcuaccugaaccacacggugaccgggaagaccagccugccccgcugcugccuggucuccaacggcagcuaccugaacgagacccacuucuccgacgacaucgagcagcaggccgacaacaugaucacggagaugcuccagaaggaguacauggaccggcagggcaagaccccgcuggggcugguggaccucuucguguucagcaccuccuucuaccugaucagcaucuuccugcaccuggucaagaucccgacccaccgccacgugaucggcaagcccugccccaagccccaccggcucaaccacauggggaucugcuccugcggccuguacaagcacccgggggugcccgucaaguggaagcgcugaggacuaguaauaaggaaacuguaugaaugucugugggcaggaagugaagagauccuucuguaaagguuuuuggaauuaugucugcugaauaauaaacuuuuuugaaauaauaaaucugguagaaaaaugagaucucaaaggcucuuuucagagccaccaaaaaaaaaaaaaaaaaaaaaaaaaaaaaaaaaaaaaaaaaaaaaaaaaaaaaaaaaaaaaaaaaaaaaaaaaaaaaaaaaaaaaaaaaaaaaaaaaaaaa

SEQ ID NO: 34199 - RNA, 1809 nt, Artificial Sequence
  mRNA product Design b-4 (hSL-A100) comprising derived and/or modified sequence from LASV(LASV237-NIG-2010;Clade II)__AIT17638__GPCmut8 (opt1)
aggagagucccgcagucggcguccagcggcucugcuuguucgugugugugucguugcaggccuuauucaagcuuaccaugggccagaucaucaccuucuuccaggaggugccccacgucaucgaggaggugaugaacaucgugcugaucgcccucagccugcuggccauccucaaggggaucuacaacgucgcgaccugcggccuguucgggcugguguccuuccuccugcugugcggccgcagcugcuccacgaccuacaaggggguguacgagcuccagacccuggagcuggacauggccagccucaacaugugcaugccgcuguccugcacgaagaacaacagccaccacuacaucauggucggcaacgagaccggccuggagcucacccugaccaacacguccaucaucaaccacaaguucugcaaccugagcgacgcccacaagaaggaccucuacgaccacgcccugauguccaucaucagcaccuuccaccuguccauccccaacuucaaccaguacgaggccaugagcugcgacuucaacgggggcaagaucuccgugcaguacaaccucagccacaccuacgcgguggacgccgccaaccacugcgggaccaucgccaacggcguccugcagacguucaugcggauggcguggggcggguccuacaucgcccuggacagcggcaagggguccugggacugcaucaugaccagcuaccaguaccucaucauccagaacaccaccugggaggaccacugccaguucucccgccccagccccaucggcuaccuggggcugcucagccagcggacgcgcgacaucuacaucucccggcgccugcugggcaccuucaccuggacccucagcgacuccgagggcaacgagacgcccgggggcuacugccugacccgguggaugcugaucgaggccgagcucaagugcuucgggaacaccgccguggccaagugcaacgagaagcacgacgaggaguucugcgacaugcugcgccuguucgacuucugcaagcaggcgauccggcgccucaagacccccgcccagaugagcauccagcugaucaacaaggccgugaacgcccugaucaacgaccagcucaucaugaagaaccaccuccgggacaucaugggcauccccuacugcaacuacuccaaguacugcuaccugaaccacacggucaccgggaagaccagccugccccgcugcugccugguguccaacggcagcuaccugaacgagacccacuucuccgacgacaucgagcagcaggccgacaacaugaucacggagcuccugcagaaggaguacauggaccggcagggcaagaccccgcuggggcucguggaccuguucgucuucagcaccuccuucuaccugaucagcaucuuccugcaccucaucaagaucccgacccaccgccacaucacgggcaagcccugccccaagccccaccggcugaaccacauggggaucugcuccugcggccuguacaagcacccgggggugcccgugaaguggaagcgcugaggacuaguaauaaggaaacuguaugaaugucugugggcaggaagugaagagauccuucuguaaagguuuuuggaauuaugucugcugaauaauaaacuuuuuugaaauaauaaaucugguagaaaaaugagaucucaaaggcucuuuucagagccaccaaaaaaaaaaaaaaaaaaaaaaaaaaaaaaaaaaaaaaaaaaaaaaaaaaaaaaaaaaaaaaaaaaaaaaaaaaaaaaaaaaaaaaaaaaaaaaaaaaaaa

SEQ ID NO: 34200 - RNA, 1809 nt, Artificial Sequence
  mRNA product Design b-4 (hSL-A100) comprising derived and/or modified sequence from LASV(LASV253-NIG-2011;Clade II)__AIT17670__GPCmut8 (opt1)
aggagagucccgcagucggcguccagcggcucugcuuguucgugugugugucguugcaggccuuauucaagcuuaccaugggccagaucaucaccuucuuccaggaggugccccacgucaucgaggaggugaugaacaucgugcugaucgcccucagccugcuggccauccucaaggggaucuacaacgucgcgaccugcggccuguucgggcugguguccuuccuccugcugugcggccgcagcugcuccacgaccuacaaggggguguacgagcuccagacccuggagcuggacauggccagccucaacaugugcaugccgcuguccugcacgaagaacaacagccaccacuacaucauggucggcaacgagaccggccuggagcucacccugaccaacacguccaucaucaaccacaaguucugcaaccugagcgacgcccacaagaagaaccucuacgaccacgcccugauguccaucaucagcaccuuccaccuguccauccccaacuucaaccaguacgaggccaugagcugcgacuucaacgggggcaagaucuccgugcaguacaaccucagccacaccuacgcgguggacgccgccaaccacugcgggaccaucgccaacggcguccugcagacguucaugcggauggcguggggcggguccuacaucgcccuggacagcggcaagggguccugggacugcaucaugaccagcuaccaguaccucaucauccagaacaccaccugggaggaccacugccaguucucccgccccagccccaucggcuaccuggggcugcucagccagcggacgcgcgacaucuacaucucccggcgccugcugggcaccuucaccuggacccucagcgacuccgagggcaacgagacgcccgggggcuacugccugacccgguggaugcugaucgaggccgagcucaagugcuucgggaacaccgccguggccaagugcaacgagaagcacgacgaggaguucugcgacaugcugcgccuguucgacuucugcaagcaggcgauccggcgccucaaggcccccgcccagaugagcauccagcugaucaacaaggccgugaacgcccugaucaacgaccagcucaucaugaagaaccaccuccgggacaucaugggcaucccguacugcaacuacuccaaguacugcuaccugaaccacaccgucacggggcgcaccagccugccccggugcugccugguguccaacggcagcuaccugaacgagacccacuucuccgacgacaucgagcagcaggcggacaacaugaucaccgagcuccugcagaaggaguacaucgaccgccagggcaagacgccccuggggcucguggaccuguucgucuucagcaccuccuucuaccugaucagcaucuuccugcaccucgugaagaucccgacccaccggcacaucaucggcaagcccugccccaagccccaccgccugaaccacauggggaucugcuccugcggccuguacaagcacccgggggugcccgucaaguggaagcggugaggacuaguaauaaggaaacuguaugaaugucugugggcaggaagugaagagauccuucuguaaagguuuuuggaauuaugucugcugaauaauaaacuuuuuugaaauaauaaaucugguagaaaaaugagaucucaaaggcucuuuucagagccaccaaaaaaaaaaaaaaaaaaaaaaaaaaaaaaaaaaaaaaaaaaaaaaaaaaaaaaaaaaaaaaaaaaaaaaaaaaaaaaaaaaaaaaaaaaaaaaaaaaaaa

SEQ ID NO: 34201 - RNA, 1809 nt, Artificial Sequence
  mRNA product Design b-4 (hSL-A100) comprising derived and/or modified sequence from LASV(LASV254-NIG-2011;Clade II)__AIT17674__GPCmut8 (opt1)
aggagagucccgcagucggcguccagcggcucugcuuguucgugugugugucguugcaggccuuauucaagcuuaccaugggccagaucaucaccuucuuccaggaggugccccacgucaucgaggaggugaugaacaucgugcugaucgcccucagccugcuggccauccucaaggggaucuacaacgucgcgaccugcggccuguucgggcugguguccuuccuccugcugugcggccgcagcugcuccacgaccuacaaggggguguacgagcuccagacccuggagcuggacaugaccaaccucaacaugugcaugccgcugagcugcaccaagaacaacucccaccacuacaucauggucggcaacgagaccggccuggagcucacccugacgaacaccagcaucaucaaccacaaguucugcaaccuguccgacgcccacaagaagaaccucuacaaccacgcccugaugagcaucaucuccaccuuccaccugagcauccccaacuucaaccaguacgaggccauguccugcgacuucaacgggggcaagaucagcgugcaguacaaccucucccacagcuacgccguggacgcggccaaccacugcgggaccaucgccaacggcguccugcagacguucaugcggauggccuggggcggguccuacaucgcgcuggacagcggcaaggggaacugggacugcaucaugaccuccuaccaguaccucaucauccagaacaccaccugggaggaccacugccaguucagccgccccucccccaucggcuaccuggggcugcucagccagcggacgcgcgacaucuacaucagccggcgccugcugggcaccuucaccuggacccucuccgacagcgagggcaacgagacgcccgggggcuacugccugacccgguggaugcugaucgaggccgagcucaagugcuucgggaacaccgccguggccaagugcaacgagaagcacgacgaggaguucugcgacaugcugcgccuguucgacuucugcaagcaggccauccggcgccucaagacccccgcgcaggccaacauccagcugaucaacaaggccgugaacgcccugaucaacgaccagcucaucaugaagaaccaccuccgggacaucaugggcauccccuacugcaacuacuccaaguacugcuaccugaaccacacggucaccgggaagaccagccugccccgcugcugccugguguccaacggcagcuaccugaacgagacccacuucuccgacgacaucgagcagcaggccgacaacaugaucacggagcuccugcagaaggaguacauggaccggcagggcaagaccccgcuggggcucguggaccuguucgucuucagcaccuccuucuaccugaucagcaucuuccugcaccucgugaagaucccgacccaccgccacgugaucggcaagcccugccccaagccccaccggcugaaccacauggggaucugcuccugcggccuguacaagcacccggggguccccgugaaguggaagcgcugaggacuaguaauaaggaaacuguaugaaugucugugggcaggaagugaagagauccuucuguaaagguuuuuggaauuaugucugcugaauaauaaacuuuuuugaaauaauaaaucugguagaaaaaugagaucucaaaggcucuuuucagagccaccaaaaaaaaaaaaaaaaaaaaaaaaaaaaaaaaaaaaaaaaaaaaaaaaaaaaaaaaaaaaaaaaaaaaaaaaaaaaaaaaaaaaaaaaaaaaaaaaaaaaa

SEQ ID NO: 34202 - RNA, 1809 nt, Artificial Sequence
  mRNA product Design b-4 (hSL-A100) comprising derived and/or modified sequence from LASV(Nig08-A19;Clade III)__ADU56618__GPCmut8 (opt1)
aggagagucccgcagucggcguccagcggcucugcuuguucgugugugugucguugcaggccuuauucaagcuuaccaugggccagaucgugaccuucuuccaggaggucccccacgugaucgaggaggugaugaacaucguccugaucgcccucagcauccuggccauccugaaggggcucuacaacaucgcgaccugcggccugaucgggcuggugacguuccuccugcuguccggccgcagcugcuccaugaccuacaaggggguguacgagcuccagacccuggagcugaacaugaacacccucaacaugugcaugccgcugagcugcaccaagaacaacucccaccacuacaucauggucggcaacgagaccggccuggagcucacccugacgaacaccagccugcuccaccacaaguucugcaaccuguccgacgcccacaagaagaaccuguacgaccacacccucaugagcaucaucuccaccuuccaccugagcauccccaacuucaaccaguacgaggccauguccugcgacuucaacgggggcaagaucacggugcaguacaaccugagccacuccuacgccaucgacgccgcgaaccacugcgggaccguggccaacggcguccuccagaccuucaugcggauggccuggggcgggagcuacaucgcccuggacuccggccgcgggaagugggacugcaucaugaccagcuaccaguaccugaucauccagaacacgaccugggaggaccacugccaguucucccggcccagccccaucggcuaccucgggcugcugucccagcgcacccgggacaucuacaucagccgccggcuccugggcaccuucacguggacccugagcgacuccgagggcaacgagacccccgggggcuacugccucacccgcuggaugcugaucgaggcggagcugaagugcuucgggaacacggccguggccaagugcaacgagaagcacgacgaggaguucugcgacaugcuccggcuguucgacuucugcaagcaggccauccgccggcugaaggcccccgcgcagaugagcauccagcucaucaacaaggccgugaacgcccugaucaacgaccagcugaucaugaagaaccaccuccgcgacaucaugggcauccccuacugcaacuacuccaaguacugcuaccugaaccacaccagcaccgggcggaccucccugccccgcugcugccucgucagcaacggcuccuaccugaacgagacgcacuucagcgacgacaucgagcagcaggccgacaacaugaucaccgagaugcugcagaaggaguaccucgaccggcagggcaagaccccgcuggggcugguggaccuguucguguucuccaccagcuucuaccucaucuccaucuuccugcaccuggucaagaucccgacgcaccgccacaucgugggcaagcccugccccaagccccaccggcucaaccacauggggaucugcagcugcggccuguacaagcagccgggggugcccguccgcuggaagcggugaggacuaguaauaaggaaacuguaugaaugucugugggcaggaagugaagagauccuucuguaaagguuuuuggaauuaugucugcugaauaauaaacuuuuuugaaauaauaaaucugguagaaaaaugagaucucaaaggcucuuuucagagccaccaaaaaaaaaaaaaaaaaaaaaaaaaaaaaaaaaaaaaaaaaaaaaaaaaaaaaaaaaaaaaaaaaaaaaaaaaaaaaaaaaaaaaaaaaaaaaaaaaaaaa

SEQ ID NO: 34203 - RNA, 1812 nt, Artificial Sequence
  mRNA product Design b-4 (hSL-A100) comprising derived and/or modified sequence from LASV(G1180-SLE-2010;Clade IV)__AIT17168__GPCmut8 (opt1)
aggagagucccgcagucggcguccagcggcucugcuuguucgugugugugucguugcaggccuuauucaagcuuaccaugggccagaucgugaccuucuuccaggaggucccccacgugaucgaggaggugaugaacaucguccugaucgcccucagcauccuggccgugcugaaggggcucuacaacuucgcgaccugcggccugguggggcugcucaccuuccugcugcucugcggccgcuccugcaccgccagccgguacaagggggucuacgagcugcagacccuggagcucaacauggagacccugaacaugugcaugccgcuguccugcaccaagaacaacagccaccacuacaucauggugggcaacgagaccggccucgagcugacccugacgaacaccuccaucaucaaccacaaguucugcaaccucagcgacgcccacaagaagaaccuguacgaccacgcccugauguccaucaucagcaccuuccaccucuccauccccaacuucaaccaguacgaggccaugagcugcgacuucaacgggggcaagaucuccgugcaguacaaccugagccacuccuacgcgggggacgccgccaaccacugcggcaccgucgccaacggggugcugcagacguucaugcgcauggcguggggcggcagcuacaucgcccucgacuccgggcacggcagcugggacugcaucaugaccuccuaccaguaccugaucauccagaacaccaccugggaggaccacugccaguucagccggcccucccccaucggguaccugggccuccugagccagcgcacgcgggacaucuacaucagccgccggcugcucggcaccuucaccuggacccuguccgacagcgaggggaaggacacgccgggcggguacugccugacccgcuggaugcucaucgaggccgagcugaagugcuucggcaacaccgccguggccaagugcaacgagaagcacgacgaggaguucugcgacaugcugcggcuguucgacuucugcaagcaggcgauccagcgccugaaggcccccgcccagauguccauccagcugaucaacaaggccgucaacgcccucaucaacgaccagcugaucaugaagaaccaccuccgggacaucauggggauccccuacugcaacuacagcaaguacugcuaccucaaccacaccacgaccggcaagaccucccugcccaagugcugccuggugagcaacggcuccuaccucaacgagacccacuucagcgacgacaucgagcagcaggcggacaacaugaucacggagaugcugcagaaggaguacauggagcgccaggggaagacgccccugggccucguggaccuguucgucuucuccaccagcuucuaccugaucuccaucuuccugcaccucgugaagaucccgacccaccggcacaucgugggcaagagcugccccaagccccaccgccugaaccacauggggaucugcuccugcgggcuguacaagcagcccggcgucccggugaaguggaagcggugaggacuaguaauaaggaaacuguaugaaugucugugggcaggaagugaagagauccuucuguaaagguuuuuggaauuaugucugcugaauaauaaacuuuuuugaaauaauaaaucugguagaaaaaugagaucucaaaggcucuuuucagagccaccaaaaaaaaaaaaaaaaaaaaaaaaaaaaaaaaaaaaaaaaaaaaaaaaaaaaaaaaaaaaaaaaaaaaaaaaaaaaaaaaaaaaaaaaaaaaaaaaaaaaa

SEQ ID NO: 34204 - RNA, 1812 nt, Artificial Sequence
  mRNA product Design b-4 (hSL-A100) comprising derived and/or modified sequence from LASV(G1442-SLE-2011;Clade IV)__AIT17180__GPCmut8 (opt1)
aggagagucccgcagucggcguccagcggcucugcuuguucgugugugugucguugcaggccuuauucaagcuuaccaugggccagaucgugaccuucuuccaggaggucccccacgugaucgaggaggugaugaacaucguccugaucgcccucagcauccuggccgugcugaaggggcucuacaacguggcgaccugcggccugaucgggcuggucacguuccuccugcugugcggccgcuccugcaccaccacccucuacaaggggguguacgagcugcagacgcuggagcucaacauggagacccugaacaugugcaugccgcugagcugcaccaagaacaacucccaccacuacauccgggugggcaacgagacgggccucgagcugacccugaccaacaccagcaucaucaaccacaaguucugcaaccucuccgacgcccacaagaagaaccuguacgaccacgcccugaugagcaucaucuccacguuccaccucagcauccccaacuucaaccaguacgaggccauguccugcgacuucaacgggggcaagaucagcguccaguacaaccugucccacagcuacgccggggacgcggccaaccacugcggcaccguggccaacggggugcugcagaccuucaugcgcauggccuggggcggcuccuacaucgcgcucgacagcgggcggggcaacugggacugcaucaugaccuccuaccaguaccugaucauccagaacacgaccugggacgaccacugccaguucagccgccccucccccaucggguaccugggccuccugagccagcggacccgcgacgucuacaucucccggcgccugcucggcaccuucacguggacccugagcgacagcgaggggaaggacaccccgggcggguacugccugacccgguggaugcucaucgaggccgagcugaagugcuucggcaacacggccguggccaagugcaacgagaagcacgacgaggaguucugcgacaugcugcgccucuucgacuucugcaagcaggccauccagcggcugaaggcgcccgcccagauguccauccagcugaucaacaaggccgugaacgcccucaucaacgaccagcugaucaugaagaaccaccuccgcgacaucauggggauccccuacugcaacuacagcaaguacugcuaccugaacaacaccgccaccggcaagaccucccugcccaagugcugccugaucagcaacggcuccuaccucaacgagacgcacuucagcgacgacaucgagcaggaggcggacaacaugaucaccgagaugcugcagaaggaguacauggagcggcaggggaagacgccccugggccucgucgaccuguucguguucuccaccagcuucuaccugaucuccaucuuccugcaccucgugaagaucccgacccaccgccacaucgucggcaagagcugccccaagccccaccggcugaaccacauggggaucugcuccugcgggcuguacaagcagcccggcgugccggugcgcuggaagcggugaggacuaguaauaaggaaacuguaugaaugucugugggcaggaagugaagagauccuucuguaaagguuuuuggaauuaugucugcugaauaauaaacuuuuuugaaauaauaaaucugguagaaaaaugagaucucaaaggcucuuuucagagccaccaaaaaaaaaaaaaaaaaaaaaaaaaaaaaaaaaaaaaaaaaaaaaaaaaaaaaaaaaaaaaaaaaaaaaaaaaaaaaaaaaaaaaaaaaaaaaaaaaaaaa

SEQ ID NO: 34205 - RNA, 1812 nt, Artificial Sequence
  mRNA product Design b-4 (hSL-A100) comprising derived and/or modified sequence from LASV(G3010-SLE-2013;Clade IV)__AIT17344__GPCmut8 (opt1)
aggagagucccgcagucggcguccagcggcucugcuuguucgugugugugucguugcaggccuuauucaagcuuaccaugggccagaucgugaccuucuuccaggaggucccccacgugaucgaggaggugaugaacaucguccugaucgcccucagcauccuggccgugcugaaggggcucuacaacuucgcgaccugcggccugguggggcuggucacguuccuccugcugugcggccgcuccugcaccaccagccucuacaaggggguguacgagcugcagacccuggagcucaacauggagacgcugaacaugugcaugccgcuguccugcaccaagaacaacagccaccacuacaucauggugggcaacgagaccggccucgagcugacgcugaccaacaccuccaucaucaaccacaaguucugcaaccucagcgacgcccacaagaagaaccuguacaaccacgcccugauguccaucaucagcaccuuccaccucuccauccccaacuucaaccaguacgaggccaugagcugcgacuucaacgggggcaagaucuccguccaguacaaccugagccacuccuacgccggggacgcggccagccacugcggcacgguggccaacggggugcugcagaccuucaugcggauggccuggggcggcuccuacaucgcgcucgacagcggguacggcaagugggacugcaucaugaccuccuaccaguaccugaucauccagaacaccacgugggaggaccacugccaguucagccgccccucccccaucggguaccugggccuccugagccagcggacccgcgacaucuacaucagccggcgccugcucggcaccuucaccuggacgcuguccgacagcgaggggaaggacaccccgggcggguacugccugacccgguggaugcucaucgaggccgagcugaagugcuucggcaacaccgccgucgccaagugcaacgagaagcacgacgaggaguucugcgacaugcugcgccucuucgacuucugcaagcaggccauccagcggcugaagacgcccgcgcagauguccauccagcugaucaacaaggccgugaacgcccucaucaacgaccagcugaucaugaagaaccaccuccgcgacaucauggggauccccuacugcaacuacagcaaguacugcuaccugaaccacaccaccaccggcaagacgucccugcccaagugcugccuggugagcaacggcuccuaccucaacgagacccacuucagcgacgacaucgagcagcaggccgacaacaugaucaccgagaugcugcagaaggaguacauggagcggcaggggaagacgccccugggccucgucgaccuguucguguucuccaccagcuucuaccugaucuccaucuuccugcaccucgugaagaucccgacccaccgccacaucgucggcaagagcugccccaagccccaccggcugaaccacauggggaucugcuccugcgggcuguacaagcagcccggcgugccggugcgcuggaagcggugaggacuaguaauaaggaaacuguaugaaugucugugggcaggaagugaagagauccuucuguaaagguuuuuggaauuaugucugcugaauaauaaacuuuuuugaaauaauaaaucugguagaaaaaugagaucucaaaggcucuuuucagagccaccaaaaaaaaaaaaaaaaaaaaaaaaaaaaaaaaaaaaaaaaaaaaaaaaaaaaaaaaaaaaaaaaaaaaaaaaaaaaaaaaaaaaaaaaaaaaaaaaaaaaa

SEQ ID NO: 34206 - RNA, 1812 nt, Artificial Sequence
  mRNA product Design b-4 (hSL-A100) comprising derived and/or modified sequence from LASV(G502-SLE-2009;Clade IV)__AIT17126__GPCmut8 (opt1)
aggagagucccgcagucggcguccagcggcucugcuuguucgugugugugucguugcaggccuuauucaagcuuaccaugggccagaucgugaccuucuuccaggaggucccccacgugaucgaggaggugaugaacaucguccugaucgcccucagcauccuggccgugcugaaggggcucuacaacuucgcgaccugcggccugguggggcugcucacguuccugcugcucugcggccgcuccugcaccaccgggcuguacaagggcgucuacgagcugcagacccucgagcugaacauggagacgcugaacaugugcaugccgcucagcugcaccaagaacaacucccaccacuacaucauggugggcaacgagaccgggcuggagcugacgcucaccaacaccagcaucaucaaccacaaguucugcaaccuguccgacgcccacaagaagaaccuguacgaccacgcccucaugagcaucaucuccaccuuccaccugagcauccccaacuucaaccaguacgaggccauguccugcgacuucaacggcgggaagaucagcgugcaguacaaccugucccacagcuacgccggcgacgcggccgaccacugcgggacggucgccaacggcgugcuccagaccuucaugcggauggccuggggcggguccuacaucgcgcuggacagcggccgcgggcggugggacugcaucaugaccuccuaccaguaccugaucauccagaacaccacgugggaggaccacugccaguucagccgccccucccccaucggcuaccucggccugcugagccagcggacccgcgacaucuacaucucccggcgccuccuggggaccuucaccuggacgcugagcgacagcgagggcaaggacacccccgggggcuacugccucacccgguggaugcugaucgaggccgagcugaagugcuucgggaacaccgccguggccaagugcaacgagaagcacgacgaggaguucugcgacaugcuccgccuguucgacuucugcaagcaggccauccagcggcugaaggcgcccgcccagauguccauccagcucaucaacaaggccgucaacgcccugaucaacgaccagcuggugaugaagaaccaccuccgcgacaucaugggcauccccuacugcaacuacagccgguacugcuaccugaaccacacgaccaccggccgcaccucccugcccaagugcugccucgugagcaacggguccuaccugaacgagacgcacuucagcgacgacaucgagcagcaggccgacaacaugaucaccgagaugcugcagaaggaguacauggagcggcagggcaagaccccgcucgggcuggucgaccuguucguguucuccaccagcuucuaccugaucuccaucuuccuccaccuggugaagaucccgacgcaccgccacaucgucggcaagagcugccccaagccccaccggcugaaccacauggggaucugcuccugcggccucuacaagcagcccggcgugccggugaaguggaagcgcugaggacuaguaauaaggaaacuguaugaaugucugugggcaggaagugaagagauccuucuguaaagguuuuuggaauuaugucugcugaauaauaaacuuuuuugaaauaauaaaucugguagaaaaaugagaucucaaaggcucuuuucagagccaccaaaaaaaaaaaaaaaaaaaaaaaaaaaaaaaaaaaaaaaaaaaaaaaaaaaaaaaaaaaaaaaaaaaaaaaaaaaaaaaaaaaaaaaaaaaaaaaaaaaaa

SEQ ID NO: 34207 - RNA, 1812 nt, Artificial Sequence
  mRNA product Design b-4 (hSL-A100) comprising derived and/or modified sequence from LASV(G733-SLE-2010;Clade IV)__AIT17154__GPCmut8 (opt1)
aggagagucccgcagucggcguccagcggcucugcuuguucgugugugugucguugcaggccuuauucaagcuuaccaugggccagaucgugaccuucuuccaggaggucccccacgugaucgaggaggugaugaacaucguccugaucgcccucagcauccuggccgugcugaaggggcucuacaacuucgcgaccugcggcaucguggggcuggucuccuuccugcuccugugcggccgcagcugcacgaccucccuguacaaggggguguacgagcuccagacccuggagcugaacauggagacccucaacaugugcaugccgcugagcugcaccaagaacaacucccaccacuacaucauggugggcaacgagaccggccuggagcucacccugacgaacaccagcaucaucaaccacaaguucugcaaccuguccgacgcccacaagaagaaccucuacgaccacgcccugaugagcaucaucuccaccuuccaccugagcauccccaacuucaaccaguacgaggccauguccugcgacuucaacgggggcaagaucagcguccaguacaaccucucccacagcuacgccggggacgcggccaaccacugcggcaccaucgccaacggggugcugcagacguucaugcggauggccuggggcggcuccuacaucgcgcuggacagcgggcgcgaccggugggacugcaucaugaccuccuaccaguaccucaucauccagaacaccaccugggaggaccacugccaguucagccgccccucccccaucggcuaccuggggcugcucagccagcggacgcgcgacaucuacaucagccggcgccugcugggcaccuucaccuggacccucuccgacagcgagggcaaggacacgcccgggggcuacugccugacccgguggaugcugaucgaggccgagcucaagugcuucgggaacaccgccguggccaagugcaacgagaagcacgacgaggaguucugcgacaugcugcgccuguucgacuucugcaagcaggccauccagcggcucaaggcgcccgcccagauguccauccagcugaucaacaaggccgucaacgcccugaucaacgaccagcucaucaugaagaaccaccuccgcgacaucaugggcauccccuacugcaacuacagcaaguacugcuaccugaaccacaccacgaccgggaagaccucccugcccaagugcugccuggugagcaacggcuccuaccugaacgagacccacuucagcgacgacaucgagcagcaggccgacaacaugaucacggagaugcuccagaaggaguacauggagcggcagggcaagaccccgcuggggcugguggaccucuucgucuucuccaccagcuucuaccugaucuccaucuuccugcaccuggugaagaucccgacccaccgccacguggucggcaagagcugccccaagccccaccggcucaaccacauggggaucugcuccugcggccuguacgggcagcccggcgugccggugaaguggaagcgcugaggacuaguaauaaggaaacuguaugaaugucugugggcaggaagugaagagauccuucuguaaagguuuuuggaauuaugucugcugaauaauaaacuuuuuugaaauaauaaaucugguagaaaaaugagaucucaaaggcucuuuucagagccaccaaaaaaaaaaaaaaaaaaaaaaaaaaaaaaaaaaaaaaaaaaaaaaaaaaaaaaaaaaaaaaaaaaaaaaaaaaaaaaaaaaaaaaaaaaaaaaaaaaaaa

SEQ ID NO: 34208 - RNA, 1812 nt, Artificial Sequence
  mRNA product Design b-4 (hSL-A100) comprising derived and/or modified sequence from MOPV/LASV reassortant(IGS-1;Clade IV)__AFY05576__GPCmut8 (opt1)
aggagagucccgcagucggcguccagcggcucugcuuguucgugugugugucguugcaggccuuauucaagcuuaccaugggccagaucgugaccuucuuccaggaggucccccacgugaucgaggaggugaugaacaucguccugaucgcccucagcgugcuggccgugcugaaggggcucuacaacuucgcgaccugcggccuggucgggcuggugacguuccuccugcugugcggccgcuccugcaccaccagccucuacaaggggguguacgagcugcagacccuggagcucaacauggagacgcugaacaugugcaugccgcuguccugcaccaagaacaacagccaccacuacaucauggucggcaacgagaccggccucgagcugacgcugaccaacaccuccaucaucaaccacaaguucugcaaccucagcgacgcccacaagaagaaccuguacgaccacgcccugauguccaucaucagcaccuuccaccucuccauccccaacuucaaccaguacgaggccaugagcugcgacuucaacgggggcaagaucuccgugcaguacaaccugagccacuccuacgccggggacgcggccaaccacugcggcacgguggccaacgggguccugcagaccuucaugcggauggccuggggcggcagcuacaucgcgcucgacuccgggcgcggcaacugggacugcaucaugaccagcuaccaguaccugaucauccagaacaccacgugggaggaccacugccaguucucccggcccagccccaucggguaccugggccuccugucccagcgcacccgggacaucuacaucagccgccggcugcucggcaccuucaccuggacgcugagcgacuccgagggggaggacaccccgggcggguacugccugacccgcuggaugcucaucgaggccgagcugaagugcuucggcaacaccgccguggccaagugcaacgagaagcacgacgaggaguucugcgacaugcugcggcuguucgacuucugcaagcaggccauccagcgccugaaggcgcccgcccagaugagcauccagcugaucaacaaggccgugaacgcccucaucaacgaccagcugaucaugaagaaccaccuccgggacaucauggggauccccuacugcaacuacuccaaguacugcuaccucaaccacacgaccaccggccgcaccagccugcccaagugcugccuggucuccaacggcagcuaccucaacgagacgcacuucuccgacgacaucgagcagcaggccgacaacaugaucaccgagaugcugcagaaggaguacauggagcggcaggggaagacgccccugggccucguggaccuguucguguucagcaccuccuucuaccugaucagcaucuuccugcaccucgucaagaucccgacccaccgccacaucguggggaaguccugccccaagccccaccggcugaaccacaugggcaucugcagcugcgggcuguacaagcagcccggcgugccggucaaguggaagcgcugaggacuaguaauaaggaaacuguaugaaugucugugggcaggaagugaagagauccuucuguaaagguuuuuggaauuaugucugcugaauaauaaacuuuuuugaaauaauaaaucugguagaaaaaugagaucucaaaggcucuuuucagagccaccaaaaaaaaaaaaaaaaaaaaaaaaaaaaaaaaaaaaaaaaaaaaaaaaaaaaaaaaaaaaaaaaaaaaaaaaaaaaaaaaaaaaaaaaaaaaaaaaaaaaa

SEQ ID NO: 34209 - RNA, 1812 nt, Artificial Sequence
  mRNA product Design b-4 (hSL-A100) comprising derived and/or modified sequence from LASV(LM765-SLE-2012;Clade IV)__AIT17814__GPCmut8 (opt1)
aggagagucccgcagucggcguccagcggcucugcuuguucgugugugugucguugcaggccuuauucaagcuuaccaugggccagaucgugaccuucuuccaggaggucccccacgugaucgaggaggugaugaacaucguccugaucgcccucagcauccuggccgugcugaaggggcucuacaacuucgcgaccugcggccugguggggcuggucacguuccuccugcugugcggccgcuccugcaccaccagccucuacaaggggguguacgagcugcagacccuggagcucaacauggagacgcugaacaugugcaugccgcuguccugcaccaagaacaacagccaccacuacaucauggugggcaacgagaccggccucgagcugacgcugaccaacaccuccaucaucgaccacaaguucugcaaccucagcgacgcccaccggaagaaccuguacgaccacgcccugauguccaucaucagcaccuuccaccucuccauccccaacuucaaccaguacgaggccaugagcugcgacuucaacgggggcaagaucuccguccaguacaaccugagccacuccuacgccaaggacgcggccgaccacugcgggacgguggccaacggcgugcugcagaccuucaugcgcauggccuggggcgggagcuacaucgcgcucgacuccggccgggggcgcugggacugcaucaugaccagcuaccaguaccugaucauccagaacaccacgugggaggaccacugccaguucucccggcccagccccaucggcuaccuggggcuccugucccagcgcacccgggacaucuacaucagccgccggcugcucggcaccuucaccuggacgcugagcgacuccgagggcaaggacacccccgggggcuacugccugacccgcuggaugcucaucgaggccgagcugaagugcuucgggaacaccgccgucgccaagugcaacgagaagcacgacgaggaguucugcgacaugcugcggcuguucgacuucugcaagcaggccauccagcgccugaaggcgcccgcccagaugagcauccagcugaucaacaaggccgugaacgcccucaucaacgaccagcugaucaugaagaaccaccuccgggacaucaugggcauccccuacugcaacuacuccaaguacugcuaccucaaccacacgaccaccgggaagaccagccugcccaagugcugccugguguccaacggcagcuaccucaacgagacgcacuucuccgacgacaucgagcagcaggccgacaacaugaucaccgagaugcugcagaaggaguacauggagcgccagggcaagaccccgcuggggcucgucgaccuguucguguucagcaccuccuucuaccugaucagcaucuuccugcaccucgugaagaucccgacgcaccggcacaucgucggcaagcccugccccaagccccaccgccugaaccacauggggaucugcuccugcggccuguacaagcagccgggggugcccgugaaguggaagcggugaggacuaguaauaaggaaacuguaugaaugucugugggcaggaagugaagagauccuucuguaaagguuuuuggaauuaugucugcugaauaauaaacuuuuuugaaauaauaaaucugguagaaaaaugagaucucaaaggcucuuuucagagccaccaaaaaaaaaaaaaaaaaaaaaaaaaaaaaaaaaaaaaaaaaaaaaaaaaaaaaaaaaaaaaaaaaaaaaaaaaaaaaaaaaaaaaaaaaaaaaaaaaaaaa

SEQ ID NO: 34210 - RNA, 1812 nt, Artificial Sequence
  mRNA product Design b-4 (hSL-A100) comprising derived and/or modified sequence from LASV(LM776-SLE-2012;Clade IV)__AIT17824__GPCmut8 (opt1)
aggagagucccgcagucggcguccagcggcucugcuuguucgugugugugucguugcaggccuuauucaagcuuaccaugggccagaucgugaccuucuuccaggaggucccccacgugaucgaggaggugaugaacaucguccugaucgcccucagcauccuggccgugcugaaggggcucuacaacuucgcgaccugcggccugguggggcuggucacguuccuccugcugugcggccgcuccugcaccaccagcguguacaaggggguguacgagcuccagacccuggagcugaacauggagacgcucaacaugugcaugccgcuguccugcaccaagaacaacagccaccacuacaucauggucggcaacgagaccggccuggagcucacgcugaccaacaccuccaucaucaaccacaaguucugcaaccugagcgacgcccacaagaagaaccucuacgaccacgcccugauguccaucaucagcaccuuccaccuguccauccccaacuucaaccaguacgaggccaugagcugcgacuucaacgggggcaagaucuccgugcaguacaaccucagccacuccuacgccggggacgcggccaaccacugcggcacgguggccaacgggguccugcagaccuucaugcggauggccuggggcggcagcuacaucgcgcuggacuccgggcacggcaagugggacugcaucaugaccagcuaccaguaccucaucauccagaacaccacgugggaggaccacugccaguucucccgccccagccccaucggguaccugggccugcucucccagcggacccgcgacaucuacaucagccggcgccugcugggcaccuucaccuggacgcucagcgacuccgaggggaaggacaccccgggcggguacugccugacccgguggaugcugaucgaggccgagcucaagugcuucggcaacaccgccguggccaagugcaacgagaagcacgacgaggaguucugcgacaugcugcgccuguucgacuucugcaagcaggccauccagcggcucaaggcgcccgcccagaugagcauccagcugaucaacaaggccgugaacgcccugaucaacgaccagcucaucaugaagaaccaccuccgcgacaucauggggauccccuacugcaacuacuccaaguacugcuaccugaaccacacgaccaccggcaagaccagccugcccaagugcugccuggucuccaacggcagcuaccugaacgagacgcacuucuccgacgacaucgagcagcaggccgacaacaugaucaccgagaugcuccagaaggaguacauggagcggcaggggaagacgccccugggccugguggaccucuucguguucagcaccuccuucuaccugaucagcaucuuccugcaccuggucaagaucccgacccaccgccacaucguggggaaguccugccccaagccccaccggcucaaccacaugggcaucugcagcugcgggcuguacaagcagcccggcgugccgguccgcuggaagcggugaggacuaguaauaaggaaacuguaugaaugucugugggcaggaagugaagagauccuucuguaaagguuuuuggaauuaugucugcugaauaauaaacuuuuuugaaauaauaaaucugguagaaaaaugagaucucaaaggcucuuuucagagccaccaaaaaaaaaaaaaaaaaaaaaaaaaaaaaaaaaaaaaaaaaaaaaaaaaaaaaaaaaaaaaaaaaaaaaaaaaaaaaaaaaaaaaaaaaaaaaaaaaaaaa

SEQ ID NO: 34211 - RNA, 1812 nt, Artificial Sequence
  mRNA product Design b-4 (hSL-A100) comprising derived and/or modified sequence from LASV(Mad39;Clade IV)__ANH09722__GPCmut8 (opt1)
aggagagucccgcagucggcguccagcggcucugcuuguucgugugugugucguugcaggccuuauucaagcuuaccaugggccagaucgugaccuucuuccaggaggucccccacgugaucgaggaggugaugaacaucguccugaucgcccucagcauccuggccgugcugaaggggcucuacaacguggcgaccugcggccugaucgggcuggucacguuccuccugcugugcggccgcuccugcaccaccacccucuacaaggggguguacgagcugcaggcccuggagcucaacauggagacgcugaacaugugcaugccgcugagcugcaccaagaacaacucccaccacuacauccgggugggcaacgagaccggccucgagcugacgcugaccaacaccagccucaucaaccacaaguucugcaaccuguccgacgcccacaagaagaaccuguacgaccacgcccucaugagcaucaucuccaccuuccaccugagcauccccaacuucaaccaguacgaggccauguccugcgacuucaacgacgggaagaucagcguccaguacaaccugucccacacguacgcgggcgacaccgccaaccacugcgggaccguggccaacggcgugcuccagaccuucaugcgcauggccuggggcgggagcuacaucgcgcuggacuccggccgcgggggcugggacugcaucaugacgagcuaccaguaccugaucauccagaacaccaccugggaggaccacugccaguucucccggcccagccccaucggguaccucggccugcugucccagcggacccgcgacaucuacaucagccggcgccuccugggcacguucaccuggacccuguccgacagcgaggggaaggacaccccgggcggguacugccucacgcgguggaugcugaucgaggccgagcugaagugcuucggcaacaccgccgucgccaagugcaacgagaagcacgacgaggaguucugcgacaugcuccgccuguucgacuucugcaagcaggccauccagcggcugaaggcgcccgcccagaugagcauccagcucaucaacaaggccgugaacgcccugaucaacgaccagcugaucaugaagaaccaccuccgcgacaucauggggauccccuacugcaacuacuccaaguacugcuaccugaaccacaccgugaccggcaagacgagccugcccaagugcugccucgucuccaacggcagcuaccugaacgagacccacuucuccgacgacaucgagcagcaggccgacaacaugaucaccgagaugcugcagaaggaguacauggagcggcaggggaagacgccccucggccugguggaccuguucguguucagcaccuccuucuaccugaucagcaucuuccuccaccuggucaagaucccgacccaccgccacgugguggggaagcccugccccaagccccaccggcugaaccacaugggcaucugcuccugcggguucuacaagcagccgggcguccccgugcgcuggaagcggugaggacuaguaauaaggaaacuguaugaaugucugugggcaggaagugaagagauccuucuguaaagguuuuuggaauuaugucugcugaauaauaaacuuuuuugaaauaauaaaucugguagaaaaaugagaucucaaaggcucuuuucagagccaccaaaaaaaaaaaaaaaaaaaaaaaaaaaaaaaaaaaaaaaaaaaaaaaaaaaaaaaaaaaaaaaaaaaaaaaaaaaaaaaaaaaaaaaaaaaaaaaaaaaaa

SEQ ID NO: 34212 - RNA, 1812 nt, Artificial Sequence
  mRNA product Design b-4 (hSL-A100) comprising derived and/or modified sequence from LASV(Z0947-SLE-2011;Clade IV)__AIT17840__GPCmut8 (opt1)
aggagagucccgcagucggcguccagcggcucugcuuguucgugugugugucguugcaggccuuauucaagcuuaccaugggccagaucgugaccuucuuccaggaggucccccacgugaucgaggaggugaugaacaucguccugaucgcccucagcauccuggccgugcugaaggggcucuacaacuucgcgaccugcggccugguggggcuggucacguuccuccugcugugcggccgcuccugcaccaucagccucuacaaggggguguacgagcugcagacccuggagcucaacauggagacccugaacaugugcaugccgcuguccugcaccaagaacaacagccaccacuacaucauggugggcaacgagaccggccucgagcugacccugacgaacaccuccaucaucaaccacaaguucugcaaccucagcgacgcccacaagaagaaccuguacgaccacgcccugauguccaucaucagcaccuuccaccucuccauccccaacuucaaccaguacgaggccaugagcugcgacuucaacgggggcaagaucuccguccaguacaaccugagccacuccuacgccggggacgcggccaaccacugcggcaccguggccaacggggugcugcagacguucaugcggauggccuggggcggcagcuacaucgcgcucgacuccgggcgcgaccggugggacugcaucaugaccagcuaccaguaccugaucauccagaacaccaccugggaggaccacugccaguucucccgccccagccccaucggcuaccuggggcuccugucccagcggacgcgcgacaucuacaucagccggcgccugcucggcaccuucaccuggacccugagcgacuccgagggcaaggacacgcccgggggcuacugccugacccgguggaugcucaucgaggccgagcugaagugcuucgggaacaccgccgucgccaagugcaacgagaagcacgacgaggaguucugcgacaugcugcgccucuucgacuucugcaagcaggccauccagcggcugaaggcgcccgcccagaugagcauccagcugaucaacaaggccgugaacgcccucaucaacgaccagcugaucaugaagaaccaccuccgcgacaucaugggcauccccuacugcaacuacuccaaguacugcuaccugaaccacaccacgaccgggaagaccagccugcccaagugcugccugguguccaacggcagcuaccucaacgagacccacuucuccgacgacaucgagcagcaggccgacaacaugaucacggagaugcugcagaaggaguacauggagcggcagggcaagaccccgcuggggcucgucgaccuguucguguucagcaccuccuucuaccugaucagcaucuuccugcaccucgugaagaucccgacccaccgccacaucgucggcaagcccugccccaagccccaccggcugaaccacauggggaucugcuccugcggccuguacaagcagccgggggugcccgugaaguggaagcgcugaggacuaguaauaaggaaacuguaugaaugucugugggcaggaagugaagagauccuucuguaaagguuuuuggaauuaugucugcugaauaauaaacuuuuuugaaauaauaaaucugguagaaaaaugagaucucaaaggcucuuuucagagccaccaaaaaaaaaaaaaaaaaaaaaaaaaaaaaaaaaaaaaaaaaaaaaaaaaaaaaaaaaaaaaaaaaaaaaaaaaaaaaaaaaaaaaaaaaaaaaaaaaaaaa

SEQ ID NO: 34213 - RNA, 1812 nt, Artificial Sequence
  mRNA product Design b-4 (hSL-A100) comprising derived and/or modified sequence from LASV(Josiah;Clade IV)__NP_694870__GPCmut8 (opt1)
aggagagucccgcagucggcguccagcggcucugcuuguucgugugugugucguugcaggccuuauucaagcuuaccaugggccagaucgugaccuucuuccaggaggucccccacgugaucgaggaggugaugaacaucguccugaucgcccucagcgugcuggccgugcugaaggggcucuacaacuucgcgaccugcggccuggucgggcuggugacguuccuccugcugugcggccgcuccugcaccaccagccucuacaaggggguguacgagcugcagacccuggagcucaacauggagacgcugaacaugugcaugccgcuguccugcaccaagaacaacagccaccacuacaucauggucggcaacgagaccggccucgagcugacccugacgaacaccuccaucaucaaccacaaguucugcaaccucagcgacgcccacaagaagaaccuguacgaccacgcccugauguccaucaucagcaccuuccaccucuccauccccaacuucaaccaguacgaggccaugagcugcgacuucaacgggggcaagaucuccgugcaguacaaccugagccacuccuacgccggggacgcggccaaccacugcggcaccguggccaacgggguccugcagacguucaugcggauggccuggggcggcagcuacaucgcgcucgacuccgggcgcggcaacugggacugcaucaugaccagcuaccaguaccugaucauccagaacaccaccugggaggaccacugccaguucucccggcccagccccaucggguaccugggccuccugucccagcgcacgcgggacaucuacaucagccgccggcugcucggcaccuucaccuggacccugagcgacuccgaggggaaggacacgccgggcggguacugccugacccgcuggaugcucaucgaggccgagcugaagugcuucggcaacaccgccguggccaagugcaacgagaagcacgacgaggaguucugcgacaugcugcggcuguucgacuucugcaagcaggccauccagcgccugaaggcgcccgcccagaugagcauccagcugaucaacaaggccgugaacgcccucaucaacgaccagcugaucaugaagaaccaccuccgggacaucauggggauccccuacugcaacuacuccaaguacugcuaccucaaccacaccacgaccggccgcaccagccugcccaagugcugccuggucuccaacggcagcuaccucaacgagacccacuucuccgacgacaucgagcagcaggccgacaacaugaucacggagaugcugcagaaggaguacauggagcggcaggggaagaccccgcugggccugguggaccucuucguguucagcaccuccuucuaccugaucagcaucuuccugcaccucgucaagauccccacccaccgccacaucguggggaaguccugccccaagccccaccggcugaaccacaugggcaucugcagcugcgggcuguacaagcagccgggcgugcccgucaaguggaagcgcugaggacuaguaauaaggaaacuguaugaaugucugugggcaggaagugaagagauccuucuguaaagguuuuuggaauuaugucugcugaauaauaaacuuuuuugaaauaauaaaucugguagaaaaaugagaucucaaaggcucuuuucagagccaccaaaaaaaaaaaaaaaaaaaaaaaaaaaaaaaaaaaaaaaaaaaaaaaaaaaaaaaaaaaaaaaaaaaaaaaaaaaaaaaaaaaaaaaaaaaaaaaaaaaaa

SEQ ID NO: 34214 - RNA, 1809 nt, Artificial Sequence
  mRNA product Design b-4 (hSL-A100) comprising derived and/or modified sequence from LASV(LP;Clade I)__AAF86701__GPCmut8 (opt1)
aggagagucccgcagucggcguccagcggcucugcuuguucgugugugugucguugcaggccuuauucaagcuuaccaugggccagaucaucaccuucuuccaggaggugccccacgucaucgaggaggugaugaacaucgugcugaucgcccucagccugcuggccauccucaaggggcuguacaacaucgcgaccugcggcaucaucgggcuggucgccuuccucuuccugugcggcaaguccugcagccugacgcucaagggcggguacgagcugcagacccuggagcucaacauggagacccugaacaugugcaugccgcuguccugcaccaagaacagcucccaccacuacauccgcgugggcaacgagacggggcucgagcugacccugaccaacaccagcaucaucaaccacaaguucugcaaccucuccgacgcccacaagaagaaccuguacgaccacgcccugaugagcaucaucuccacguuccaccucagcauccccaacuucaaccaguacgaggccauguccugcgacuucaacggcgggaagaucagcgugcaguacaaccugucccacagcuacgcgggcgacgccgccgagcacugcgggaccgucgccaacggcgugcugcagaccuucaugcggauggcguggggcgggcgcuacaucgcccucgacuccggcaaggggaacugggacugcaucaugaccagcuaccaguaccugaucauccagaacacgaccugggaggaccacugccaguucucccggcccagccccaucggcuaccugggccuccugucccagcgcacccgggacaucuacaucagccgccggcugcucgggaccuucacguggacccugagcgacuccgagggcaacgagacccccgggggcuacugccugacccgcuggaugcucaucgaggccgagcugaagugcuucgggaacacggccguggccaagugcaacgagaagcacgacgaggaguucugcgacaugcugcggcuguucgacuucugcaagcaggcgauccgccggcugaaggccccggcccagaugagcauccagcugaucaacaaggccgucaacgcccucaucaacgaccagcugaucaugaagaaccaccuccgcgacaucaugggcauccccuacugcaacuacuccaaguacugcuaccucaaccacaccagcuccggccggaccagccugcccaagugcugccugaucuccaacgggagcuaccucaacgagacccaguucuccgacgacaucgagcagcaggcggacaacaugaucacggagaugcugcagaaggaguacaucgagcgccagggcaagaccccgcuggggcugguggacaucuucaucuucagcaccuccuucuaccucaucagcaucuuccugcaccugaucaagauccccacccaccggcacaucgugggcaagcccugccccaagccgcaccgccucaaccacaugggggucugcuccugcggccuguacaagcaccccggcgugcccacgaaguggaagcggugaggacuaguaauaaggaaacuguaugaaugucugugggcaggaagugaagagauccuucuguaaagguuuuuggaauuaugucugcugaauaauaaacuuuuuugaaauaauaaaucugguagaaaaaugagaucucaaaggcucuuuucagagccaccaaaaaaaaaaaaaaaaaaaaaaaaaaaaaaaaaaaaaaaaaaaaaaaaaaaaaaaaaaaaaaaaaaaaaaaaaaaaaaaaaaaaaaaaaaaaaaaaaaaaa

SEQ ID NO: 34215 - RNA, 1809 nt, Artificial Sequence
  mRNA product Design b-4 (hSL-A100) comprising derived and/or modified sequence from LASV(803213;Clade II)__AAF86703__GPCmut8 (opt1)
aggagagucccgcagucggcguccagcggcucugcuuguucgugugugugucguugcaggccuuauucaagcuuaccaugggccagaucaucaccuucuuccaggaggugccccacgucaucgaggaggugaugaacaucgugcugaucgcccucagccugcuggccauccucaaggggaucuacaacgucgcgaccugcggccuguucgggcugaucuccuuccuccugcugugcggccgcagcugcuccgugacguacaaggggguguacgagcuccagacccuggagcugaacauggccaaccucaacaugugcaugccgcugagcugcaccaagaacaacucccaccacuacaucauggucggcaacgagaccggccuggagcucacgcugaccaacaccagcaucaucaaccacaaguucugcaaccuguccgacgcccacaagaagaaccucuacgaccacgcccugaugagcaucaucuccaccuuccaccugagcauccccaacuucaaccaguacgaggccauguccugcgacuucaacgggggcaagaucagcgugcaguacaaccucucccacagcuucgcgguggacgccgccaaccacugcgggacgaucgccaacggcguccugcagaccuucaugcggauggcguggggcggguccuacaucgcccuggacagcggcaaggggaacugggacugcaucaugaccuccuaccaguaccucaucauccagaacaccacgugggaggaccacugccaguucagccgccccucccccaucggcuaccuggggcugcucagccagcggacccgcgacaucuacaucagccggcgccugcugggcaccuucaccuggacgcucuccgacagcgagggcaacgaggcccccgggggcuacugccugacccgguggaugcugaucgaggccgagcucaagugcuucgggaacaccgccguggcgaagugcaacgagaagcacgacgaggaguucugcgacaugcugcgccuguucgacuucugcaagcaggccaucaagcggcucaagaccccggcccagauguccauccagcugaucaacaaggccgugaacgcccugaucaacgaccagcucaucaugaagaaccaccuccgcgacaucaugggcauccccuacugcaacuacagccgguacugcuaccugaaccacacggucaccgggaagaccucccugccccgcugcugccuggugagcaacggcuccuaccugaacgagacccacuucagcgacgacaucgagcagcaggcggacaacaugaucacggagaugcuccagaaggaguacauggaccggcagggcaagaccccgcuggggcugguggaccuguucgucuucuccaccagcuucuaccucaucuccaucuuccugcaccuggugaagauccccacccaccgccacaucgugggcaagcccugccccaagccgcaccggcucaaccacauggggaucugcagcugcggccuguacaagcaccccgggguccccgugaaguggaagcgcugaggacuaguaauaaggaaacuguaugaaugucugugggcaggaagugaagagauccuucuguaaagguuuuuggaauuaugucugcugaauaauaaacuuuuuugaaauaauaaaucugguagaaaaaugagaucucaaaggcucuuuucagagccaccaaaaaaaaaaaaaaaaaaaaaaaaaaaaaaaaaaaaaaaaaaaaaaaaaaaaaaaaaaaaaaaaaaaaaaaaaaaaaaaaaaaaaaaaaaaaaaaaaaaaa

SEQ ID NO: 34216 - RNA, 1809 nt, Artificial Sequence
  mRNA product Design b-4 (hSL-A100) comprising derived and/or modified sequence from LASV(GA391;Clade III)__CAA36645__GPCmut8 (opt1)
aggagagucccgcagucggcguccagcggcucugcuuguucgugugugugucguugcaggccuuauucaagcuuaccaugggccagaucgugaccuucuuccaggaggucccccacgugaucgaggaggugaugaacaucguccugaucgcccucagcauccuggccauccugaaggggcucuacaacguggcgaccugcggccugaucgggcuggugacguuccuccugcuguccggccgcagcugcucccucaucuacaaggggaccuacgagcugcagacccuggagcucaacauggagacccugaacaugugcaugccgcugagcugcacgaagaacaacucccaccacuacauccgggucggcaacgagaccggccucgagcugacccugaccaacacgagcauccucaaccacaaguucugcaaccuguccgacgcccacaagcgcaaccuguacgaccacagccucauguccaucaucagcaccuuccaccuguccauccccaacuucaaccaguacgaggccaugagcugcgacuucaacgggggcaagaucaccgugcaguacaaccugucccacagcuucgccguggacgccgcggggcacugcggcacccucgccaacgggguccugcagacguucaugcggauggccuggggcggcuccuacaucgcccuggacagcgggcgcggcaacugggacugcaucaugaccuccuaccaguaccucaucauccagaacaccaccugggacgaccacugccaguucagccggcccucccccaucggguaccugggccugcucagccagcgcacgcgggacaucuacaucagccgccggcugcugggcaccuucaccuggacccucuccgacagcgaggggaacgagacgccgggcggguacugccugacccgcuggaugcugaucgaggcggagcucaagugcuucggcaacaccgccguggccaagugcaacgagaagcacgacgaggaguucugcgacaugcugcggcuguucgacuucugcaagcaggccauccgccggcucaagacccccgcccagauguccauccagcugaucaacaaggcggugaacgcccugaucaacgaccagcucaucaugaagaaccaccuccgcgacaucauggggauccccuacugcaacuacagccgguacugcuaccugaaccacacguccaccggcaagaccagccugccccgcugcugccugaucuccaacggcagcuaccugaacgagaccaaguucuccgacgacaucgagcagcaggccgacaacaugaucacggagaugcugcagaaggaguacaucgaccggcaggggaagaccccgcucggccuggucgaccuguucguguucagcaccuccuucuaccucaucagcaucuuccugcaccuggugaagauccccacccaccgccacaucgucgggaagcccugccccaagccgcaccggcucaaccacaugggcaucugcuccugcgggcuguacaagcagcccggcgugcccgugcgcuggaagcggugaggacuaguaauaaggaaacuguaugaaugucugugggcaggaagugaagagauccuucuguaaagguuuuuggaauuaugucugcugaauaauaaacuuuuuugaaauaauaaaucugguagaaaaaugagaucucaaaggcucuuuucagagccaccaaaaaaaaaaaaaaaaaaaaaaaaaaaaaaaaaaaaaaaaaaaaaaaaaaaaaaaaaaaaaaaaaaaaaaaaaaaaaaaaaaaaaaaaaaaaaaaaaaaaa

SEQ ID NO: 34217 - RNA, 1812 nt, Artificial Sequence
  mRNA product Design b-4 (hSL-A100) comprising derived and/or modified sequence from LASV(AV;Clade V)__CCA30314__GPCmut8 (opt1)
aggagagucccgcagucggcguccagcggcucugcuuguucgugugugugucguugcaggccuuauucaagcuuaccaugggccagaucgugaccuucuuccaggaggucccccacgugaucgaggaggugaugaacaucguccugaucgcccucagcauccuggccgugcugaaggggcucuacaacaucgcgaccugcggccugaucgggcugaucacguuccuccugcugugcggccgcuccugcagcuccaaccucuacaaggggguguacgagcugcagagccuggaccucaacauggagacccugaacaugugcaugccgcuguccugcaccaagaacaacagccaccacuacauccgggucggcaacgacaccggccucgagcugacgcugaccaacaccuccauccucaaccacaaguucugcaaccugagcgacgcccacaagaaggaccuguacgaccacgcccucauguccaucaucagcaccuuccaccuguccauccccaacuucaaccaguacgaggccaugagcugcgacuucaacgggggcaagaucuccgugcaguacaaccugagccacuccuacgccaucgacgcggccaaccacugcgggacgguggccaacggcauccuccagaccuucaugcgcauggccuggggcgggagcuacaucgcgcuggacuccggccgggggaacugggacugcaucaugaccagcuaccaguaccugaucauccagaacaccacgugggagaaccacugccaguucucccgccccagccccaucggcuaccucgggcugcugagccagcggacccgcgacaucuacaucucccggcgccuccugggcaccuucaccuggacgcugagcgacuccgagggcaacgccacccccgggggcuacugccucacccgguggaugcugaucgaggccgagcugaagugcuucgggaacaccgccgucgccaagugcaacgagaagcacgacgaggaguucugcgacaugcuccgccuguucgacuucugcaagcaggcgaucagccggcugaaguccccggcccagaugagcauccagcucaucaacaaggccgugaacgcccugaucaacgaccagcugaucaugaagaaccaccuccgcgacaucaugggcauccccuacugcaacuacuccaaguacugcuaccugaaccacacgaucaccgggaagaccagccugcccaagugcugccucguguccaacggcagcuaccugaacgagacccacuucuccgacgacaucgagcagcaggccgacaacaugaucacggagaugcugcagaaggaguacauggagcggcagggcaagaccccgcuggggcucgucgaccuguucguguucagcaccuccuucuaccugaucagcaucuuccuccgccuggugaagauccccacccaccggcacaucgucggcaagcccugccccaagccgcaccgccugaaccacauggggaucugcuccugcggccucuacaagcagcccggggugcccgugcgguggaagcgcugaggacuaguaauaaggaaacuguaugaaugucugugggcaggaagugaagagauccuucuguaaagguuuuuggaauuaugucugcugaauaauaaacuuuuuugaaauaauaaaucugguagaaaaaugagaucucaaaggcucuuuucagagccaccaaaaaaaaaaaaaaaaaaaaaaaaaaaaaaaaaaaaaaaaaaaaaaaaaaaaaaaaaaaaaaaaaaaaaaaaaaaaaaaaaaaaaaaaaaaaaaaaaaaaa

SEQ ID NO: 34218 - RNA, 1809 nt, Artificial Sequence
  mRNA product Design b-4 (hSL-A100) comprising derived and/or modified sequence from LASV(Togo/2016/7082;Clade VI)__AMR44577__GPCmut8 (opt1)
aggagagucccgcagucggcguccagcggcucugcuuguucgugugugugucguugcaggccuuauucaagcuuaccaugggccagaucaucaccuucuuccaggaggugccccacgucaucgaggaggugaugaacaucgugcugaucgcccucagccugcuggccauccucaagggggucuacaacguggcgaccugcggcaucaucgggcuggugacguuccuguuccucugcggccgcuccugcagccugaucuacaagggguccuacgagcugcagacccucgagcugaacauggagacccugaacaugugcaugccgcucagcugcaccaagaacuccagccaccacuacauccgggucggcaacgagacgggccuggagcugacccucaccaacaccuccaucaucaaccacaaguucugcaaccugagcgacgcccacaagcgcaaccuguacgaccacgcccucauguccauccugagcacguuccaccuguccauccccaacuucaaccaguacgaggccaugagcugcgacuucaacgggggcaagaucuccgugcaguacaaccucagccacgccuacgcgguggacgccgccgagcacugcgggaccgucgccaacggcgugcugcagaccuucaugcggauggcguggggcggguccuacaucgcccuggacagcggccgcgggaacugggacugcaucaugaccuccuaccaguaccucaucauccagaacacgaccugggaggaccacugccaguucagccggcccucccccaucggcuaccuggggcugcucagccagcgcacccgggacaucuacaucagccgccggcugcugggcaccuucacguggacccucuccgacagcgagggcaacgagacccccgggggcuacugccugacccgcuggaugcugaucgaggccgagcucaagugcuucgggaacacggccguggccaagugcaacgagaagcacgacgaggaguucugcgacaugcugcggcuguucgacuucugcaagcaggcgauccagcgccucaaguccccggcccagaugagcauccagcugaucaacaaggccgucaacgcccugaucaacgaccagcucaucaugaagaaccaccuccgggacaugaugggcauccccuacugcaacuacuccaaguacugcuaccugaaccacaccagcuccgggcgcaccagccugcccaagugcugccugguguccaacggcagcuaccugaacgagacccacuucuccgacgacaucgagcagcaggccgacaacaugaucacggagaugcuccagaaggaguacaucgaccggcagggcaagaccccgcuggggcugguggaccuguucgucuucagcaccuccuucuaccucaucagcaucuuccugcaccugaucaagauccccacccaccgccacaucgugggcaagcccugccccaagccgcaccggcucaaccacauggggaucugcuccugcggccuguacaagcagcccggggugcccacgcgcuggaagcggugaggacuaguaauaaggaaacuguaugaaugucugugggcaggaagugaagagauccuucuguaaagguuuuuggaauuaugucugcugaauaauaaacuuuuuugaaauaauaaaucugguagaaaaaugagaucucaaaggcucuuuucagagccaccaaaaaaaaaaaaaaaaaaaaaaaaaaaaaaaaaaaaaaaaaaaaaaaaaaaaaaaaaaaaaaaaaaaaaaaaaaaaaaaaaaaaaaaaaaaaaaaaaaaaa

SEQ ID NO: 34219 - RNA, 1809 nt, Artificial Sequence
  mRNA product Design b-4 (hSL-A100) comprising derived and/or modified sequence from LASV(KAK-428;Clade n.d. (VII))__ANH09740__GPCmut8 (opt1)
aggagagucccgcagucggcguccagcggcucugcuuguucgugugugugucguugcaggccuuauucaagcuuaccaugggccagaucgugaccuucuuccaggaggucccccacgugaucgaggaggugaugaacaucguccugaucgcccucagccugcuggccauccucaaggggcuguacaacuucgcgaccugcggcgugaucgggcugaucacguuccuccugcugugcggccgcuccugcagcgccaccuacaaggggcaguacgagcuccagacccuggagcugaacauggagucccucaacaugugcaugccgcugagcugcaccaagaacaacucccaccacuacauccgggccggcaacaacacgggccuggagcucacccugaccaacaccagcaucaucucccacaaguucugcaaccugagcgacgcccacaagaagaaccucuacgaccacacgcugauguccaucaucaccaccuuccaccugagcauccccaacuucaaccaguacgaggccauguccugcgacuucaacgggggcaagaucagcauccaguacaaccucucccacagcuacgcgggggacgccgcccagcacugcggcaccguggccaacgggguccugcagacguucaugcgcauggcguggggcggcuccuaccuggcccucgacagcgggcggcgcggcugggacugcaucaucuccagcuaccaguaccugaucauccagaacaccaccugggacgaccacugccaguucucccggcccagccccaucggguaccugggcuucgugagccagaagacccgcgacaucuacaucucccggcgccuccugggcacguucaccuggacccugagcgacuccgaggggcacgacaugccgggcggguacugccucacccgguggaugcugaucgaggccgaccugaagugcuucggcaacacggccguggccaagugcaacgagaagcacgacgaggaguucugcgacauguggcgccucuucgacuucugcaagcaggcgauccagcggcugaaggcccccgcccagaugaacauccagcugaucaacaaggccgucaacgcccucaucaacgaccagcugaugaugaagaaccaccuccgcgacaucauggggauccccuacugcaacuacagcaaguucugcuaccugaacaacaccaccaccggccggacgucccugccccgcugcugccugaucagcaacggcuccuaccucaacgagacccacuucagcgacgacaucgagcagcaggcggacaacaugaucaccgagaugcugcagaaggaguacauggaccggcaggggaagaccccgcugggccucguggaccuguucguguucuccacgagcuucuaccugaucaccaucuuccugcaccucgucaagauccccacccaccgccacaucguggggaagcccugccccaagccgcaccggcugaaccacaugggcaucugcuccugcgggcuguacaagcagcccggcgugcccguccgcuggaagcggugaggacuaguaauaaggaaacuguaugaaugucugugggcaggaagugaagagauccuucuguaaagguuuuuggaauuaugucugcugaauaauaaacuuuuuugaaauaauaaaucugguagaaaaaugagaucucaaaggcucuuuucagagccaccaaaaaaaaaaaaaaaaaaaaaaaaaaaaaaaaaaaaaaaaaaaaaaaaaaaaaaaaaaaaaaaaaaaaaaaaaaaaaaaaaaaaaaaaaaaaaaaaaaaaa

SEQ ID NO: 34220 - RNA, 1809 nt, Artificial Sequence; identical to SEQ ID NO: 34214
  mRNA product Design b-4 (hSL-A100) comprising derived and/or modified sequence from LASV(Pinneo-NIG-1969;Clade I)__AIT17836__GPCmut8 (opt1)

SEQ ID NO: 34221 - RNA, 1809 nt, Artificial Sequence
  mRNA product Design b-4 (hSL-A100) comprising derived and/or modified sequence from LASV(ISTH0009-NIG-2011;Clade II)__AIT17404__GPCmut8 (opt1)
aggagagucccgcagucggcguccagcggcucugcuuguucgugugugugucguugcaggccuuauucaagcuuaccaugggccagaucaucaccuucuuccaggaggugccccacgucaucgaggaggugaugaacaucgugcugaucgcccucagccugcuggccauccucaaggggaucuacaacgucgcgaccugcggccuguucgggcugguguccuuccuccugcugugcggccgcagcugcuccacgaccuacaaggggguguacgagcuccagacccuggagcuggacauggccagccucaacaugugcaugccgcuguccugcaccaagaacaacagccaccacuacaucauggucggcaacgagacgggccuggagcucacccugaccaacaccuccaucaucaaccacaaguucugcaaccugagcgacgcccacaagaagaaccucuacgaccacgcccugauguccaucaucagcacguuccaccuguccauccccaacuucaaccaguacgaggccaugagcugcgacuucaacgggggcaagaucuccgugcaguacaaccucagccacgcguacgccguggacgccgccaaccacugcgggaccaucgcgaacggcguccugcagaccuucaugcggauggccuggggcggguccuacaucgcccuggacagcggcaagggguccugggacugcaucaugaccagcuaccaguaccucaucauccagaacacgaccugggaggaccacugccaguucucccgccccagccccaucggcuaccuggggcugcucagccagcggacccgcgacaucuacaucucccggcgccugcugggcaccuucacguggacccucagcgacuccgagggcaacgagacccccgggggcuacugccugacccgguggaugcugaucgaggccgagcucaagugcuucgggaacacggccguggcgaagugcaacgagaagcacgacgaggaguucugcgacaugcugcgccuguucgacuucugcaagcaggccauccggcgccucaagaccccggcccagaugagcauccagcugaucaacaaggccgugaacgcccugaucaacgaccagcucaucaugaagaaccaccuccgggacaucaugggcauccccuacugcaacuacuccaaguacugcuaccugaaccacaccgucaccgggaagacgagccugccccgcugcugccugguguccaacggcagcuaccugaacgagacccacuucuccgacgacaucgagcagcaggcggacaacaugaucaccgagcuccugcagaaggaguacauggaccggcagggcaagaccccgcuggggcugguggaccucuucgucuucagcacguccuucuaccugaucagcaucuuccugcaccucaucaagauccccacccaccgccacaucaccggcaagcccugccccaagccgcaccggcugaaccacauggggaucugcuccugcggccuguacaagcaccccggggugcccgugaaguggaagcgcugaggacuaguaauaaggaaacuguaugaaugucugugggcaggaagugaagagauccuucuguaaagguuuuuggaauuaugucugcugaauaauaaacuuuuuugaaauaauaaaucugguagaaaaaugagaucucaaaggcucuuuucagagccaccaaaaaaaaaaaaaaaaaaaaaaaaaaaaaaaaaaaaaaaaaaaaaaaaaaaaaaaaaaaaaaaaaaaaaaaaaaaaaaaaaaaaaaaaaaaaaaaaaaaaa

SEQ ID NO: 34222 - RNA, 1809 nt, Artificial Sequence
  mRNA product Design b-4 (hSL-A100) comprising derived and/or modified sequence from LASV(ISTH2010-NIG-2012;Clade II)__AIT17482__GPCmut8 (opt1)
aggagagucccgcagucggcguccagcggcucugcuuguucgugugugugucguugcaggccuuauucaagcuuaccaugggccagaucaucaccuucuuccaggaggugccccacgucaucgaggaggugaugaacaucgugcugaucgcccucagccugcuggccauccucaaggggaucuacaacgucgcgaccugcggccuguucgggcugguguccuuccuccugcugugcggccgcagcugcuccacgaccuacaaggggguguacgagcuccagacccuggagcuggacauggccagccucaacaugugcaugccgcuguccugcaccaagaacaacagccaccacuacaucauggucggcaacgagacgggccuggagcucacccugaccaacaccuccaucaucaaccacaaguucugcaaccugagcgacgcccacaagaagaaccucuacgaccacgcccugauguccaucaucagcacguuccaccuguccauccccaacuucaaccaguacgaggccaugagcugcgacuucaacgggggcaagaucuccgugcaguacaaccucagccacgcguacgccguggacgccgccaaccacugcgggaccaucgcgaacggcguccugcagaccuucaugcggauggccuggggcggguccuacaucgcccuggacagcggcaagggguccugggacugcaucaugaccagcuaccaguaccucaucauccagaacaucacgugggaggaccacugccaguucucccgccccagccccaucggcuaccuggggcugcucagccagcggacccgcgacaucuacaucucccggcgccugcugggcaccuucaccuggacgcucagcgacuccgagggcaacgagacccccgggggcuacugccugacccgguggaugcugaucgaggccgagcucaagugcuucgggaacaccgccguggcgaagugcaacgagaagcacgacgaggaguucugcgacaugcugcgccuguucgacuucugcaagcaggccauccggcgccucaagacgccggcccagaugagcauccagcugaucaacaaggccgugaacgcccugaucaacgaccagcucaucaugaagaaccaccuccgggacaucaugggcauccccuacugcaacuacuccaaguacugcuaccugaaccacaccgucaccgggaagaccagccugccccgcugcugccugguguccaacggcagcuaccugaacgagacgcacuucuccgacgacaucgagcagcaggcggacaacaugaucaccgagcuccugcagaaggaguacaucgaccggcagggcaagaccccgcuggggcugguggaccucuucgucuucagcaccuccuucuaccugaucagcaucuuccugcaccucgugaagauccccacgcaccgccacguggucggcaagcccugccccaagccgcaccggcugaaccacauggggaucugcuccugcggccuguacaagcaccccggggugcccgugaaguggaagcgcugaggacuaguaauaaggaaacuguaugaaugucugugggcaggaagugaagagauccuucuguaaagguuuuuggaauuaugucugcugaauaauaaacuuuuuugaaauaauaaaucugguagaaaaaugagaucucaaaggcucuuuucagagccaccaaaaaaaaaaaaaaaaaaaaaaaaaaaaaaaaaaaaaaaaaaaaaaaaaaaaaaaaaaaaaaaaaaaaaaaaaaaaaaaaaaaaaaaaaaaaaaaaaaaaa

SEQ ID NO: 34223 - RNA, 1809 nt, Artificial Sequence
  mRNA product Design b-4 (hSL-A100) comprising derived and/or modified sequence from LASV(Lassa virus/H.sapiens-wt/NGA/2015/ISTH_0543;Clade II)__AVO03639__GPCmut8 (opt1)
aggagagucccgcagucggcguccagcggcucugcuuguucgugugugugucguugcaggccuuauucaagcuuaccaugggccagaucaucaccuucuuccaggaggugccccacgucaucgaggaggugaugaacaucgugcugaucgcccucagccugcuggccauccucaaggggaucuacaacgucgcgaccugcggccuguucgggcugguguccuuccuccugcugugcggccgcagcugcuccacgaccuacaaggggguguacgagcuccagacccuggagcuggacauggccaaccucaacaugugcaugccgcugagcugcaccaagaacaacucccaccacuacaucauggucggcaacgagacgggccuggagcucacccugaccaacaccagcaucaucaaccacaaguucugcaaccuguccgacgcccacaagaagaaccucuacgaccacgcccugaugagcaucaucuccacguuccaccugagcauccccaacuucaaccaguacgaggccauguccugcgacuucaacgggggcaagaucagcgugcaguacaaccucucccacaccuacgcgguggacgccgccaaccacugcgggaccaucgccaacggcguccugcagaccuucaugcggauggcguggggcgggagcuacaucgcccuggacuccggcaaggggagcugggacugcaucaugacguccuaccaguaccucgugauccagaacaccaccugggaggaccacugccaguucagccgccccucccccaucggcuaccuggggcugcucagccagcggacccgcgacaucuacaucagccggcgccugcugggcacguucaccuggacccucuccgacagcgagggcaacgagacccccgggggcuacugccugacgcgguggaugcugaucgaggccgagcucaagugcuucgggaacaccgccguggccaagugcaacgagaagcacgacgaggaguucugcgacaugcugcgccuguucgacuucugcaagcaggcgauccggcgccucaagaccccggcccagauguccauccagcugaucaacaaggccgucaacgcccugaucaacgaccagcucaucaugaagaaccaccuccgggacaucaugggcauccccuacugcaacuacagcaaguacugcuaccugaaccacaccgugacggggaagaccucccugccccgcugcugccuggugagcaacggcuccuaccugaacgagacccacuucagcgacgacaucgagcagcaggccgacaacaugaucaccgagcuccugcagaaggaguacaucgaccggcagggcaagacgccgcuggggcuggucgaccucuucguguucuccaccagcuucuaccugaucuccaucuuccugcaccucgugaagauccccacccaccgccacaucaccggcaagcccugccccaagccgcaccggcugaaccacauggggaucugcagcugcggccuguacaagcaccccgggguccccgugaaguggaagcgcugaggacuaguaauaaggaaacuguaugaaugucugugggcaggaagugaagagauccuucuguaaagguuuuuggaauuaugucugcugaauaauaaacuuuuuugaaauaauaaaucugguagaaaaaugagaucucaaaggcucuuuucagagccaccaaaaaaaaaaaaaaaaaaaaaaaaaaaaaaaaaaaaaaaaaaaaaaaaaaaaaaaaaaaaaaaaaaaaaaaaaaaaaaaaaaaaaaaaaaaaaaaaaaaaa

SEQ ID NO: 34224 - RNA, 1809 nt, Artificial Sequence
  mRNA product Design b-4 (hSL-A100) comprising derived and/or modified sequence from LASV(Lassa virus/H.sapiens-wt/NGA/2016/ISTH_0009;Clade II)__AVO03571__GPCmut8 (opt1)
aggagagucccgcagucggcguccagcggcucugcuuguucgugugugugucguugcaggccuuauucaagcuuaccaugggccagaucaucaccuucuuccaggaggugccccacgucaucgaggaggugaugaacaucgugcugaucgcccucagccugcuggccauccucaaggggaucuacaacgucgcgaccugcggccugcuggggcucguguccuuccugcugcucugcggccgcagcugcuccacgaccuacaaggggguguacgagcugcagacccuggagcucgacauggccagccugaacaugugcaugccgcuguccugcaccaagaacaacagccaccacuacaucauggucggcaacgagacgggccucgagcugacccugaccaacaccuccaucaucaaccacaaguucugcaaccucagcgacgcccacaagaagaaccuguacgaccacgcccugauguccaucaucagcacguuccaccucuccauccccaacuucaaccaguacgaggccaugagcugcgacuucaacgggggccggaucuccgugcaguacaaccugagccacuccuacgcgguggacgccgccaaccacugcgggaccaucgccaacggcguccugcagaccuucaugcgcauggcguggggcgggagcuacaucgcccucgacuccggcaaggggagcugggacugcaucaugaccuccuaccaguaccugaucauccagaacacgaccugggaggaccacugccaguucagccggcccagccccaucggcuaccuggggcuccugucccagcgcacccgggacaucuacaucagccgccggcugcucggcaccuucacguggacccuguccgacagcgagggcaacgagacccccgggggcuacugccugacccgcuggaugcucaucgaggccgagcugaagugcuucgggaacacggccguggccaagugcaacgagaagcacgacgaggaguucugcgacaugcugcggcuguucgacuucugcaagcaggcgauccgccggcugaagaccccggcccagauguccauccagcugaucaacaaggccgugaacgcccucaucaacgaccagcugaucaugaagaaccaccuccgcgacaucaugggcauccccuacugcaacuacagcaaguacugcuaccucaaccacaccgucaccgggaagacgucccugccccggugcugccuggugagcaacggcuccuaccucaacgagacccacuucagcgacgacaucgagcagcaggccgacaacaugaucaccgagcugcugcagaaggaguacaucgaccgccagggcaagaccccgcuggggcucguggaccuguucgucuucuccacgagcuucuaccugaucuccaucuuccuccaccuggugaagauccccacccaccggcacaucaccggcaagcccugccccaagccgcaccgccugaaccacauggggaucugcagcugcggccucuacaaccaccccggggugcccgucaaguggaagcggugaggacuaguaauaaggaaacuguaugaaugucugugggcaggaagugaagagauccuucuguaaagguuuuuggaauuaugucugcugaauaauaaacuuuuuugaaauaauaaaucugguagaaaaaugagaucucaaaggcucuuuucagagccaccaaaaaaaaaaaaaaaaaaaaaaaaaaaaaaaaaaaaaaaaaaaaaaaaaaaaaaaaaaaaaaaaaaaaaaaaaaaaaaaaaaaaaaaaaaaaaaaaaaaaa

SEQ ID NO: 34225 - RNA, 1809 nt, Artificial Sequence
  mRNA product Design b-4 (hSL-A100) comprising derived and/or modified sequence from LASV(Lassa virus/H.sapiens-wt/NGA/2016/ISTH_0017;Clade II)__AVO03567__GPCmut8 (opt1)
aggagagucccgcagucggcguccagcggcucugcuuguucgugugugugucguugcaggccuuauucaagcuuaccaugggccagaucaucaccuucuuccaggaggugccccacgucaucgaggaggugaugaacaucgugcugaucgcccucagccugcuggccauccucaaggggaucuacaacgucgcgaccugcggccuguucgggcugguguccuuccuccugcugugcggccgcagcugcuccacgaccuacaaggggguguacgagcuccagacccuggagcuggacauggccagccucaacaugugcaugccgcuguccugcaccaagaacaacagccaccacuacaucauggucggcaacgagacgggccuggagcucacccugaccaacaccuccaucaucaaccacaaguucugcaaccugagcgacgcccacaagaagaaccucuacgaccacgcccugauguccaucaucagcacguuccaccuguccauccccaacuucaaccaguacgaggccaugagcugcgacuucaacgggggcaagaucuccgugcaguacaaccucagccacaccuacgcgaucgacgccgccaaccacugcgggaccaucgccaacggcgugcugcagaccuucaugcggauggcguggggcggguccuacaucgcccuggacagcggcaagggguccugggacugcaucaugacgagcuaccaguaccucaucauccagaacaccaccugggaggaccacugccaguucucccgccccagccccaucggcuaccuggggcugcucagccagcggacccgcgacaucuacaucucccggcgccugcugggcacguucaccuggacccucagcgacuccgagggcaacgagacccccgggggcuacugccugacgcgguggaugcugaucgaggccgagcucaagugcuucgggaacaccgccgucgccaagugcaacgagaagcacgacgaggaguucugcgacaugcugcgccuguucgacuucugcaagcaggcgauccggcgccucaagaccccggcccagaugagcauccagcugaucaacaaggccgugaacgcccugaucaacgaccagcucaucaugaagaaccaccuccgggacaucaugggcauccccuacugcaacuacuccaaguacugcuaccugaaccacaccgugacggggaagaccagccugccccgcugcugccuggucuccaacggcagcuaccugaacgagacccacuucuccgacgacaucgagcagcaggccgacaacaugaucaccgagcuccugcagaaggaguacauggaccggcagggcaagacgccgcuggggcugguggaccucuucguguucagcaccuccuucuaccugaucagcaucuuccugcaccucguccgcauccccacccaccggcacgugaucggcaagcccugccccaagccgcaccgccugaaccacauggggaucugcuccugcggccuguacaagcaccccggggugcccgucaaguggaagcggugaggacuaguaauaaggaaacuguaugaaugucugugggcaggaagugaagagauccuucuguaaagguuuuuggaauuaugucugcugaauaauaaacuuuuuugaaauaauaaaucugguagaaaaaugagaucucaaaggcucuuuucagagccaccaaaaaaaaaaaaaaaaaaaaaaaaaaaaaaaaaaaaaaaaaaaaaaaaaaaaaaaaaaaaaaaaaaaaaaaaaaaaaaaaaaaaaaaaaaaaaaaaaaaaa

SEQ ID NO: 34226 - RNA, 1809 nt, Artificial Sequence
  mRNA product Design b-4 (hSL-A100) comprising derived and/or modified sequence from LASV(Lassa virus/H.sapiens-wt/NGA/2018/ISTH_0959;Clade II)__AVV65099__GPCmut8 (opt1)
aggagagucccgcagucggcguccagcggcucugcuuguucgugugugugucguugcaggccuuauucaagcuuaccaugggccagaucaucaccuucuuccaggaggugccccacgucaucgaggaggugaugaacaucgugcugaucgcccucagccugcuggccauccucaaggggaucuacaacgucgugaccugcggccuguucgggcugguguccuuccuccugcugugcggccgcagcugcuccacgaccuacaagggggucuacgagcuccagacccuggagcuggacauggcgagccucaacaugugcaugccgcuguccugcaccaagaacaacagccaccacuacaucauggugggcaacgagacgggccuggagcucacccugaccaacaccuccaucaucaaccacaaguucugcaaccugagcgacgcccacaagaagaaccucuacgaccacgcccugauguccaucaucagcacguuccaccuguccauccccaacuucaaccaguacgaggccaugagcugcgacuucaacgggggcaagaucuccgugcaguacaaccucagccacgccuacgcgaucgacgccgccaaccacugcgggaccaucgccaacggcguccugcagaccuucaugcggauggcguggggcggguccuacaucgcccuggacagcggcaagggguccugggacugcaucaugaccagcuaccaguaccucaucauccagaacacgaccugggaggaccacugccaguucucccgccccagccccaucggcuaccuggggcugcucagccagcggacccgcgacaucuacaucucccggcgccugcugggcaccuucacguggacccucagcgacuccgagggcaacgagacccccgggggcuacugccugacccgguggaugcugaucgaggccgagcucaagugcuucgggaacacggccguggccaagugcaacgagaagcacgacgaggaguucugcgacaugcugcgccuguucgacuucugcaagcaggcgauccggcgccucaagaccccggcccagaugagcauccagcugaucaacaaggccgugaacgcccugaucaacgaccagcucaucaugaagaaccaccuccgggacaucaugggcauccccuacugcaacuacuccaaguacugcuaccugaaccacaccgucaccgggaagacgagccugccccgcugcugccugguguccaacggcagcuaccugaacgagacccacuucuccgacgacaucgagcagcaggccgacaacaugaucaccgagcuccugcagaaggaguacaucgaccggcagggcaagaccccgcuggggcugguggaccucuucgucuucagcacguccuucuaccugaucagcaucuuccugcaccucgugaagauccccacccaccgccacgugaucggcaagcccugccccaagccgcaccggcugaaccacauggggaucugcuccugcggccuguacaagcaccccgggguccccgugaaguggaagcgcugaggacuaguaauaaggaaacuguaugaaugucugugggcaggaagugaagagauccuucuguaaagguuuuuggaauuaugucugcugaauaauaaacuuuuuugaaauaauaaaucugguagaaaaaugagaucucaaaggcucuuuucagagccaccaaaaaaaaaaaaaaaaaaaaaaaaaaaaaaaaaaaaaaaaaaaaaaaaaaaaaaaaaaaaaaaaaaaaaaaaaaaaaaaaaaaaaaaaaaaaaaaaaaaaa

SEQ ID NO: 34227 - RNA, 1809 nt, Artificial Sequence
  mRNA product Design b-4 (hSL-A100) comprising derived and/or modified sequence from LASV(LASV003-NIG-2008;Clade II)__AIT17580__GPCmut8 (opt1)
aggagagucccgcagucggcguccagcggcucugcuuguucgugugugugucguugcaggccuuauucaagcuuaccaugggccagaucaucaccuucuuccaggaggugccccacgucaucgaggaggugaugaacaucgugcugaucgcccucagccugcuggccauccucaaggggaucuacaacgucgcgaccugcggccuguucgggcugguguccuuccuccugcugugcggccgcagcugcuccacgaccuacaaggggguguacgagcuccagacccuggagcuggacauggccagccucaacaugugcaugccgcuguccugcaccaagaacaacagccaccacuacaucauggucggcaacgagacgggccuggagcucacccugaccaacaccuccaucaucaaccacaaguucugcaaccugagcgacgcccacaagaagaaccucuacgaccacgcccugauguccaucaucagcacguuccaccuguccauccccaacuucaaccaguacgaggccaugagcugcgacuucaacgggggcaagaucuccgugcaguacaaccucagccacaccuacgcgguggacgccgccaaccacugcgggaccaucgccaacggcguccugcagaccuucaugcggauggcguggggcggguccuacaucgcccuggacagcggcaagggguccugggacugcaucaugacgagcuaccaguaccucaucauccagaacaccaccugggaggaccacugccaguucucccgccccagccccaucggcuaccuggggcugcucagccagcggacccgcgacaucuacaucucccggcgccugcugggcacguucaccuggacccucagcgacuccgagagcaacgagaccccgggcggguacugccugacgcgguggaugcugaucgaggccgagcucaagugcuucggcaacaccgccguggccaagugcaacgagaagcacgacgaggaguucugcgacaugcugcgccuguucgacuucugcaagcaggcgauccggcgccucaaggcccccgcccagauguccauccagcugaucaacaaggccgugaacgcccugaucaacgaccagcucaucaugaagaaccaccuccgggacaucauggggauccccuacugcaacuacagcaaguacugcuaccugaaccacaccgucaccggccgcacgucccugccccggugcugccuggugagcaacggguccuaccugaacgagacccacuucagcgacgacaucgagcagcaggcggacaacaugaucaccgagcuccugcagaaggaguacauggaccgccagggcaagaccccgcugggccugguggaccucuucgucuucuccacgagcuucuaccugaucuccaucuuccugcaccucgugaagauccccacccaccggcacgugaucgggaagcccugccccaagccgcaccgccugaaccacaugggcaucugcagcugcgggcuguacaagcaccccggcguccccgugaaguggaagcggugaggacuaguaauaaggaaacuguaugaaugucugugggcaggaagugaagagauccuucuguaaagguuuuuggaauuaugucugcugaauaauaaacuuuuuugaaauaauaaaucugguagaaaaaugagaucucaaaggcucuuuucagagccaccaaaaaaaaaaaaaaaaaaaaaaaaaaaaaaaaaaaaaaaaaaaaaaaaaaaaaaaaaaaaaaaaaaaaaaaaaaaaaaaaaaaaaaaaaaaaaaaaaaaaa

SEQ ID NO: 34228 - RNA, 1809 nt, Artificial Sequence
  mRNA product Design b-4 (hSL-A100) comprising derived and/or modified sequence from LASV(LASV035-NIG-2009;Clade II)__AIT17588__GPCmut8 (opt1)
aggagagucccgcagucggcguccagcggcucugcuuguucgugugugugucguugcaggccuuauucaagcuuaccaugggccagaucaucaccuucuuccaggaggugccccacgucaucgaggaggugaugaacaucgugcugaucgcccucagccugcuggccauccucaaggggaucuacaacgucgcgaccugcggccuguucgggcugguguccuuccuccugcugugcggccgcagcugcuccacgaccuacaaggggguguacgagcuccagacccuggagcuggacauggccagccucaacaugugcaugccgcuguccugcaccaagaacaacagccaccacuacaucauggucggcaacgagacgggccuggagcucacccugaccaacaccuccaucaucaaccacaaguucugcaaccugagcgacgcccacaagaagaaccucuacgaccacgcccugauguccaucaucagcacguuccaccuguccauccccaacuucaaccaguacgaggccaugagcugcgacuucaacgggggcaagaucuccgugcaguacaaccucagccacgcguacgccguggacgccgccaaccacugcgggaccaucgcgaacggcguccugcagaccuucaugcggauggccuggggcggguccuacaucgcccuggacagcggcaagggguccugggacugcaucaugaccagcuaccaguaccucaucauccagaacacgaccugggaggaccacugccaguucucccgccccagccccaucggcuaccuggggcugcucagccagcggacccgcgacaucuacaucucccggcgccugcugggcaccuucacguggacccucagcgacuccgagggcaacgagacccccgggggcuacugccugacccgguggaugcugaucgaggccgagcucaagugcuucgggaacacggccguggcgaagugcaacgagaagcacgacgaggaguucugcgacaugcugcgccuguucgacuucugcaagcaggccauccggcgccucaaggccccggcccagaugagcauccagcugaucaacaaggccgugaacgcgcugaucaacgaccagcucaucaugaagaaccaccuccgggacaucaugggcauccccuacugcaacuacuccaaguacugcuaccugaaccacaccgucaccgggaagaccagccugccccgcugcugccugguguccaacggcagcuaccugaacgagacgcacuucuccgacgacaucgagcagcaggccgacaacaugaucaccgagcuccugcagaaggaguacaucgaccggcagggcaagaccccgcuggggcugguggaccucuucgucuucagcaccuccuucuaccugaucagcaucuuccugcaccucgugaagauccccacgcaccgccacgugaucggcaagcccugccccaagccgcaccggcugaaccacauggggaucugcuccugcggccuguacaagcaccccgggguccccgugaaguggaagcgcugaggacuaguaauaaggaaacuguaugaaugucugugggcaggaagugaagagauccuucuguaaagguuuuuggaauuaugucugcugaauaauaaacuuuuuugaaauaauaaaucugguagaaaaaugagaucucaaaggcucuuuucagagccaccaaaaaaaaaaaaaaaaaaaaaaaaaaaaaaaaaaaaaaaaaaaaaaaaaaaaaaaaaaaaaaaaaaaaaaaaaaaaaaaaaaaaaaaaaaaaaaaaaaaaa

SEQ ID NO: 34229 - RNA, 1809 nt, Artificial Sequence
  mRNA product Design b-4 (hSL-A100) comprising derived and/or modified sequence from LASV(LASV1000-NIG-2009;Clade II)__AIT17782__GPCmut8 (opt1)
aggagagucccgcagucggcguccagcggcucugcuuguucgugugugugucguugcaggccuuauucaagcuuaccaugggccagaucaucaccuucuuccaggaggugccccacgucaucgaggaggugaugaacaucgugcugaucgcccucagccugcuggccauccucaaggggaucuacaacgucgcgaccugcggccuguucgggcugguguccuuccuccugcugugcggccgcagcugcuccacgaccuacaaggggguguacgagcuccagacccuggagcuggacauggccagccucaacaugugcaugccgcuguccugcaccaagaacaacagccaccacuacaucauggucggcaacgagacgggccuggagcucacccugaccaacaccuccaucaucaaccacaaguucugcaaccugagcgacgcccacaagaagaaccucuacgaccacgcccugauguccaucaucagcacguuccaccuguccauccccaacuucaaccaguacgaggccaugagcugcgacuucaacgggggcaagaucuccgugcaguacaaccucagccacaccuacgcgguggacgccgccaaccacugcgggaccaucgccaacggcguccugcagaccuucaugcggauggcguggggcggguccuacaucgcccuggacagcggcaagggguccugggacugcaucaugacgagcuaccaguaccucaucauccagaacaccaccugggaggaccacugccaguucucccgccccagccccaucggcuaccuggggcugcucagccagcggacccgcgacaucuacaucucccggcgccugcugggcacguucaccuggacccucagcgacuccgagggcaacgagacccccgggggcuacugccugacgcgguggaugcugaucgaggccgagcucaagugcuucgggaacaccgccguggccaagugcaacgagaagcacgacgaggaguucugcgacaugcugcgccuguucgacuucugcaagcaggcgaucaagcggcucaagaccccggcccagaugagcauccagcugaucaacaaggccgugaacgcccugaucaacgaccagcucaucaugaagaaccaccuccgcgacaucaugggcauccccuacugcaacuacuccaaguacugcuaccugaaccacaccgucacggggaagaccagccugccccggugcugccugguguccaacggcagcuaccugaacgagacccacuucuccgacgacaucgagcagcaggccgacaacaugaucaccgagcuccugcagaaggaguacaucgaccgccagggcaagacgccgcuggggcugguggaccucuucgucuucagcaccuccuucuaccugaucagcaucuuccugcaccucgugaagauccccacccaccggcacguggucggcaagcccugccccaagccgcaccgccugaaccacauggggaucugcuccugcggccuguacaagcaccccggggugcccgugaaguggaagcggugaggacuaguaauaaggaaacuguaugaaugucugugggcaggaagugaagagauccuucuguaaagguuuuuggaauuaugucugcugaauaauaaacuuuuuugaaauaauaaaucugguagaaaaaugagaucucaaaggcucuuuucagagccaccaaaaaaaaaaaaaaaaaaaaaaaaaaaaaaaaaaaaaaaaaaaaaaaaaaaaaaaaaaaaaaaaaaaaaaaaaaaaaaaaaaaaaaaaaaaaaaaaaaaaa

SEQ ID NO: 34230 - RNA, 1809 nt, Artificial Sequence
  mRNA product Design b-4 (hSL-A100) comprising derived and/or modified sequence from LASV(LASV221-NIG-2010;Clade II)__AIT17624__GPCmut8 (opt1)
aggagagucccgcagucggcguccagcggcucugcuuguucgugugugugucguugcaggccuuauucaagcuuaccaugggccagaucaucaccuucuuccaggaggugccccacgucaucgaggaggugaugaacaucgugcugaucgcccucagccugcuggccauccucaaggggaucuacaacgucgcgaccugcggccuguucgggcugguguccuuccuccugcugugcggccgcagcugcuccacgaccuacaaggggguguacgagcuccagacccuggagcuggacauggccagccucaacaugugcaugccgcuguccugcaccaagaacaacagccaccacuacaucauggucggcaacgagacgggccuggagcucacccugaccaacaccuccaucaucaaccacaaguucugcaaccugagcgacgcccacaagaagaaccucuacgaccacgcccugauguccaucaucagcacguuccaccuguccauccccaacuucaaccaguacgaggccaugagcugcgacuucaacgggggcaagaucuccgugcaguacaaccucagccacaccuacgcgaucgacgccgccaaccacugcgggaccaucgccaacggcgugcugcagaccuucaugcggauggcguggggcggguccuacaucgcccuggacagcggcaagggguccugggacugcaucaugacgagcuaccaguaccucaucauccagaacaccaccugggaggaccacugccaguucucccgccccagccccaucggcuaccuggggcugcucagccagcggacccgcgacaucuacaucucccggcgccugcugggcacguucaccuggacccucagcgacuccgagggcaacgagacccccgggggcuacugccugacgcgguggaugcugaucgaggccgagcucaagugcuucgggaacaccgccgucgccaagugcaacgagaagcacgacgaggaguucugcgacaugcugcgccuguucgacuucugcaagcaggcgauccggcgccucaagaccccggcccagaugagcauccagcugaucaacaaggccgugaacgcccugaucaacgaccagcucaucaugaagaaccaccuccgggacaucaugggcauccccuacugcaacuacuccaaguacugcuaccugaaccacaccgugacggggaagaccagccugccccgcugcugccuggucuccaacggcagcuaccugaacgagacccacuucuccgacgacaucgagcagcaggccgacaacaugaucaccgagaugcuccagaaggaguacauggaccggcagggcaagacgccgcuggggcugguggaccuguucguguucagcaccuccuucuaccucaucagcaucuuccugcaccuggucaagauccccacccaccgccacgugaucggcaagcccugccccaagccgcaccggcucaaccacauggggaucugcuccugcggccuguacaagcaccccggggugcccgucaaguggaagcgcugaggacuaguaauaaggaaacuguaugaaugucugugggcaggaagugaagagauccuucuguaaagguuuuuggaauuaugucugcugaauaauaaacuuuuuugaaauaauaaaucugguagaaaaaugagaucucaaaggcucuuuucagagccaccaaaaaaaaaaaaaaaaaaaaaaaaaaaaaaaaaaaaaaaaaaaaaaaaaaaaaaaaaaaaaaaaaaaaaaaaaaaaaaaaaaaaaaaaaaaaaaaaaaaaa

SEQ ID NO: 34231 - RNA, 1809 nt, Artificial Sequence
  mRNA product Design b-4 (hSL-A100) comprising derived and/or modified sequence from LASV(LASV237-NIG-2010;Clade II)__AIT17638__GPCmut8 (opt1)
aggagagucccgcagucggcguccagcggcucugcuuguucgugugugugucguugcaggccuuauucaagcuuaccaugggccagaucaucaccuucuuccaggaggugccccacgucaucgaggaggugaugaacaucgugcugaucgcccucagccugcuggccauccucaaggggaucuacaacgucgcgaccugcggccuguucgggcugguguccuuccuccugcugugcggccgcagcugcuccacgaccuacaaggggguguacgagcuccagacccuggagcuggacauggccagccucaacaugugcaugccgcuguccugcaccaagaacaacagccaccacuacaucauggucggcaacgagacgggccuggagcucacccugaccaacaccuccaucaucaaccacaaguucugcaaccugagcgacgcccacaagaaggaccucuacgaccacgcccugauguccaucaucagcacguuccaccuguccauccccaacuucaaccaguacgaggccaugagcugcgacuucaacgggggcaagaucuccgugcaguacaaccucagccacaccuacgcgguggacgccgccaaccacugcgggaccaucgccaacggcguccugcagaccuucaugcggauggcguggggcggguccuacaucgcccuggacagcggcaagggguccugggacugcaucaugacgagcuaccaguaccucaucauccagaacaccaccugggaggaccacugccaguucucccgccccagccccaucggcuaccuggggcugcucagccagcggacccgcgacaucuacaucucccggcgccugcugggcacguucaccuggacccucagcgacuccgagggcaacgagacccccgggggcuacugccugacgcgguggaugcugaucgaggccgagcucaagugcuucgggaacaccgccguggccaagugcaacgagaagcacgacgaggaguucugcgacaugcugcgccuguucgacuucugcaagcaggcgauccggcgccucaagaccccggcccagaugagcauccagcugaucaacaaggccgugaacgcccugaucaacgaccagcucaucaugaagaaccaccuccgggacaucaugggcauccccuacugcaacuacuccaaguacugcuaccugaaccacaccgucacggggaagaccagccugccccgcugcugccugguguccaacggcagcuaccugaacgagacccacuucuccgacgacaucgagcagcaggccgacaacaugaucaccgagcuccugcagaaggaguacauggaccggcagggcaagacgccgcuggggcugguggaccucuucgucuucagcaccuccuucuaccugaucagcaucuuccugcaccucaucaagauccccacccaccgccacaucaccggcaagcccugccccaagccgcaccggcugaaccacauggggaucugcuccugcggccuguacaagcaccccggggugcccgugaaguggaagcgcugaggacuaguaauaaggaaacuguaugaaugucugugggcaggaagugaagagauccuucuguaaagguuuuuggaauuaugucugcugaauaauaaacuuuuuugaaauaauaaaucugguagaaaaaugagaucucaaaggcucuuuucagagccaccaaaaaaaaaaaaaaaaaaaaaaaaaaaaaaaaaaaaaaaaaaaaaaaaaaaaaaaaaaaaaaaaaaaaaaaaaaaaaaaaaaaaaaaaaaaaaaaaaaaaa

SEQ ID NO: 34232 - RNA, 1809 nt, Artificial Sequence
  mRNA product Design b-4 (hSL-A100) comprising derived and/or modified sequence from LASV(LASV253-NIG-2011;Clade II)__AIT17670__GPCmut8 (opt1)
aggagagucccgcagucggcguccagcggcucugcuuguucgugugugugucguugcaggccuuauucaagcuuaccaugggccagaucaucaccuucuuccaggaggugccccacgucaucgaggaggugaugaacaucgugcugaucgcccucagccugcuggccauccucaaggggaucuacaacgucgcgaccugcggccuguucgggcugguguccuuccuccugcugugcggccgcagcugcuccacgaccuacaaggggguguacgagcuccagacccuggagcuggacauggccagccucaacaugugcaugccgcuguccugcaccaagaacaacagccaccacuacaucauggucggcaacgagacgggccuggagcucacccugaccaacaccuccaucaucaaccacaaguucugcaaccugagcgacgcccacaagaagaaccucuacgaccacgcccugauguccaucaucagcacguuccaccuguccauccccaacuucaaccaguacgaggccaugagcugcgacuucaacgggggcaagaucuccgugcaguacaaccucagccacaccuacgcgguggacgccgccaaccacugcgggaccaucgccaacggcguccugcagaccuucaugcggauggcguggggcggguccuacaucgcccuggacagcggcaagggguccugggacugcaucaugacgagcuaccaguaccucaucauccagaacaccaccugggaggaccacugccaguucucccgccccagccccaucggcuaccuggggcugcucagccagcggacccgcgacaucuacaucucccggcgccugcugggcacguucaccuggacccucagcgacuccgagggcaacgagacccccgggggcuacugccugacgcgguggaugcugaucgaggccgagcucaagugcuucgggaacaccgccguggccaagugcaacgagaagcacgacgaggaguucugcgacaugcugcgccuguucgacuucugcaagcaggcgauccggcgccucaaggccccggcccagaugagcauccagcugaucaacaaggccgugaacgcccugaucaacgaccagcucaucaugaagaaccaccuccgggacaucaugggcauccccuacugcaacuacuccaaguacugcuaccugaaccacaccgucaccgggcgcacgagccugccccggugcugccugguguccaacggcagcuaccugaacgagacccacuucuccgacgacaucgagcagcaggcggacaacaugaucaccgagcuccugcagaaggaguacaucgaccgccagggcaagaccccgcuggggcugguggaccucuucgucuucagcacguccuucuaccugaucagcaucuuccugcaccucgugaagauccccacccaccggcacaucaucggcaagcccugccccaagccgcaccgccugaaccacauggggaucugcuccugcggccuguacaagcaccccggggugcccgucaaguggaagcggugaggacuaguaauaaggaaacuguaugaaugucugugggcaggaagugaagagauccuucuguaaagguuuuuggaauuaugucugcugaauaauaaacuuuuuugaaauaauaaaucugguagaaaaaugagaucucaaaggcucuuuucagagccaccaaaaaaaaaaaaaaaaaaaaaaaaaaaaaaaaaaaaaaaaaaaaaaaaaaaaaaaaaaaaaaaaaaaaaaaaaaaaaaaaaaaaaaaaaaaaaaaaaaaaa

SEQ ID NO: 34233 - RNA, 1809 nt, Artificial Sequence
  mRNA product Design b-4 (hSL-A100) comprising derived and/or modified sequence from LASV(LASV254-NIG-2011;Clade II)__AIT17674__GPCmut8 (opt1)
aggagagucccgcagucggcguccagcggcucugcuuguucgugugugugucguugcaggccuuauucaagcuuaccaugggccagaucaucaccuucuuccaggaggugccccacgucaucgaggaggugaugaacaucgugcugaucgcccucagccugcuggccauccucaaggggaucuacaacgucgcgaccugcggccuguucgggcugguguccuuccuccugcugugcggccgcagcugcuccacgaccuacaaggggguguacgagcuccagacccuggagcuggacaugaccaaccucaacaugugcaugccgcugagcugcacgaagaacaacucccaccacuacaucauggucggcaacgagaccggccuggagcucacccugaccaacacgagcaucaucaaccacaaguucugcaaccuguccgacgcccacaagaagaaccucuacaaccacgcccugaugagcaucaucuccaccuuccaccugagcauccccaacuucaaccaguacgaggccauguccugcgacuucaacgggggcaagaucagcgugcaguacaaccucucccacagcuacgccguggacgcggccaaccacugcgggaccaucgccaacggcguccugcagaccuucaugcggauggccuggggcggguccuacaucgcgcuggacagcggcaaggggaacugggacugcaucaugacguccuaccaguaccucaucauccagaacaccaccugggaggaccacugccaguucagccgccccucccccaucggcuaccuggggcugcucagccagcggacccgcgacaucuacaucagccggcgccugcugggcacguucaccuggacccucuccgacagcgagggcaacgagacccccgggggcuacugccugacgcgguggaugcugaucgaggccgagcucaagugcuucgggaacaccgccguggccaagugcaacgagaagcacgacgaggaguucugcgacaugcugcgccuguucgacuucugcaagcaggccauccggcgccucaagaccccggcgcaggccaacauccagcugaucaacaaggccgugaacgcccugaucaacgaccagcucaucaugaagaaccaccuccgggacaucaugggcauccccuacugcaacuacuccaaguacugcuaccugaaccacaccgucacggggaagaccagccugccccgcugcugccugguguccaacggcagcuaccugaacgagacccacuucuccgacgacaucgagcagcaggccgacaacaugaucaccgagcuccugcagaaggaguacauggaccggcagggcaagacgccgcuggggcugguggaccucuucgucuucagcaccuccuucuaccugaucagcaucuuccugcaccucgugaagauccccacccaccgccacgugaucggcaagcccugccccaagccgcaccggcugaaccacauggggaucugcuccugcggccuguacaagcaccccgggguccccgugaaguggaagcgcugaggacuaguaauaaggaaacuguaugaaugucugugggcaggaagugaagagauccuucuguaaagguuuuuggaauuaugucugcugaauaauaaacuuuuuugaaauaauaaaucugguagaaaaaugagaucucaaaggcucuuuucagagccaccaaaaaaaaaaaaaaaaaaaaaaaaaaaaaaaaaaaaaaaaaaaaaaaaaaaaaaaaaaaaaaaaaaaaaaaaaaaaaaaaaaaaaaaaaaaaaaaaaaaaa

SEQ ID NO: 34234 - RNA, 1809 nt, Artificial Sequence
  mRNA product Design b-4 (hSL-A100) comprising derived and/or modified sequence from LASV(Nig08-A19;Clade III)__ADU56618__GPCmut8 (opt1)
aggagagucccgcagucggcguccagcggcucugcuuguucgugugugugucguugcaggccuuauucaagcuuaccaugggccagaucgugaccuucuuccaggaggucccccacgugaucgaggaggugaugaacaucguccugaucgcccucagcauccuggccauccugaaggggcucuacaacaucgcgaccugcggccugaucgggcuggugacguuccuccugcuguccggccgcagcugcuccaugaccuacaaggggguguacgagcuccagacccuggagcugaacaugaacacccucaacaugugcaugccgcugagcugcacgaagaacaacucccaccacuacaucauggucggcaacgagaccggccuggagcucacccugaccaacacgagccugcuccaccacaaguucugcaaccuguccgacgcccacaagaagaaccuguacgaccacacccucaugagcaucaucuccaccuuccaccugagcauccccaacuucaaccaguacgaggccauguccugcgacuucaacgggggcaagaucaccgugcaguacaaccugagccacuccuacgccaucgacgccgcgaaccacugcgggacgguggccaacggcguccuccagaccuucaugcggauggccuggggcgggagcuacaucgcccuggacuccggccgcgggaagugggacugcaucaugaccagcuaccaguaccugaucauccagaacaccacgugggaggaccacugccaguucucccggcccagccccaucggcuaccucgggcugcugucccagcgcacccgggacaucuacaucagccgccggcuccugggcaccuucaccuggacgcugagcgacuccgagggcaacgagacccccgggggcuacugccucacccgcuggaugcugaucgaggcggagcugaagugcuucgggaacaccgccguggccaagugcaacgagaagcacgacgaggaguucugcgacaugcuccggcuguucgacuucugcaagcaggccauccgccggcugaaggccccggcgcagaugagcauccagcucaucaacaaggccgugaacgcccugaucaacgaccagcugaucaugaagaaccaccuccgcgacaucaugggcauccccuacugcaacuacuccaaguacugcuaccugaaccacacgagcaccgggcggaccucccugccccgcugcugccucgucagcaacggcuccuaccugaacgagacccacuucagcgacgacaucgagcagcaggccgacaacaugaucacggagaugcugcagaaggaguaccuggaccggcagggcaagaccccgcucgggcugguggaccuguucguguucuccaccagcuucuaccucaucuccaucuuccugcaccuggucaagauccccacccaccgccacaucgugggcaagcccugccccaagccgcaccggcucaaccacauggggaucugcagcugcggccuguacaagcagcccggggugcccguccgcuggaagcggugaggacuaguaauaaggaaacuguaugaaugucugugggcaggaagugaagagauccuucuguaaagguuuuuggaauuaugucugcugaauaauaaacuuuuuugaaauaauaaaucugguagaaaaaugagaucucaaaggcucuuuucagagccaccaaaaaaaaaaaaaaaaaaaaaaaaaaaaaaaaaaaaaaaaaaaaaaaaaaaaaaaaaaaaaaaaaaaaaaaaaaaaaaaaaaaaaaaaaaaaaaaaaaaaa

SEQ ID NO: 34235 - RNA, 1812 nt, Artificial Sequence
  mRNA product Design b-4 (hSL-A100) comprising derived and/or modified sequence from LASV(G1180-SLE-2010;Clade IV)__AIT17168__GPCmut8 (opt1)
aggagagucccgcagucggcguccagcggcucugcuuguucgugugugugucguugcaggccuuauucaagcuuaccaugggccagaucgugaccuucuuccaggaggucccccacgugaucgaggaggugaugaacaucguccugaucgcccucagcauccuggccgugcugaaggggcucuacaacuucgcgaccugcggccugguggggcugcucacguuccugcugcucugcggccgcuccugcaccgccagccgguacaagggggucuacgagcugcagacccuggagcucaacauggagacccugaacaugugcaugccgcuguccugcacgaagaacaacagccaccacuacaucauggugggcaacgagaccggccucgagcugacccugaccaacacguccaucaucaaccacaaguucugcaaccucagcgacgcccacaagaagaaccuguacgaccacgcccugauguccaucaucagcaccuuccaccucuccauccccaacuucaaccaguacgaggccaugagcugcgacuucaacgggggcaagaucuccgugcaguacaaccugagccacuccuacgcgggggacgccgccaaccacugcggcaccgucgccaacggggugcugcagaccuucaugcgcauggcguggggcggcagcuacaucgcccucgacuccgggcacggcagcugggacugcaucaugacguccuaccaguaccugaucauccagaacaccaccugggaggaccacugccaguucagccggcccucccccaucggguaccugggccuccugagccagcgcacccgggacaucuacaucagccgccggcugcucggcacguucaccuggacccuguccgacagcgaggggaaggacaccccgggcggguacugccugacgcgcuggaugcucaucgaggccgagcugaagugcuucggcaacaccgccguggccaagugcaacgagaagcacgacgaggaguucugcgacaugcugcggcuguucgacuucugcaagcaggcgauccagcgccugaaggcccccgcccagauguccauccagcugaucaacaaggccgucaacgcccucaucaacgaccagcugaucaugaagaaccaccuccgggacaucauggggauccccuacugcaacuacagcaaguacugcuaccucaaccacaccaccacgggcaagaccucccugcccaagugcugccuggugagcaacggcuccuaccucaacgagacccacuucagcgacgacaucgagcagcaggcggacaacaugaucaccgagaugcugcagaaggaguacauggagcgccaggggaagacgccgcugggccugguggaccucuucgucuucuccaccagcuucuaccugaucuccaucuuccugcaccucgugaagauccccacccaccggcacaucgugggcaagagcugccccaagccccaccgccugaaccacauggggaucugcuccugcgggcuguacaagcagccgggcguccccgugaaguggaagcggugaggacuaguaauaaggaaacuguaugaaugucugugggcaggaagugaagagauccuucuguaaagguuuuuggaauuaugucugcugaauaauaaacuuuuuugaaauaauaaaucugguagaaaaaugagaucucaaaggcucuuuucagagccaccaaaaaaaaaaaaaaaaaaaaaaaaaaaaaaaaaaaaaaaaaaaaaaaaaaaaaaaaaaaaaaaaaaaaaaaaaaaaaaaaaaaaaaaaaaaaaaaaaaaaa

SEQ ID NO: 34236 - RNA, 1812 nt, Artificial Sequence
  mRNA product Design b-4 (hSL-A100) comprising derived and/or modified sequence from LASV(G1442-SLE-2011;Clade IV)__AIT17180__GPCmut8 (opt1)
aggagagucccgcagucggcguccagcggcucugcuuguucgugugugugucguugcaggccuuauucaagcuuaccaugggccagaucgugaccuucuuccaggaggucccccacgugaucgaggaggugaugaacaucguccugaucgcccucagcauccuggccgugcugaaggggcucuacaacguggcgaccugcggccugaucgggcuggucacguuccuccugcugugcggccgcuccugcaccaccacccucuacaaggggguguacgagcugcagacgcuggagcucaacauggagacccugaacaugugcaugccgcugagcugcaccaagaacaacucccaccacuacauccgggugggcaacgagaccggccucgagcugacgcugaccaacaccagcaucaucaaccacaaguucugcaaccucuccgacgcccacaagaagaaccuguacgaccacgcccugaugagcaucaucuccaccuuccaccucagcauccccaacuucaaccaguacgaggccauguccugcgacuucaacgggggcaagaucagcguccaguacaaccugucccacagcuacgccggggacgcggccaaccacugcggcacgguggccaacggggugcugcagaccuucaugcgcauggccuggggcggcuccuacaucgcgcucgacagcgggcggggcaacugggacugcaucaugaccuccuaccaguaccugaucauccagaacaccacgugggacgaccacugccaguucagccgccccucccccaucggguaccugggccuccugagccagcggacccgcgacgucuacaucucccggcgccugcucggcaccuucaccuggacgcugagcgacagcgaggggaaggacaccccgggcggguacugccugacccgguggaugcucaucgaggccgagcugaagugcuucggcaacaccgccguggccaagugcaacgagaagcacgacgaggaguucugcgacaugcugcgccucuucgacuucugcaagcaggccauccagcggcugaaggcgcccgcccagauguccauccagcugaucaacaaggccgugaacgcccucaucaacgaccagcugaucaugaagaaccaccuccgcgacaucauggggauccccuacugcaacuacagcaaguacugcuaccugaacaacacggccaccggcaagaccucccugcccaagugcugccugaucagcaacggcuccuaccucaacgagacccacuucagcgacgacaucgagcaggaggcggacaacaugaucacggagaugcugcagaaggaguacauggagcggcaggggaagaccccgcugggccuggucgaccucuucguguucuccaccagcuucuaccugaucuccaucuuccugcaccucgugaagauccccacccaccgccacaucgucggcaagagcugccccaagccccaccggcugaaccacauggggaucugcuccugcgggcuguacaagcagccgggcgugcccgugcgcuggaagcggugaggacuaguaauaaggaaacuguaugaaugucugugggcaggaagugaagagauccuucuguaaagguuuuuggaauuaugucugcugaauaauaaacuuuuuugaaauaauaaaucugguagaaaaaugagaucucaaaggcucuuuucagagccaccaaaaaaaaaaaaaaaaaaaaaaaaaaaaaaaaaaaaaaaaaaaaaaaaaaaaaaaaaaaaaaaaaaaaaaaaaaaaaaaaaaaaaaaaaaaaaaaaaaaaa

SEQ ID NO: 34237 - RNA, 1812 nt, Artificial Sequence
  mRNA product Design b-4 (hSL-A100) comprising derived and/or modified sequence from LASV(G3010-SLE-2013;Clade IV)__AIT17344__GPCmut8 (opt1)
aggagagucccgcagucggcguccagcggcucugcuuguucgugugugugucguugcaggccuuauucaagcuuaccaugggccagaucgugaccuucuuccaggaggucccccacgugaucgaggaggugaugaacaucguccugaucgcccucagcauccuggccgugcugaaggggcucuacaacuucgcgaccugcggccugguggggcuggucacguuccuccugcugugcggccgcuccugcaccaccagccucuacaaggggguguacgagcugcagacccuggagcucaacauggagacgcugaacaugugcaugccgcuguccugcaccaagaacaacagccaccacuacaucauggugggcaacgagaccggccucgagcugacccugacgaacaccuccaucaucaaccacaaguucugcaaccucagcgacgcccacaagaagaaccuguacaaccacgcccugauguccaucaucagcaccuuccaccucuccauccccaacuucaaccaguacgaggccaugagcugcgacuucaacgggggcaagaucuccguccaguacaaccugagccacuccuacgccggggacgcggccagccacugcggcaccguggccaacggggugcugcagacguucaugcggauggccuggggcggcuccuacaucgcgcucgacagcggguacggcaagugggacugcaucaugaccuccuaccaguaccugaucauccagaacaccaccugggaggaccacugccaguucagccgccccucccccaucggguaccugggccuccugagccagcggacgcgcgacaucuacaucagccggcgccugcucggcaccuucaccuggacccuguccgacagcgaggggaaggacacgccgggcggguacugccugacccgguggaugcucaucgaggccgagcugaagugcuucggcaacaccgccgucgccaagugcaacgagaagcacgacgaggaguucugcgacaugcugcgccucuucgacuucugcaagcaggccauccagcggcugaagacccccgcgcagauguccauccagcugaucaacaaggccgugaacgcccucaucaacgaccagcugaucaugaagaaccaccuccgcgacaucauggggauccccuacugcaacuacagcaaguacugcuaccugaaccacacgaccaccggcaagaccucccugcccaagugcugccuggugagcaacggcuccuaccucaacgagacgcacuucagcgacgacaucgagcagcaggccgacaacaugaucaccgagaugcugcagaaggaguacauggagcggcaggggaagaccccgcugggccuggucgaccucuucguguucuccaccagcuucuaccugaucuccaucuuccugcaccucgugaagauccccacgcaccgccacaucgucggcaagagcugccccaagccccaccggcugaaccacauggggaucugcuccugcgggcuguacaagcagccgggcgugcccgugcgcuggaagcggugaggacuaguaauaaggaaacuguaugaaugucugugggcaggaagugaagagauccuucuguaaagguuuuuggaauuaugucugcugaauaauaaacuuuuuugaaauaauaaaucugguagaaaaaugagaucucaaaggcucuuuucagagccaccaaaaaaaaaaaaaaaaaaaaaaaaaaaaaaaaaaaaaaaaaaaaaaaaaaaaaaaaaaaaaaaaaaaaaaaaaaaaaaaaaaaaaaaaaaaaaaaaaaaaa

SEQ ID NO: 34238 - RNA, 1812 nt, Artificial Sequence
  mRNA product Design b-4 (hSL-A100) comprising derived and/or modified sequence from LASV(G502-SLE-2009;Clade IV)__AIT17126__GPCmut8 (opt1)
aggagagucccgcagucggcguccagcggcucugcuuguucgugugugugucguugcaggccuuauucaagcuuaccaugggccagaucgugaccuucuuccaggaggucccccacgugaucgaggaggugaugaacaucguccugaucgcccucagcauccuggccgugcugaaggggcucuacaacuucgcgaccugcggccugguggggcugcucacguuccugcugcucugcggccgcuccugcaccaccgggcuguacaagggcgucuacgagcugcagacccucgagcugaacauggagacgcugaacaugugcaugccgcucagcugcaccaagaacaacucccaccacuacaucauggugggcaacgagaccgggcuggagcugacccucacgaacaccagcaucaucaaccacaaguucugcaaccuguccgacgcccacaagaagaaccuguacgaccacgcccucaugagcaucaucuccaccuuccaccugagcauccccaacuucaaccaguacgaggccauguccugcgacuucaacggcgggaagaucagcgugcaguacaaccugucccacagcuacgccggcgacgcggccgaccacugcgggaccgucgccaacggcgugcuccagacguucaugcggauggccuggggcggguccuacaucgcgcuggacagcggccgcgggcggugggacugcaucaugaccuccuaccaguaccugaucauccagaacaccaccugggaggaccacugccaguucagccgccccucccccaucggcuaccucggccugcugagccagcggacgcgcgacaucuacaucucccggcgccuccuggggaccuucaccuggacccugagcgacagcgagggcaaggacacgcccgggggcuacugccucacccgguggaugcugaucgaggccgagcugaagugcuucgggaacaccgccguggccaagugcaacgagaagcacgacgaggaguucugcgacaugcuccgccuguucgacuucugcaagcaggccauccagcggcugaaggcgccggcccagauguccauccagcucaucaacaaggccgucaacgcccugaucaacgaccagcuggugaugaagaaccaccuccgcgacaucaugggcauccccuacugcaacuacagccgguacugcuaccugaaccacaccacgaccggccgcaccucccugcccaagugcugccucgugagcaacggguccuaccugaacgagacccacuucagcgacgacaucgagcagcaggccgacaacaugaucacggagaugcugcagaaggaguacauggagcggcagggcaagaccccgcuggggcucgucgaccuguucguguucuccaccagcuucuaccugaucuccaucuuccuccaccuggugaagauccccacccaccgccacaucgucggcaagagcugccccaagccccaccggcugaaccacauggggaucugcuccugcggccucuacaagcagccgggcgugcccgugaaguggaagcgcugaggacuaguaauaaggaaacuguaugaaugucugugggcaggaagugaagagauccuucuguaaagguuuuuggaauuaugucugcugaauaauaaacuuuuuugaaauaauaaaucugguagaaaaaugagaucucaaaggcucuuuucagagccaccaaaaaaaaaaaaaaaaaaaaaaaaaaaaaaaaaaaaaaaaaaaaaaaaaaaaaaaaaaaaaaaaaaaaaaaaaaaaaaaaaaaaaaaaaaaaaaaaaaaaa

SEQ ID NO: 34239 - RNA, 1812 nt, Artificial Sequence
  mRNA product Design b-4 (hSL-A100) comprising derived and/or modified sequence from LASV(G733-SLE-2010;Clade IV)__AIT17154__GPCmut8 (opt1)
aggagagucccgcagucggcguccagcggcucugcuuguucgugugugugucguugcaggccuuauucaagcuuaccaugggccagaucgugaccuucuuccaggaggucccccacgugaucgaggaggugaugaacaucguccugaucgcccucagcauccuggccgugcugaaggggcucuacaacuucgcgaccugcggcaucguggggcuggucuccuuccugcuccugugcggccgcagcugcacgaccucccuguacaaggggguguacgagcuccagacccuggagcugaacauggagacccucaacaugugcaugccgcugagcugcacgaagaacaacucccaccacuacaucauggugggcaacgagaccggccuggagcucacccugaccaacacgagcaucaucaaccacaaguucugcaaccuguccgacgcccacaagaagaaccucuacgaccacgcccugaugagcaucaucuccaccuuccaccugagcauccccaacuucaaccaguacgaggccauguccugcgacuucaacgggggcaagaucagcguccaguacaaccucucccacagcuacgccggggacgcggccaaccacugcggcaccaucgccaacggggugcugcagaccuucaugcggauggccuggggcggcuccuacaucgcgcuggacagcgggcgcgaccggugggacugcaucaugacguccuaccaguaccucaucauccagaacaccaccugggaggaccacugccaguucagccgccccucccccaucggcuaccuggggcugcucagccagcggacccgcgacaucuacaucagccggcgccugcugggcacguucaccuggacccucuccgacagcgagggcaaggacacccccgggggcuacugccugacgcgguggaugcugaucgaggccgagcucaagugcuucgggaacaccgccguggccaagugcaacgagaagcacgacgaggaguucugcgacaugcugcgccuguucgacuucugcaagcaggccauccagcggcucaaggcgccggcccagauguccauccagcugaucaacaaggccgucaacgcccugaucaacgaccagcucaucaugaagaaccaccuccgcgacaucaugggcauccccuacugcaacuacagcaaguacugcuaccugaaccacaccaccacggggaagaccucccugcccaagugcugccuggugagcaacggcuccuaccugaacgagacccacuucagcgacgacaucgagcagcaggccgacaacaugaucaccgagaugcuccagaaggaguacauggagcggcagggcaagacgccgcuggggcugguggaccuguucgucuucuccaccagcuucuaccucaucuccaucuuccugcaccuggugaagauccccacccaccgccacguggucggcaagagcugccccaagccccaccggcucaaccacauggggaucugcuccugcggccuguacgggcagccgggcgugcccgugaaguggaagcgcugaggacuaguaauaaggaaacuguaugaaugucugugggcaggaagugaagagauccuucuguaaagguuuuuggaauuaugucugcugaauaauaaacuuuuuugaaauaauaaaucugguagaaaaaugagaucucaaaggcucuuuucagagccaccaaaaaaaaaaaaaaaaaaaaaaaaaaaaaaaaaaaaaaaaaaaaaaaaaaaaaaaaaaaaaaaaaaaaaaaaaaaaaaaaaaaaaaaaaaaaaaaaaaaaa

SEQ ID NO: 34240 - RNA, 1812 nt, Artificial Sequence
  mRNA product Design b-4 (hSL-A100) comprising derived and/or modified sequence from MOPV/LASV reassortant(IGS-1;Clade IV)__AFY05576__GPCmut8 (opt1)
aggagagucccgcagucggcguccagcggcucugcuuguucgugugugugucguugcaggccuuauucaagcuuaccaugggccagaucgugaccuucuuccaggaggucccccacgugaucgaggaggugaugaacaucguccugaucgcccucagcgugcuggccgugcugaaggggcucuacaacuucgcgaccugcggccuggucgggcuggugacguuccuccugcugugcggccgcuccugcaccaccagccucuacaaggggguguacgagcugcagacccuggagcucaacauggagacgcugaacaugugcaugccgcuguccugcaccaagaacaacagccaccacuacaucauggucggcaacgagaccggccucgagcugacccugacgaacaccuccaucaucaaccacaaguucugcaaccucagcgacgcccacaagaagaaccuguacgaccacgcccugauguccaucaucagcaccuuccaccucuccauccccaacuucaaccaguacgaggccaugagcugcgacuucaacgggggcaagaucuccgugcaguacaaccugagccacuccuacgccggggacgcggccaaccacugcggcaccguggccaacgggguccugcagacguucaugcggauggccuggggcggcagcuacaucgcgcucgacuccgggcgcggcaacugggacugcaucaugaccagcuaccaguaccugaucauccagaacaccaccugggaggaccacugccaguucucccggcccagccccaucggguaccugggccuccugucccagcgcacgcgggacaucuacaucagccgccggcugcucggcaccuucaccuggacccugagcgacuccgagggggaggacacgccgggcggguacugccugacccgcuggaugcucaucgaggccgagcugaagugcuucggcaacaccgccguggccaagugcaacgagaagcacgacgaggaguucugcgacaugcugcggcuguucgacuucugcaagcaggccauccagcgccugaaggcgcccgcccagaugagcauccagcugaucaacaaggccgugaacgcccucaucaacgaccagcugaucaugaagaaccaccuccgggacaucauggggauccccuacugcaacuacuccaaguacugcuaccucaaccacaccacgaccggccgcaccagccugcccaagugcugccuggucuccaacggcagcuaccucaacgagacccacuucuccgacgacaucgagcagcaggccgacaacaugaucacggagaugcugcagaaggaguacauggagcggcaggggaagaccccgcugggccugguggaccucuucguguucagcaccuccuucuaccugaucagcaucuuccugcaccucgucaagauccccacccaccgccacaucguggggaaguccugccccaagccccaccggcugaaccacaugggcaucugcagcugcgggcuguacaagcagccgggcgugcccgucaaguggaagcgcugaggacuaguaauaaggaaacuguaugaaugucugugggcaggaagugaagagauccuucuguaaagguuuuuggaauuaugucugcugaauaauaaacuuuuuugaaauaauaaaucugguagaaaaaugagaucucaaaggcucuuuucagagccaccaaaaaaaaaaaaaaaaaaaaaaaaaaaaaaaaaaaaaaaaaaaaaaaaaaaaaaaaaaaaaaaaaaaaaaaaaaaaaaaaaaaaaaaaaaaaaaaaaaaaa

SEQ ID NO: 34241 - RNA, 1812 nt, Artificial Sequence
  mRNA product Design b-4 (hSL-A100) comprising derived and/or modified sequence from LASV(LM765-SLE-2012;Clade IV)__AIT17814__GPCmut8 (opt1)
aggagagucccgcagucggcguccagcggcucugcuuguucgugugugugucguugcaggccuuauucaagcuuaccaugggccagaucgugaccuucuuccaggaggucccccacgugaucgaggaggugaugaacaucguccugaucgcccucagcauccuggccgugcugaaggggcucuacaacuucgcgaccugcggccugguggggcuggucacguuccuccugcugugcggccgcuccugcaccaccagccucuacaaggggguguacgagcugcagacccuggagcucaacauggagacgcugaacaugugcaugccgcuguccugcaccaagaacaacagccaccacuacaucauggugggcaacgagaccggccucgagcugacccugacgaacaccuccaucaucgaccacaaguucugcaaccucagcgacgcccaccggaagaaccuguacgaccacgcccugauguccaucaucagcaccuuccaccucuccauccccaacuucaaccaguacgaggccaugagcugcgacuucaacgggggcaagaucuccguccaguacaaccugagccacuccuacgccaaggacgcggccgaccacugcgggaccguggccaacggcgugcugcagacguucaugcgcauggccuggggcgggagcuacaucgcgcucgacuccggccgggggcgcugggacugcaucaugaccagcuaccaguaccugaucauccagaacaccaccugggaggaccacugccaguucucccggcccagccccaucggcuaccuggggcuccugucccagcgcacgcgggacaucuacaucagccgccggcugcucggcaccuucaccuggacccugagcgacuccgagggcaaggacacgcccgggggcuacugccugacccgcuggaugcucaucgaggccgagcugaagugcuucgggaacaccgccgucgccaagugcaacgagaagcacgacgaggaguucugcgacaugcugcggcuguucgacuucugcaagcaggccauccagcgccugaaggcgccggcccagaugagcauccagcugaucaacaaggccgugaacgcccucaucaacgaccagcugaucaugaagaaccaccuccgggacaucaugggcauccccuacugcaacuacuccaaguacugcuaccucaaccacaccacgaccgggaagaccagccugcccaagugcugccugguguccaacggcagcuaccucaacgagacccacuucuccgacgacaucgagcagcaggccgacaacaugaucacggagaugcugcagaaggaguacauggagcgccagggcaagaccccgcuggggcuggucgaccucuucguguucagcaccuccuucuaccugaucagcaucuuccugcaccucgugaagauccccacccaccggcacaucgucggcaagcccugccccaagccgcaccgccugaaccacauggggaucugcuccugcggccuguacaagcagcccggggugcccgugaaguggaagcggugaggacuaguaauaaggaaacuguaugaaugucugugggcaggaagugaagagauccuucuguaaagguuuuuggaauuaugucugcugaauaauaaacuuuuuugaaauaauaaaucugguagaaaaaugagaucucaaaggcucuuuucagagccaccaaaaaaaaaaaaaaaaaaaaaaaaaaaaaaaaaaaaaaaaaaaaaaaaaaaaaaaaaaaaaaaaaaaaaaaaaaaaaaaaaaaaaaaaaaaaaaaaaaaaa

SEQ ID NO: 34242 - RNA, 1812 nt, Artificial Sequence
  mRNA product Design b-4 (hSL-A100) comprising derived and/or modified sequence from LASV(LM776-SLE-2012;Clade IV)__AIT17824__GPCmut8 (opt1)
aggagagucccgcagucggcguccagcggcucugcuuguucgugugugugucguugcaggccuuauucaagcuuaccaugggccagaucgugaccuucuuccaggaggucccccacgugaucgaggaggugaugaacaucguccugaucgcccucagcauccuggccgugcugaaggggcucuacaacuucgcgaccugcggccugguggggcuggucacguuccuccugcugugcggccgcuccugcaccaccagcguguacaaggggguguacgagcuccagacccuggagcugaacauggagacgcucaacaugugcaugccgcuguccugcaccaagaacaacagccaccacuacaucauggucggcaacgagaccggccuggagcucacccugacgaacaccuccaucaucaaccacaaguucugcaaccugagcgacgcccacaagaagaaccucuacgaccacgcccugauguccaucaucagcaccuuccaccuguccauccccaacuucaaccaguacgaggccaugagcugcgacuucaacgggggcaagaucuccgugcaguacaaccucagccacuccuacgccggggacgcggccaaccacugcggcaccguggccaacgggguccugcagacguucaugcggauggccuggggcggcagcuacaucgcgcuggacuccgggcacggcaagugggacugcaucaugaccagcuaccaguaccucaucauccagaacaccaccugggaggaccacugccaguucucccgccccagccccaucggguaccugggccugcucucccagcggacgcgcgacaucuacaucagccggcgccugcugggcaccuucaccuggacccucagcgacuccgaggggaaggacacgccgggcggguacugccugacccgguggaugcugaucgaggccgagcucaagugcuucggcaacaccgccguggccaagugcaacgagaagcacgacgaggaguucugcgacaugcugcgccuguucgacuucugcaagcaggccauccagcggcucaaggcgcccgcccagaugagcauccagcugaucaacaaggccgugaacgcccugaucaacgaccagcucaucaugaagaaccaccuccgcgacaucauggggauccccuacugcaacuacuccaaguacugcuaccugaaccacaccacgaccggcaagaccagccugcccaagugcugccuggucuccaacggcagcuaccugaacgagacccacuucuccgacgacaucgagcagcaggccgacaacaugaucacggagaugcuccagaaggaguacauggagcggcaggggaagaccccgcugggccugguggaccuguucguguucagcaccuccuucuaccucaucagcaucuuccugcaccuggucaagauccccacccaccgccacaucguggggaaguccugccccaagccccaccggcucaaccacaugggcaucugcagcugcgggcuguacaagcagccgggcgugcccguccgcuggaagcggugaggacuaguaauaaggaaacuguaugaaugucugugggcaggaagugaagagauccuucuguaaagguuuuuggaauuaugucugcugaauaauaaacuuuuuugaaauaauaaaucugguagaaaaaugagaucucaaaggcucuuuucagagccaccaaaaaaaaaaaaaaaaaaaaaaaaaaaaaaaaaaaaaaaaaaaaaaaaaaaaaaaaaaaaaaaaaaaaaaaaaaaaaaaaaaaaaaaaaaaaaaaaaaaaa

SEQ ID NO: 34243 - RNA, 1812 nt, Artificial Sequence
  mRNA product Design b-4 (hSL-A100) comprising derived and/or modified sequence from LASV(Mad39;Clade IV)__ANH09722__GPCmut8 (opt1)
aggagagucccgcagucggcguccagcggcucugcuuguucgugugugugucguugcaggccuuauucaagcuuaccaugggccagaucgugaccuucuuccaggaggucccccacgugaucgaggaggugaugaacaucguccugaucgcccucagcauccuggccgugcugaaggggcucuacaacguggcgaccugcggccugaucgggcuggucacguuccuccugcugugcggccgcuccugcaccaccacccucuacaaggggguguacgagcugcaggcccuggagcucaacauggagacgcugaacaugugcaugccgcugagcugcaccaagaacaacucccaccacuacauccgggugggcaacgagaccggccucgagcugacccugacgaacaccagccucaucaaccacaaguucugcaaccuguccgacgcccacaagaagaaccuguacgaccacgcccucaugagcaucaucuccaccuuccaccugagcauccccaacuucaaccaguacgaggccauguccugcgacuucaacgacgggaagaucagcguccaguacaaccugucccacaccuacgcgggcgacacggccaaccacugcgggaccguggccaacggcgugcuccagaccuucaugcgcauggccuggggcgggagcuacaucgcgcuggacuccggccgcgggggcugggacugcaucaugaccagcuaccaguaccugaucauccagaacacgaccugggaggaccacugccaguucucccggcccagccccaucggguaccucggccugcugucccagcggacccgcgacaucuacaucagccggcgccuccugggcaccuucacguggacccuguccgacagcgaggggaaggacaccccgggcggguacugccucacccgguggaugcugaucgaggccgagcugaagugcuucggcaacacggccgucgccaagugcaacgagaagcacgacgaggaguucugcgacaugcuccgccuguucgacuucugcaagcaggccauccagcggcugaaggcgcccgcccagaugagcauccagcucaucaacaaggccgugaacgcccugaucaacgaccagcugaucaugaagaaccaccuccgcgacaucauggggauccccuacugcaacuacuccaaguacugcuaccugaaccacaccgugaccggcaagaccagccugcccaagugcugccucgucuccaacggcagcuaccugaacgagacgcacuucuccgacgacaucgagcagcaggccgacaacaugaucaccgagaugcugcagaaggaguacauggagcggcaggggaagaccccgcugggccucguggaccuguucguguucagcaccuccuucuaccugaucagcaucuuccuccaccuggucaagauccccacgcaccgccacgugguggggaagcccugccccaagccgcaccggcugaaccacaugggcaucugcuccugcggguucuacaagcagcccggcguccccgugcgcuggaagcggugaggacuaguaauaaggaaacuguaugaaugucugugggcaggaagugaagagauccuucuguaaagguuuuuggaauuaugucugcugaauaauaaacuuuuuugaaauaauaaaucugguagaaaaaugagaucucaaaggcucuuuucagagccaccaaaaaaaaaaaaaaaaaaaaaaaaaaaaaaaaaaaaaaaaaaaaaaaaaaaaaaaaaaaaaaaaaaaaaaaaaaaaaaaaaaaaaaaaaaaaaaaaaaaaa

SEQ ID NO: 34244 - RNA, 1812 nt, Artificial Sequence
  mRNA product Design b-4 (hSL-A100) comprising derived and/or modified sequence from LASV(Z0947-SLE-2011;Clade IV)__AIT17840__GPCmut8 (opt1)
aggagagucccgcagucggcguccagcggcucugcuuguucgugugugugucguugcaggccuuauucaagcuuaccaugggccagaucgugaccuucuuccaggaggucccccacgugaucgaggaggugaugaacaucguccugaucgcccucagcauccuggccgugcugaaggggcucuacaacuucgcgaccugcggccugguggggcuggucacguuccuccugcugugcggccgcuccugcaccaucagccucuacaaggggguguacgagcugcagacccuggagcucaacauggagacccugaacaugugcaugccgcuguccugcacgaagaacaacagccaccacuacaucauggugggcaacgagaccggccucgagcugacccugaccaacacguccaucaucaaccacaaguucugcaaccucagcgacgcccacaagaagaaccuguacgaccacgcccugauguccaucaucagcaccuuccaccucuccauccccaacuucaaccaguacgaggccaugagcugcgacuucaacgggggcaagaucuccguccaguacaaccugagccacuccuacgccggggacgcggccaaccacugcggcaccguggccaacggggugcugcagaccuucaugcggauggccuggggcggcagcuacaucgcgcucgacuccgggcgcgaccggugggacugcaucaugacgagcuaccaguaccugaucauccagaacaccaccugggaggaccacugccaguucucccgccccagccccaucggcuaccuggggcuccugucccagcggacccgcgacaucuacaucagccggcgccugcucggcacguucaccuggacccugagcgacuccgagggcaaggacacccccgggggcuacugccugacgcgguggaugcucaucgaggccgagcugaagugcuucgggaacaccgccgucgccaagugcaacgagaagcacgacgaggaguucugcgacaugcugcgccucuucgacuucugcaagcaggccauccagcggcugaaggcgccggcccagaugagcauccagcugaucaacaaggccgugaacgcccucaucaacgaccagcugaucaugaagaaccaccuccgcgacaucaugggcauccccuacugcaacuacuccaaguacugcuaccugaaccacaccaccacggggaagaccagccugcccaagugcugccugguguccaacggcagcuaccucaacgagacccacuucuccgacgacaucgagcagcaggccgacaacaugaucaccgagaugcugcagaaggaguacauggagcggcagggcaagacgccgcuggggcuggucgaccucuucguguucagcaccuccuucuaccugaucagcaucuuccugcaccucgugaagauccccacccaccgccacaucgucggcaagcccugccccaagccgcaccggcugaaccacauggggaucugcuccugcggccuguacaagcagcccggggugcccgugaaguggaagcgcugaggacuaguaauaaggaaacuguaugaaugucugugggcaggaagugaagagauccuucuguaaagguuuuuggaauuaugucugcugaauaauaaacuuuuuugaaauaauaaaucugguagaaaaaugagaucucaaaggcucuuuucagagccaccaaaaaaaaaaaaaaaaaaaaaaaaaaaaaaaaaaaaaaaaaaaaaaaaaaaaaaaaaaaaaaaaaaaaaaaaaaaaaaaaaaaaaaaaaaaaaaaaaaaaa

SEQ ID NO: 34245 - RNA, 1812 nt, Artificial Sequence
  mRNA product Design b-4 (hSL-A100) comprising derived and/or modified sequence from LASV(Josiah;Clade IV)__NP_694870__GPCmut8 (opt4)
aggagagucccgcagucggcguccagcggcucugcuuguucgugugugugucguugcaggccuuauucaagcuuaccaugggccagaucgugaccuucuuccaggaggugccccacgugaucgaggaggugaugaacaucgugcugaucgcccugagcgugcuggccgugcugaagggccuguacaacuucgccaccugcggccuggugggccuggugaccuuccugcugcugugcggcagaagcugcaccaccagccuguacaagggcguguacgagcugcagacccuggagcugaacauggagacccugaacaugugcaugccccugagcugcaccaagaacaacagccaccacuacaucauggugggcaacgagaccggccuggagcugacccugaccaacaccagcaucaucaaccacaaguucugcaaccugagcgacgcccacaagaagaaccuguacgaccacgcccugaugagcaucaucagcaccuuccaccugagcauccccaacuucaaccaguacgaggccaugagcugcgacuucaacggcggcaagaucagcgugcaguacaaccugagccacagcuacgccggcgacgccgccaaccacugcggcaccguggccaacggcgugcugcagaccuucaugagaauggccuggggcggcagcuacaucgcccuggacagcggcagaggcaacugggacugcaucaugaccagcuaccaguaccugaucauccagaacaccaccugggaggaccacugccaguucagcagacccagccccaucggcuaccugggccugcugagccagagaaccagagacaucuacaucagcagaagacugcugggcaccuucaccuggacccugagcgacagcgagggcaaggacacccccggcggcuacugccugaccagauggaugcugaucgaggccgagcugaagugcuucggcaacaccgccguggccaagugcaacgagaagcacgacgaggaguucugcgacaugcugagacuguucgacuucugcaagcaggccauccagagacugaaggcccccgcccagaugagcauccagcugaucaacaaggccgugaacgcccugaucaacgaccagcugaucaugaagaaccaccugagagacaucaugggcauccccuacugcaacuacagcaaguacugcuaccugaaccacaccaccaccggcagaaccagccugcccaagugcugccuggugagcaacggcagcuaccugaacgagacccacuucagcgacgacaucgagcagcaggccgacaacaugaucaccgagaugcugcagaaggaguacauggagagacagggcaagaccccccugggccugguggaccuguucguguucagcaccagcuucuaccugaucagcaucuuccugcaccuggugaagauccccacccacagacacaucgugggcaagagcugccccaagccccacagacugaaccacaugggcaucugcagcugcggccuguacaagcagcccggcgugcccgugaaguggaagagaugaggacuaguaauaaggaaacuguaugaaugucugugggcaggaagugaagagauccuucuguaaagguuuuuggaauuaugucugcugaauaauaaacuuuuuugaaauaauaaaucugguagaaaaaugagaucucaaaggcucuuuucagagccaccaaaaaaaaaaaaaaaaaaaaaaaaaaaaaaaaaaaaaaaaaaaaaaaaaaaaaaaaaaaaaaaaaaaaaaaaaaaaaaaaaaaaaaaaaaaaaaaaaaaaa

SEQ ID NO: 34246 - RNA, 1809 nt, Artificial Sequence
  mRNA product Design b-4 (hSL-A100) comprising derived and/or modified sequence from LASV(LP;Clade I)__AAF86701__GPCmut8 (opt4)
aggagagucccgcagucggcguccagcggcucugcuuguucgugugugugucguugcaggccuuauucaagcuuaccaugggccagaucaucaccuucuuccaggaggugccccacgugaucgaggaggugaugaacaucgugcugaucgcccugagccugcuggccauccugaagggccuguacaacaucgccaccugcggcaucaucggccugguggccuuccuguuccugugcggcaagagcugcagccugacccugaagggcggcuacgagcugcagacccuggagcugaacauggagacccugaacaugugcaugccccugagcugcaccaagaacagcagccaccacuacaucagagugggcaacgagaccggccuggagcugacccugaccaacaccagcaucaucaaccacaaguucugcaaccugagcgacgcccacaagaagaaccuguacgaccacgcccugaugagcaucaucagcaccuuccaccugagcauccccaacuucaaccaguacgaggccaugagcugcgacuucaacggcggcaagaucagcgugcaguacaaccugagccacagcuacgccggcgacgccgccgagcacugcggcaccguggccaacggcgugcugcagaccuucaugagaauggccuggggcggcagauacaucgcccuggacagcggcaagggcaacugggacugcaucaugaccagcuaccaguaccugaucauccagaacaccaccugggaggaccacugccaguucagcagacccagccccaucggcuaccugggccugcugagccagagaaccagagacaucuacaucagcagaagacugcugggcaccuucaccuggacccugagcgacagcgagggcaacgagacccccggcggcuacugccugaccagauggaugcugaucgaggccgagcugaagugcuucggcaacaccgccguggccaagugcaacgagaagcacgacgaggaguucugcgacaugcugagacuguucgacuucugcaagcaggccaucagaagacugaaggcccccgcccagaugagcauccagcugaucaacaaggccgugaacgcccugaucaacgaccagcugaucaugaagaaccaccugagagacaucaugggcauccccuacugcaacuacagcaaguacugcuaccugaaccacaccagcagcggcagaaccagccugcccaagugcugccugaucagcaacggcagcuaccugaacgagacccaguucagcgacgacaucgagcagcaggccgacaacaugaucaccgagaugcugcagaaggaguacaucgagagacagggcaagaccccccugggccugguggacaucuucaucuucagcaccagcuucuaccugaucagcaucuuccugcaccugaucaagauccccacccacagacacaucgugggcaagcccugccccaagccccacagacugaaccacaugggcgugugcagcugcggccuguacaagcaccccggcgugcccaccaaguggaagagaugaggacuaguaauaaggaaacuguaugaaugucugugggcaggaagugaagagauccuucuguaaagguuuuuggaauuaugucugcugaauaauaaacuuuuuugaaauaauaaaucugguagaaaaaugagaucucaaaggcucuuuucagagccaccaaaaaaaaaaaaaaaaaaaaaaaaaaaaaaaaaaaaaaaaaaaaaaaaaaaaaaaaaaaaaaaaaaaaaaaaaaaaaaaaaaaaaaaaaaaaaaaaaaaaa

SEQ ID NO: 34247 - RNA, 1809 nt, Artificial Sequence
  mRNA product Design b-4 (hSL-A100) comprising derived and/or modified sequence from LASV(803213;Clade II)__AAF86703__GPCmut8 (opt4)
aggagagucccgcagucggcguccagcggcucugcuuguucgugugugugucguugcaggccuuauucaagcuuaccaugggccagaucaucaccuucuuccaggaggugccccacgugaucgaggaggugaugaacaucgugcugaucgcccugagccugcuggccauccugaagggcaucuacaacguggccaccugcggccuguucggccugaucagcuuccugcugcugugcggcagaagcugcagcgugaccuacaagggcguguacgagcugcagacccuggagcugaacauggccaaccugaacaugugcaugccccugagcugcaccaagaacaacagccaccacuacaucauggugggcaacgagaccggccuggagcugacccugaccaacaccagcaucaucaaccacaaguucugcaaccugagcgacgcccacaagaagaaccuguacgaccacgcccugaugagcaucaucagcaccuuccaccugagcauccccaacuucaaccaguacgaggccaugagcugcgacuucaacggcggcaagaucagcgugcaguacaaccugagccacagcuucgccguggacgccgccaaccacugcggcaccaucgccaacggcgugcugcagaccuucaugagaauggccuggggcggcagcuacaucgcccuggacagcggcaagggcaacugggacugcaucaugaccagcuaccaguaccugaucauccagaacaccaccugggaggaccacugccaguucagcagacccagccccaucggcuaccugggccugcugagccagagaaccagagacaucuacaucagcagaagacugcugggcaccuucaccuggacccugagcgacagcgagggcaacgaggcccccggcggcuacugccugaccagauggaugcugaucgaggccgagcugaagugcuucggcaacaccgccguggccaagugcaacgagaagcacgacgaggaguucugcgacaugcugagacuguucgacuucugcaagcaggccaucaagagacugaagacccccgcccagaugagcauccagcugaucaacaaggccgugaacgcccugaucaacgaccagcugaucaugaagaaccaccugagagacaucaugggcauccccuacugcaacuacagcagauacugcuaccugaaccacaccgugaccggcaagaccagccugcccagaugcugccuggugagcaacggcagcuaccugaacgagacccacuucagcgacgacaucgagcagcaggccgacaacaugaucaccgagaugcugcagaaggaguacauggacagacagggcaagaccccccugggccugguggaccuguucguguucagcaccagcuucuaccugaucagcaucuuccugcaccuggugaagauccccacccacagacacaucgugggcaagcccugccccaagccccacagacugaaccacaugggcaucugcagcugcggccuguacaagcaccccggcgugcccgugaaguggaagagaugaggacuaguaauaaggaaacuguaugaaugucugugggcaggaagugaagagauccuucuguaaagguuuuuggaauuaugucugcugaauaauaaacuuuuuugaaauaauaaaucugguagaaaaaugagaucucaaaggcucuuuucagagccaccaaaaaaaaaaaaaaaaaaaaaaaaaaaaaaaaaaaaaaaaaaaaaaaaaaaaaaaaaaaaaaaaaaaaaaaaaaaaaaaaaaaaaaaaaaaaaaaaaaaaa

SEQ ID NO: 34248 - RNA, 1809 nt, Artificial Sequence
  mRNA product Design b-4 (hSL-A100) comprising derived and/or modified sequence from LASV(GA391;Clade III)__CAA36645__GPCmut8 (opt4)
aggagagucccgcagucggcguccagcggcucugcuuguucgugugugugucguugcaggccuuauucaagcuuaccaugggccagaucgugaccuucuuccaggaggugccccacgugaucgaggaggugaugaacaucgugcugaucgcccugagcauccuggccauccugaagggccuguacaacguggccaccugcggccugaucggccuggugaccuuccugcugcugagcggcagaagcugcagccugaucuacaagggcaccuacgagcugcagacccuggagcugaacauggagacccugaacaugugcaugccccugagcugcaccaagaacaacagccaccacuacaucagagugggcaacgagaccggccuggagcugacccugaccaacaccagcauccugaaccacaaguucugcaaccugagcgacgcccacaagagaaaccuguacgaccacagccugaugagcaucaucagcaccuuccaccugagcauccccaacuucaaccaguacgaggccaugagcugcgacuucaacggcggcaagaucaccgugcaguacaaccugagccacagcuucgccguggacgccgccggccacugcggcacccuggccaacggcgugcugcagaccuucaugagaauggccuggggcggcagcuacaucgcccuggacagcggcagaggcaacugggacugcaucaugaccagcuaccaguaccugaucauccagaacaccaccugggacgaccacugccaguucagcagacccagccccaucggcuaccugggccugcugagccagagaaccagagacaucuacaucagcagaagacugcugggcaccuucaccuggacccugagcgacagcgagggcaacgagacccccggcggcuacugccugaccagauggaugcugaucgaggccgagcugaagugcuucggcaacaccgccguggccaagugcaacgagaagcacgacgaggaguucugcgacaugcugagacuguucgacuucugcaagcaggccaucagaagacugaagacccccgcccagaugagcauccagcugaucaacaaggccgugaacgcccugaucaacgaccagcugaucaugaagaaccaccugagagacaucaugggcauccccuacugcaacuacagcagauacugcuaccugaaccacaccagcaccggcaagaccagccugcccagaugcugccugaucagcaacggcagcuaccugaacgagaccaaguucagcgacgacaucgagcagcaggccgacaacaugaucaccgagaugcugcagaaggaguacaucgacagacagggcaagaccccccugggccugguggaccuguucguguucagcaccagcuucuaccugaucagcaucuuccugcaccuggugaagauccccacccacagacacaucgugggcaagcccugccccaagccccacagacugaaccacaugggcaucugcagcugcggccuguacaagcagcccggcgugcccgugagauggaagagaugaggacuaguaauaaggaaacuguaugaaugucugugggcaggaagugaagagauccuucuguaaagguuuuuggaauuaugucugcugaauaauaaacuuuuuugaaauaauaaaucugguagaaaaaugagaucucaaaggcucuuuucagagccaccaaaaaaaaaaaaaaaaaaaaaaaaaaaaaaaaaaaaaaaaaaaaaaaaaaaaaaaaaaaaaaaaaaaaaaaaaaaaaaaaaaaaaaaaaaaaaaaaaaaaa

SEQ ID NO: 34249 - RNA, 1812 nt, Artificial Sequence
  mRNA product Design b-4 (hSL-A100) comprising derived and/or modified sequence from LASV(AV;Clade V)__CCA30314__GPCmut8 (opt4)
aggagagucccgcagucggcguccagcggcucugcuuguucgugugugugucguugcaggccuuauucaagcuuaccaugggccagaucgugaccuucuuccaggaggugccccacgugaucgaggaggugaugaacaucgugcugaucgcccugagcauccuggccgugcugaagggccuguacaacaucgccaccugcggccugaucggccugaucaccuuccugcugcugugcggcagaagcugcagcagcaaccuguacaagggcguguacgagcugcagagccuggaccugaacauggagacccugaacaugugcaugccccugagcugcaccaagaacaacagccaccacuacaucagagugggcaacgacaccggccuggagcugacccugaccaacaccagcauccugaaccacaaguucugcaaccugagcgacgcccacaagaaggaccuguacgaccacgcccugaugagcaucaucagcaccuuccaccugagcauccccaacuucaaccaguacgaggccaugagcugcgacuucaacggcggcaagaucagcgugcaguacaaccugagccacagcuacgccaucgacgccgccaaccacugcggcaccguggccaacggcauccugcagaccuucaugagaauggccuggggcggcagcuacaucgcccuggacagcggcagaggcaacugggacugcaucaugaccagcuaccaguaccugaucauccagaacaccaccugggagaaccacugccaguucagcagacccagccccaucggcuaccugggccugcugagccagagaaccagagacaucuacaucagcagaagacugcugggcaccuucaccuggacccugagcgacagcgagggcaacgccacccccggcggcuacugccugaccagauggaugcugaucgaggccgagcugaagugcuucggcaacaccgccguggccaagugcaacgagaagcacgacgaggaguucugcgacaugcugagacuguucgacuucugcaagcaggccaucagcagacugaagagccccgcccagaugagcauccagcugaucaacaaggccgugaacgcccugaucaacgaccagcugaucaugaagaaccaccugagagacaucaugggcauccccuacugcaacuacagcaaguacugcuaccugaaccacaccaucaccggcaagaccagccugcccaagugcugccuggugagcaacggcagcuaccugaacgagacccacuucagcgacgacaucgagcagcaggccgacaacaugaucaccgagaugcugcagaaggaguacauggagagacagggcaagaccccccugggccugguggaccuguucguguucagcaccagcuucuaccugaucagcaucuuccugagacuggugaagauccccacccacagacacaucgugggcaagcccugccccaagccccacagacugaaccacaugggcaucugcagcugcggccuguacaagcagcccggcgugcccgugagauggaagagaugaggacuaguaauaaggaaacuguaugaaugucugugggcaggaagugaagagauccuucuguaaagguuuuuggaauuaugucugcugaauaauaaacuuuuuugaaauaauaaaucugguagaaaaaugagaucucaaaggcucuuuucagagccaccaaaaaaaaaaaaaaaaaaaaaaaaaaaaaaaaaaaaaaaaaaaaaaaaaaaaaaaaaaaaaaaaaaaaaaaaaaaaaaaaaaaaaaaaaaaaaaaaaaaaa

SEQ ID NO: 34250 - RNA, 1809 nt, Artificial Sequence
  mRNA product Design b-4 (hSL-A100) comprising derived and/or modified sequence from LASV(Togo/2016/7082;Clade VI)__AMR44577__GPCmut8 (opt4)
aggagagucccgcagucggcguccagcggcucugcuuguucgugugugugucguugcaggccuuauucaagcuuaccaugggccagaucaucaccuucuuccaggaggugccccacgugaucgaggaggugaugaacaucgugcugaucgcccugagccugcuggccauccugaagggcguguacaacguggccaccugcggcaucaucggccuggugaccuuccuguuccugugcggcagaagcugcagccugaucuacaagggcagcuacgagcugcagacccuggagcugaacauggagacccugaacaugugcaugccccugagcugcaccaagaacagcagccaccacuacaucagagugggcaacgagaccggccuggagcugacccugaccaacaccagcaucaucaaccacaaguucugcaaccugagcgacgcccacaagagaaaccuguacgaccacgcccugaugagcauccugagcaccuuccaccugagcauccccaacuucaaccaguacgaggccaugagcugcgacuucaacggcggcaagaucagcgugcaguacaaccugagccacgccuacgccguggacgccgccgagcacugcggcaccguggccaacggcgugcugcagaccuucaugagaauggccuggggcggcagcuacaucgcccuggacagcggcagaggcaacugggacugcaucaugaccagcuaccaguaccugaucauccagaacaccaccugggaggaccacugccaguucagcagacccagccccaucggcuaccugggccugcugagccagagaaccagagacaucuacaucagcagaagacugcugggcaccuucaccuggacccugagcgacagcgagggcaacgagacccccggcggcuacugccugaccagauggaugcugaucgaggccgagcugaagugcuucggcaacaccgccguggccaagugcaacgagaagcacgacgaggaguucugcgacaugcugagacuguucgacuucugcaagcaggccauccagagacugaagagccccgcccagaugagcauccagcugaucaacaaggccgugaacgcccugaucaacgaccagcugaucaugaagaaccaccugagagacaugaugggcauccccuacugcaacuacagcaaguacugcuaccugaaccacaccagcagcggcagaaccagccugcccaagugcugccuggugagcaacggcagcuaccugaacgagacccacuucagcgacgacaucgagcagcaggccgacaacaugaucaccgagaugcugcagaaggaguacaucgacagacagggcaagaccccccugggccugguggaccuguucguguucagcaccagcuucuaccugaucagcaucuuccugcaccugaucaagauccccacccacagacacaucgugggcaagcccugccccaagccccacagacugaaccacaugggcaucugcagcugcggccuguacaagcagcccggcgugcccaccagauggaagagaugaggacuaguaauaaggaaacuguaugaaugucugugggcaggaagugaagagauccuucuguaaagguuuuuggaauuaugucugcugaauaauaaacuuuuuugaaauaauaaaucugguagaaaaaugagaucucaaaggcucuuuucagagccaccaaaaaaaaaaaaaaaaaaaaaaaaaaaaaaaaaaaaaaaaaaaaaaaaaaaaaaaaaaaaaaaaaaaaaaaaaaaaaaaaaaaaaaaaaaaaaaaaaaaaa

SEQ ID NO: 34251 - RNA, 1809 nt, Artificial Sequence
  mRNA product Design b-4 (hSL-A100) comprising derived and/or modified sequence from LASV(KAK-428;Clade n.d. (VII))__ANH09740__GPCmut8 (opt4)
aggagagucccgcagucggcguccagcggcucugcuuguucgugugugugucguugcaggccuuauucaagcuuaccaugggccagaucgugaccuucuuccaggaggugccccacgugaucgaggaggugaugaacaucgugcugaucgcccugagccugcuggccauccugaagggccuguacaacuucgccaccugcggcgugaucggccugaucaccuuccugcugcugugcggcagaagcugcagcgccaccuacaagggccaguacgagcugcagacccuggagcugaacauggagagccugaacaugugcaugccccugagcugcaccaagaacaacagccaccacuacaucagagccggcaacaacaccggccuggagcugacccugaccaacaccagcaucaucagccacaaguucugcaaccugagcgacgcccacaagaagaaccuguacgaccacacccugaugagcaucaucaccaccuuccaccugagcauccccaacuucaaccaguacgaggccaugagcugcgacuucaacggcggcaagaucagcauccaguacaaccugagccacagcuacgccggcgacgccgcccagcacugcggcaccguggccaacggcgugcugcagaccuucaugagaauggccuggggcggcagcuaccuggcccuggacagcggcagaagaggcugggacugcaucaucagcagcuaccaguaccugaucauccagaacaccaccugggacgaccacugccaguucagcagacccagccccaucggcuaccugggcuucgugagccagaagaccagagacaucuacaucagcagaagacugcugggcaccuucaccuggacccugagcgacagcgagggccacgacaugcccggcggcuacugccugaccagauggaugcugaucgaggccgaccugaagugcuucggcaacaccgccguggccaagugcaacgagaagcacgacgaggaguucugcgacauguggagacuguucgacuucugcaagcaggccauccagagacugaaggcccccgcccagaugaacauccagcugaucaacaaggccgugaacgcccugaucaacgaccagcugaugaugaagaaccaccugagagacaucaugggcauccccuacugcaacuacagcaaguucugcuaccugaacaacaccaccaccggcagaaccagccugcccagaugcugccugaucagcaacggcagcuaccugaacgagacccacuucagcgacgacaucgagcagcaggccgacaacaugaucaccgagaugcugcagaaggaguacauggacagacagggcaagaccccccugggccugguggaccuguucguguucagcaccagcuucuaccugaucaccaucuuccugcaccuggugaagauccccacccacagacacaucgugggcaagcccugccccaagccccacagacugaaccacaugggcaucugcagcugcggccuguacaagcagcccggcgugcccgugagauggaagagaugaggacuaguaauaaggaaacuguaugaaugucugugggcaggaagugaagagauccuucuguaaagguuuuuggaauuaugucugcugaauaauaaacuuuuuugaaauaauaaaucugguagaaaaaugagaucucaaaggcucuuuucagagccaccaaaaaaaaaaaaaaaaaaaaaaaaaaaaaaaaaaaaaaaaaaaaaaaaaaaaaaaaaaaaaaaaaaaaaaaaaaaaaaaaaaaaaaaaaaaaaaaaaaaaa

SEQ ID NO: 34252 - RNA, 1809 nt, Artificial Sequence; identical to SEQ ID NO: 34246
  mRNA product Design b-4 (hSL-A100) comprising derived and/or modified sequence from LASV(Pinneo-NIG-1969;Clade I)__AIT17836__GPCmut8 (opt4)

SEQ ID NO: 34253 - RNA, 1809 nt, Artificial Sequence
  mRNA product Design b-4 (hSL-A100) comprising derived and/or modified sequence from LASV(ISTH0009-NIG-2011;Clade II)__AIT17404__GPCmut8 (opt4)
aggagagucccgcagucggcguccagcggcucugcuuguucgugugugugucguugcaggccuuauucaagcuuaccaugggccagaucaucaccuucuuccaggaggugccccacgugaucgaggaggugaugaacaucgugcugaucgcccugagccugcuggccauccugaagggcaucuacaacguggccaccugcggccuguucggccuggugagcuuccugcugcugugcggcagaagcugcagcaccaccuacaagggcguguacgagcugcagacccuggagcuggacauggccagccugaacaugugcaugccccugagcugcaccaagaacaacagccaccacuacaucauggugggcaacgagaccggccuggagcugacccugaccaacaccagcaucaucaaccacaaguucugcaaccugagcgacgcccacaagaagaaccuguacgaccacgcccugaugagcaucaucagcaccuuccaccugagcauccccaacuucaaccaguacgaggccaugagcugcgacuucaacggcggcaagaucagcgugcaguacaaccugagccacgccuacgccguggacgccgccaaccacugcggcaccaucgccaacggcgugcugcagaccuucaugagaauggccuggggcggcagcuacaucgcccuggacagcggcaagggcagcugggacugcaucaugaccagcuaccaguaccugaucauccagaacaccaccugggaggaccacugccaguucagcagacccagccccaucggcuaccugggccugcugagccagagaaccagagacaucuacaucagcagaagacugcugggcaccuucaccuggacccugagcgacagcgagggcaacgagacccccggcggcuacugccugaccagauggaugcugaucgaggccgagcugaagugcuucggcaacaccgccguggccaagugcaacgagaagcacgacgaggaguucugcgacaugcugagacuguucgacuucugcaagcaggccaucagaagacugaagacccccgcccagaugagcauccagcugaucaacaaggccgugaacgcccugaucaacgaccagcugaucaugaagaaccaccugagagacaucaugggcauccccuacugcaacuacagcaaguacugcuaccugaaccacaccgugaccggcaagaccagccugcccagaugcugccuggugagcaacggcagcuaccugaacgagacccacuucagcgacgacaucgagcagcaggccgacaacaugaucaccgagcugcugcagaaggaguacauggacagacagggcaagaccccccugggccugguggaccuguucguguucagcaccagcuucuaccugaucagcaucuuccugcaccugaucaagauccccacccacagacacaucaccggcaagcccugccccaagccccacagacugaaccacaugggcaucugcagcugcggccuguacaagcaccccggcgugcccgugaaguggaagagaugaggacuaguaauaaggaaacuguaugaaugucugugggcaggaagugaagagauccuucuguaaagguuuuuggaauuaugucugcugaauaauaaacuuuuuugaaauaauaaaucugguagaaaaaugagaucucaaaggcucuuuucagagccaccaaaaaaaaaaaaaaaaaaaaaaaaaaaaaaaaaaaaaaaaaaaaaaaaaaaaaaaaaaaaaaaaaaaaaaaaaaaaaaaaaaaaaaaaaaaaaaaaaaaaa

SEQ ID NO: 34254 - RNA, 1809 nt, Artificial Sequence
  mRNA product Design b-4 (hSL-A100) comprising derived and/or modified sequence from LASV(ISTH2010-NIG-2012;Clade II)__AIT17482__GPCmut8 (opt4)
aggagagucccgcagucggcguccagcggcucugcuuguucgugugugugucguugcaggccuuauucaagcuuaccaugggccagaucaucaccuucuuccaggaggugccccacgugaucgaggaggugaugaacaucgugcugaucgcccugagccugcuggccauccugaagggcaucuacaacguggccaccugcggccuguucggccuggugagcuuccugcugcugugcggcagaagcugcagcaccaccuacaagggcguguacgagcugcagacccuggagcuggacauggccagccugaacaugugcaugccccugagcugcaccaagaacaacagccaccacuacaucauggugggcaacgagaccggccuggagcugacccugaccaacaccagcaucaucaaccacaaguucugcaaccugagcgacgcccacaagaagaaccuguacgaccacgcccugaugagcaucaucagcaccuuccaccugagcauccccaacuucaaccaguacgaggccaugagcugcgacuucaacggcggcaagaucagcgugcaguacaaccugagccacgccuacgccguggacgccgccaaccacugcggcaccaucgccaacggcgugcugcagaccuucaugagaauggccuggggcggcagcuacaucgcccuggacagcggcaagggcagcugggacugcaucaugaccagcuaccaguaccugaucauccagaacaucaccugggaggaccacugccaguucagcagacccagccccaucggcuaccugggccugcugagccagagaaccagagacaucuacaucagcagaagacugcugggcaccuucaccuggacccugagcgacagcgagggcaacgagacccccggcggcuacugccugaccagauggaugcugaucgaggccgagcugaagugcuucggcaacaccgccguggccaagugcaacgagaagcacgacgaggaguucugcgacaugcugagacuguucgacuucugcaagcaggccaucagaagacugaagacccccgcccagaugagcauccagcugaucaacaaggccgugaacgcccugaucaacgaccagcugaucaugaagaaccaccugagagacaucaugggcauccccuacugcaacuacagcaaguacugcuaccugaaccacaccgugaccggcaagaccagccugcccagaugcugccuggugagcaacggcagcuaccugaacgagacccacuucagcgacgacaucgagcagcaggccgacaacaugaucaccgagcugcugcagaaggaguacaucgacagacagggcaagaccccccugggccugguggaccuguucguguucagcaccagcuucuaccugaucagcaucuuccugcaccuggugaagauccccacccacagacacguggugggcaagcccugccccaagccccacagacugaaccacaugggcaucugcagcugcggccuguacaagcaccccggcgugcccgugaaguggaagagaugaggacuaguaauaaggaaacuguaugaaugucugugggcaggaagugaagagauccuucuguaaagguuuuuggaauuaugucugcugaauaauaaacuuuuuugaaauaauaaaucugguagaaaaaugagaucucaaaggcucuuuucagagccaccaaaaaaaaaaaaaaaaaaaaaaaaaaaaaaaaaaaaaaaaaaaaaaaaaaaaaaaaaaaaaaaaaaaaaaaaaaaaaaaaaaaaaaaaaaaaaaaaaaaaa

SEQ ID NO: 34255 - RNA, 1809 nt, Artificial Sequence
  mRNA product Design b-4 (hSL-A100) comprising derived and/or modified sequence from LASV(Lassa virus/H.sapiens-wt/NGA/2015/ISTH_0543;Clade II)__AVO03639__GPCmut8 (opt4)
aggagagucccgcagucggcguccagcggcucugcuuguucgugugugugucguugcaggccuuauucaagcuuaccaugggccagaucaucaccuucuuccaggaggugccccacgugaucgaggaggugaugaacaucgugcugaucgcccugagccugcuggccauccugaagggcaucuacaacguggccaccugcggccuguucggccuggugagcuuccugcugcugugcggcagaagcugcagcaccaccuacaagggcguguacgagcugcagacccuggagcuggacauggccaaccugaacaugugcaugccccugagcugcaccaagaacaacagccaccacuacaucauggugggcaacgagaccggccuggagcugacccugaccaacaccagcaucaucaaccacaaguucugcaaccugagcgacgcccacaagaagaaccuguacgaccacgcccugaugagcaucaucagcaccuuccaccugagcauccccaacuucaaccaguacgaggccaugagcugcgacuucaacggcggcaagaucagcgugcaguacaaccugagccacaccuacgccguggacgccgccaaccacugcggcaccaucgccaacggcgugcugcagaccuucaugagaauggccuggggcggcagcuacaucgcccuggacagcggcaagggcagcugggacugcaucaugaccagcuaccaguaccuggugauccagaacaccaccugggaggaccacugccaguucagcagacccagccccaucggcuaccugggccugcugagccagagaaccagagacaucuacaucagcagaagacugcugggcaccuucaccuggacccugagcgacagcgagggcaacgagacccccggcggcuacugccugaccagauggaugcugaucgaggccgagcugaagugcuucggcaacaccgccguggccaagugcaacgagaagcacgacgaggaguucugcgacaugcugagacuguucgacuucugcaagcaggccaucagaagacugaagacccccgcccagaugagcauccagcugaucaacaaggccgugaacgcccugaucaacgaccagcugaucaugaagaaccaccugagagacaucaugggcauccccuacugcaacuacagcaaguacugcuaccugaaccacaccgugaccggcaagaccagccugcccagaugcugccuggugagcaacggcagcuaccugaacgagacccacuucagcgacgacaucgagcagcaggccgacaacaugaucaccgagcugcugcagaaggaguacaucgacagacagggcaagaccccccugggccugguggaccuguucguguucagcaccagcuucuaccugaucagcaucuuccugcaccuggugaagauccccacccacagacacaucaccggcaagcccugccccaagccccacagacugaaccacaugggcaucugcagcugcggccuguacaagcaccccggcgugcccgugaaguggaagagaugaggacuaguaauaaggaaacuguaugaaugucugugggcaggaagugaagagauccuucuguaaagguuuuuggaauuaugucugcugaauaauaaacuuuuuugaaauaauaaaucugguagaaaaaugagaucucaaaggcucuuuucagagccaccaaaaaaaaaaaaaaaaaaaaaaaaaaaaaaaaaaaaaaaaaaaaaaaaaaaaaaaaaaaaaaaaaaaaaaaaaaaaaaaaaaaaaaaaaaaaaaaaaaaaa

SEQ ID NO: 34256 - RNA, 1809 nt, Artificial Sequence
  mRNA product Design b-4 (hSL-A100) comprising derived and/or modified sequence from LASV(Lassa virus/H.sapiens-wt/NGA/2016/ISTH_0009;Clade II)__AVO03571__GPCmut8 (opt4)
aggagagucccgcagucggcguccagcggcucugcuuguucgugugugugucguugcaggccuuauucaagcuuaccaugggccagaucaucaccuucuuccaggaggugccccacgugaucgaggaggugaugaacaucgugcugaucgcccugagccugcuggccauccugaagggcaucuacaacguggccaccugcggccugcugggccuggugagcuuccugcugcugugcggcagaagcugcagcaccaccuacaagggcguguacgagcugcagacccuggagcuggacauggccagccugaacaugugcaugccccugagcugcaccaagaacaacagccaccacuacaucauggugggcaacgagaccggccuggagcugacccugaccaacaccagcaucaucaaccacaaguucugcaaccugagcgacgcccacaagaagaaccuguacgaccacgcccugaugagcaucaucagcaccuuccaccugagcauccccaacuucaaccaguacgaggccaugagcugcgacuucaacggcggcagaaucagcgugcaguacaaccugagccacagcuacgccguggacgccgccaaccacugcggcaccaucgccaacggcgugcugcagaccuucaugagaauggccuggggcggcagcuacaucgcccuggacagcggcaagggcagcugggacugcaucaugaccagcuaccaguaccugaucauccagaacaccaccugggaggaccacugccaguucagcagacccagccccaucggcuaccugggccugcugagccagagaaccagagacaucuacaucagcagaagacugcugggcaccuucaccuggacccugagcgacagcgagggcaacgagacccccggcggcuacugccugaccagauggaugcugaucgaggccgagcugaagugcuucggcaacaccgccguggccaagugcaacgagaagcacgacgaggaguucugcgacaugcugagacuguucgacuucugcaagcaggccaucagaagacugaagacccccgcccagaugagcauccagcugaucaacaaggccgugaacgcccugaucaacgaccagcugaucaugaagaaccaccugagagacaucaugggcauccccuacugcaacuacagcaaguacugcuaccugaaccacaccgugaccggcaagaccagccugcccagaugcugccuggugagcaacggcagcuaccugaacgagacccacuucagcgacgacaucgagcagcaggccgacaacaugaucaccgagcugcugcagaaggaguacaucgacagacagggcaagaccccccugggccugguggaccuguucguguucagcaccagcuucuaccugaucagcaucuuccugcaccuggugaagauccccacccacagacacaucaccggcaagcccugccccaagccccacagacugaaccacaugggcaucugcagcugcggccuguacaaccaccccggcgugcccgugaaguggaagagaugaggacuaguaauaaggaaacuguaugaaugucugugggcaggaagugaagagauccuucuguaaagguuuuuggaauuaugucugcugaauaauaaacuuuuuugaaauaauaaaucugguagaaaaaugagaucucaaaggcucuuuucagagccaccaaaaaaaaaaaaaaaaaaaaaaaaaaaaaaaaaaaaaaaaaaaaaaaaaaaaaaaaaaaaaaaaaaaaaaaaaaaaaaaaaaaaaaaaaaaaaaaaaaaaa

SEQ ID NO: 34257 - RNA, 1809 nt, Artificial Sequence
  mRNA product Design b-4 (hSL-A100) comprising derived and/or modified sequence from LASV(Lassa virus/H.sapiens-wt/NGA/2016/ISTH_0017;Clade II)__AVO03567__GPCmut8 (opt4)
aggagagucccgcagucggcguccagcggcucugcuuguucgugugugugucguugcaggccuuauucaagcuuaccaugggccagaucaucaccuucuuccaggaggugccccacgugaucgaggaggugaugaacaucgugcugaucgcccugagccugcuggccauccugaagggcaucuacaacguggccaccugcggccuguucggccuggugagcuuccugcugcugugcggcagaagcugcagcaccaccuacaagggcguguacgagcugcagacccuggagcuggacauggccagccugaacaugugcaugccccugagcugcaccaagaacaacagccaccacuacaucauggugggcaacgagaccggccuggagcugacccugaccaacaccagcaucaucaaccacaaguucugcaaccugagcgacgcccacaagaagaaccuguacgaccacgcccugaugagcaucaucagcaccuuccaccugagcauccccaacuucaaccaguacgaggccaugagcugcgacuucaacggcggcaagaucagcgugcaguacaaccugagccacaccuacgccaucgacgccgccaaccacugcggcaccaucgccaacggcgugcugcagaccuucaugagaauggccuggggcggcagcuacaucgcccuggacagcggcaagggcagcugggacugcaucaugaccagcuaccaguaccugaucauccagaacaccaccugggaggaccacugccaguucagcagacccagccccaucggcuaccugggccugcugagccagagaaccagagacaucuacaucagcagaagacugcugggcaccuucaccuggacccugagcgacagcgagggcaacgagacccccggcggcuacugccugaccagauggaugcugaucgaggccgagcugaagugcuucggcaacaccgccguggccaagugcaacgagaagcacgacgaggaguucugcgacaugcugagacuguucgacuucugcaagcaggccaucagaagacugaagacccccgcccagaugagcauccagcugaucaacaaggccgugaacgcccugaucaacgaccagcugaucaugaagaaccaccugagagacaucaugggcauccccuacugcaacuacagcaaguacugcuaccugaaccacaccgugaccggcaagaccagccugcccagaugcugccuggugagcaacggcagcuaccugaacgagacccacuucagcgacgacaucgagcagcaggccgacaacaugaucaccgagcugcugcagaaggaguacauggacagacagggcaagaccccccugggccugguggaccuguucguguucagcaccagcuucuaccugaucagcaucuuccugcaccuggugagaauccccacccacagacacgugaucggcaagcccugccccaagccccacagacugaaccacaugggcaucugcagcugcggccuguacaagcaccccggcgugcccgugaaguggaagagaugaggacuaguaauaaggaaacuguaugaaugucugugggcaggaagugaagagauccuucuguaaagguuuuuggaauuaugucugcugaauaauaaacuuuuuugaaauaauaaaucugguagaaaaaugagaucucaaaggcucuuuucagagccaccaaaaaaaaaaaaaaaaaaaaaaaaaaaaaaaaaaaaaaaaaaaaaaaaaaaaaaaaaaaaaaaaaaaaaaaaaaaaaaaaaaaaaaaaaaaaaaaaaaaaa

SEQ ID NO: 34258 - RNA, 1809 nt, Artificial Sequence
  mRNA product Design b-4 (hSL-A100) comprising derived and/or modified sequence from LASV(Lassa virus/H.sapiens-wt/NGA/2018/ISTH_0959;Clade II)__AVV65099__GPCmut8 (opt4)
aggagagucccgcagucggcguccagcggcucugcuuguucgugugugugucguugcaggccuuauucaagcuuaccaugggccagaucaucaccuucuuccaggaggugccccacgugaucgaggaggugaugaacaucgugcugaucgcccugagccugcuggccauccugaagggcaucuacaacguggugaccugcggccuguucggccuggugagcuuccugcugcugugcggcagaagcugcagcaccaccuacaagggcguguacgagcugcagacccuggagcuggacauggccagccugaacaugugcaugccccugagcugcaccaagaacaacagccaccacuacaucauggugggcaacgagaccggccuggagcugacccugaccaacaccagcaucaucaaccacaaguucugcaaccugagcgacgcccacaagaagaaccuguacgaccacgcccugaugagcaucaucagcaccuuccaccugagcauccccaacuucaaccaguacgaggccaugagcugcgacuucaacggcggcaagaucagcgugcaguacaaccugagccacgccuacgccaucgacgccgccaaccacugcggcaccaucgccaacggcgugcugcagaccuucaugagaauggccuggggcggcagcuacaucgcccuggacagcggcaagggcagcugggacugcaucaugaccagcuaccaguaccugaucauccagaacaccaccugggaggaccacugccaguucagcagacccagccccaucggcuaccugggccugcugagccagagaaccagagacaucuacaucagcagaagacugcugggcaccuucaccuggacccugagcgacagcgagggcaacgagacccccggcggcuacugccugaccagauggaugcugaucgaggccgagcugaagugcuucggcaacaccgccguggccaagugcaacgagaagcacgacgaggaguucugcgacaugcugagacuguucgacuucugcaagcaggccaucagaagacugaagacccccgcccagaugagcauccagcugaucaacaaggccgugaacgcccugaucaacgaccagcugaucaugaagaaccaccugagagacaucaugggcauccccuacugcaacuacagcaaguacugcuaccugaaccacaccgugaccggcaagaccagccugcccagaugcugccuggugagcaacggcagcuaccugaacgagacccacuucagcgacgacaucgagcagcaggccgacaacaugaucaccgagcugcugcagaaggaguacaucgacagacagggcaagaccccccugggccugguggaccuguucguguucagcaccagcuucuaccugaucagcaucuuccugcaccuggugaagauccccacccacagacacgugaucggcaagcccugccccaagccccacagacugaaccacaugggcaucugcagcugcggccuguacaagcaccccggcgugcccgugaaguggaagagaugaggacuaguaauaaggaaacuguaugaaugucugugggcaggaagugaagagauccuucuguaaagguuuuuggaauuaugucugcugaauaauaaacuuuuuugaaauaauaaaucugguagaaaaaugagaucucaaaggcucuuuucagagccaccaaaaaaaaaaaaaaaaaaaaaaaaaaaaaaaaaaaaaaaaaaaaaaaaaaaaaaaaaaaaaaaaaaaaaaaaaaaaaaaaaaaaaaaaaaaaaaaaaaaaa

SEQ ID NO: 34259 - RNA, 1809 nt, Artificial Sequence
  mRNA product Design b-4 (hSL-A100) comprising derived and/or modified sequence from LASV(LASV003-NIG-2008;Clade II)__AIT17580__GPCmut8 (opt4)
aggagagucccgcagucggcguccagcggcucugcuuguucgugugugugucguugcaggccuuauucaagcuuaccaugggccagaucaucaccuucuuccaggaggugccccacgugaucgaggaggugaugaacaucgugcugaucgcccugagccugcuggccauccugaagggcaucuacaacguggccaccugcggccuguucggccuggugagcuuccugcugcugugcggcagaagcugcagcaccaccuacaagggcguguacgagcugcagacccuggagcuggacauggccagccugaacaugugcaugccccugagcugcaccaagaacaacagccaccacuacaucauggugggcaacgagaccggccuggagcugacccugaccaacaccagcaucaucaaccacaaguucugcaaccugagcgacgcccacaagaagaaccuguacgaccacgcccugaugagcaucaucagcaccuuccaccugagcauccccaacuucaaccaguacgaggccaugagcugcgacuucaacggcggcaagaucagcgugcaguacaaccugagccacaccuacgccguggacgccgccaaccacugcggcaccaucgccaacggcgugcugcagaccuucaugagaauggccuggggcggcagcuacaucgcccuggacagcggcaagggcagcugggacugcaucaugaccagcuaccaguaccugaucauccagaacaccaccugggaggaccacugccaguucagcagacccagccccaucggcuaccugggccugcugagccagagaaccagagacaucuacaucagcagaagacugcugggcaccuucaccuggacccugagcgacagcgagagcaacgagacccccggcggcuacugccugaccagauggaugcugaucgaggccgagcugaagugcuucggcaacaccgccguggccaagugcaacgagaagcacgacgaggaguucugcgacaugcugagacuguucgacuucugcaagcaggccaucagaagacugaaggcccccgcccagaugagcauccagcugaucaacaaggccgugaacgcccugaucaacgaccagcugaucaugaagaaccaccugagagacaucaugggcauccccuacugcaacuacagcaaguacugcuaccugaaccacaccgugaccggcagaaccagccugcccagaugcugccuggugagcaacggcagcuaccugaacgagacccacuucagcgacgacaucgagcagcaggccgacaacaugaucaccgagcugcugcagaaggaguacauggacagacagggcaagaccccccugggccugguggaccuguucguguucagcaccagcuucuaccugaucagcaucuuccugcaccuggugaagauccccacccacagacacgugaucggcaagcccugccccaagccccacagacugaaccacaugggcaucugcagcugcggccuguacaagcaccccggcgugcccgugaaguggaagagaugaggacuaguaauaaggaaacuguaugaaugucugugggcaggaagugaagagauccuucuguaaagguuuuuggaauuaugucugcugaauaauaaacuuuuuugaaauaauaaaucugguagaaaaaugagaucucaaaggcucuuuucagagccaccaaaaaaaaaaaaaaaaaaaaaaaaaaaaaaaaaaaaaaaaaaaaaaaaaaaaaaaaaaaaaaaaaaaaaaaaaaaaaaaaaaaaaaaaaaaaaaaaaaaaa

SEQ ID NO: 34260 - RNA, 1809 nt, Artificial Sequence
  mRNA product Design b-4 (hSL-A100) comprising derived and/or modified sequence from LASV(LASV035-NIG-2009;Clade II)__AIT17588__GPCmut8 (opt4)
aggagagucccgcagucggcguccagcggcucugcuuguucgugugugugucguugcaggccuuauucaagcuuaccaugggccagaucaucaccuucuuccaggaggugccccacgugaucgaggaggugaugaacaucgugcugaucgcccugagccugcuggccauccugaagggcaucuacaacguggccaccugcggccuguucggccuggugagcuuccugcugcugugcggcagaagcugcagcaccaccuacaagggcguguacgagcugcagacccuggagcuggacauggccagccugaacaugugcaugccccugagcugcaccaagaacaacagccaccacuacaucauggugggcaacgagaccggccuggagcugacccugaccaacaccagcaucaucaaccacaaguucugcaaccugagcgacgcccacaagaagaaccuguacgaccacgcccugaugagcaucaucagcaccuuccaccugagcauccccaacuucaaccaguacgaggccaugagcugcgacuucaacggcggcaagaucagcgugcaguacaaccugagccacgccuacgccguggacgccgccaaccacugcggcaccaucgccaacggcgugcugcagaccuucaugagaauggccuggggcggcagcuacaucgcccuggacagcggcaagggcagcugggacugcaucaugaccagcuaccaguaccugaucauccagaacaccaccugggaggaccacugccaguucagcagacccagccccaucggcuaccugggccugcugagccagagaaccagagacaucuacaucagcagaagacugcugggcaccuucaccuggacccugagcgacagcgagggcaacgagacccccggcggcuacugccugaccagauggaugcugaucgaggccgagcugaagugcuucggcaacaccgccguggccaagugcaacgagaagcacgacgaggaguucugcgacaugcugagacuguucgacuucugcaagcaggccaucagaagacugaaggcccccgcccagaugagcauccagcugaucaacaaggccgugaacgcccugaucaacgaccagcugaucaugaagaaccaccugagagacaucaugggcauccccuacugcaacuacagcaaguacugcuaccugaaccacaccgugaccggcaagaccagccugcccagaugcugccuggugagcaacggcagcuaccugaacgagacccacuucagcgacgacaucgagcagcaggccgacaacaugaucaccgagcugcugcagaaggaguacaucgacagacagggcaagaccccccugggccugguggaccuguucguguucagcaccagcuucuaccugaucagcaucuuccugcaccuggugaagauccccacccacagacacgugaucggcaagcccugccccaagccccacagacugaaccacaugggcaucugcagcugcggccuguacaagcaccccggcgugcccgugaaguggaagagaugaggacuaguaauaaggaaacuguaugaaugucugugggcaggaagugaagagauccuucuguaaagguuuuuggaauuaugucugcugaauaauaaacuuuuuugaaauaauaaaucugguagaaaaaugagaucucaaaggcucuuuucagagccaccaaaaaaaaaaaaaaaaaaaaaaaaaaaaaaaaaaaaaaaaaaaaaaaaaaaaaaaaaaaaaaaaaaaaaaaaaaaaaaaaaaaaaaaaaaaaaaaaaaaaa

SEQ ID NO: 34261 - RNA, 1809 nt, Artificial Sequence
  mRNA product Design b-4 (hSL-A100) comprising derived and/or modified sequence from LASV(LASV1000-NIG-2009;Clade II)__AIT17782__GPCmut8 (opt4)
aggagagucccgcagucggcguccagcggcucugcuuguucgugugugugucguugcaggccuuauucaagcuuaccaugggccagaucaucaccuucuuccaggaggugccccacgugaucgaggaggugaugaacaucgugcugaucgcccugagccugcuggccauccugaagggcaucuacaacguggccaccugcggccuguucggccuggugagcuuccugcugcugugcggcagaagcugcagcaccaccuacaagggcguguacgagcugcagacccuggagcuggacauggccagccugaacaugugcaugccccugagcugcaccaagaacaacagccaccacuacaucauggugggcaacgagaccggccuggagcugacccugaccaacaccagcaucaucaaccacaaguucugcaaccugagcgacgcccacaagaagaaccuguacgaccacgcccugaugagcaucaucagcaccuuccaccugagcauccccaacuucaaccaguacgaggccaugagcugcgacuucaacggcggcaagaucagcgugcaguacaaccugagccacaccuacgccguggacgccgccaaccacugcggcaccaucgccaacggcgugcugcagaccuucaugagaauggccuggggcggcagcuacaucgcccuggacagcggcaagggcagcugggacugcaucaugaccagcuaccaguaccugaucauccagaacaccaccugggaggaccacugccaguucagcagacccagccccaucggcuaccugggccugcugagccagagaaccagagacaucuacaucagcagaagacugcugggcaccuucaccuggacccugagcgacagcgagggcaacgagacccccggcggcuacugccugaccagauggaugcugaucgaggccgagcugaagugcuucggcaacaccgccguggccaagugcaacgagaagcacgacgaggaguucugcgacaugcugagacuguucgacuucugcaagcaggccaucaagagacugaagacccccgcccagaugagcauccagcugaucaacaaggccgugaacgcccugaucaacgaccagcugaucaugaagaaccaccugagagacaucaugggcauccccuacugcaacuacagcaaguacugcuaccugaaccacaccgugaccggcaagaccagccugcccagaugcugccuggugagcaacggcagcuaccugaacgagacccacuucagcgacgacaucgagcagcaggccgacaacaugaucaccgagcugcugcagaaggaguacaucgacagacagggcaagaccccccugggccugguggaccuguucguguucagcaccagcuucuaccugaucagcaucuuccugcaccuggugaagauccccacccacagacacguggugggcaagcccugccccaagccccacagacugaaccacaugggcaucugcagcugcggccuguacaagcaccccggcgugcccgugaaguggaagagaugaggacuaguaauaaggaaacuguaugaaugucugugggcaggaagugaagagauccuucuguaaagguuuuuggaauuaugucugcugaauaauaaacuuuuuugaaauaauaaaucugguagaaaaaugagaucucaaaggcucuuuucagagccaccaaaaaaaaaaaaaaaaaaaaaaaaaaaaaaaaaaaaaaaaaaaaaaaaaaaaaaaaaaaaaaaaaaaaaaaaaaaaaaaaaaaaaaaaaaaaaaaaaaaaa

SEQ ID NO: 34262 - RNA, 1809 nt, Artificial Sequence
  mRNA product Design b-4 (hSL-A100) comprising derived and/or modified sequence from LASV(LASV221-NIG-2010;Clade II)__AIT17624__GPCmut8 (opt4)
aggagagucccgcagucggcguccagcggcucugcuuguucgugugugugucguugcaggccuuauucaagcuuaccaugggccagaucaucaccuucuuccaggaggugccccacgugaucgaggaggugaugaacaucgugcugaucgcccugagccugcuggccauccugaagggcaucuacaacguggccaccugcggccuguucggccuggugagcuuccugcugcugugcggcagaagcugcagcaccaccuacaagggcguguacgagcugcagacccuggagcuggacauggccagccugaacaugugcaugccccugagcugcaccaagaacaacagccaccacuacaucauggugggcaacgagaccggccuggagcugacccugaccaacaccagcaucaucaaccacaaguucugcaaccugagcgacgcccacaagaagaaccuguacgaccacgcccugaugagcaucaucagcaccuuccaccugagcauccccaacuucaaccaguacgaggccaugagcugcgacuucaacggcggcaagaucagcgugcaguacaaccugagccacaccuacgccaucgacgccgccaaccacugcggcaccaucgccaacggcgugcugcagaccuucaugagaauggccuggggcggcagcuacaucgcccuggacagcggcaagggcagcugggacugcaucaugaccagcuaccaguaccugaucauccagaacaccaccugggaggaccacugccaguucagcagacccagccccaucggcuaccugggccugcugagccagagaaccagagacaucuacaucagcagaagacugcugggcaccuucaccuggacccugagcgacagcgagggcaacgagacccccggcggcuacugccugaccagauggaugcugaucgaggccgagcugaagugcuucggcaacaccgccguggccaagugcaacgagaagcacgacgaggaguucugcgacaugcugagacuguucgacuucugcaagcaggccaucagaagacugaagacccccgcccagaugagcauccagcugaucaacaaggccgugaacgcccugaucaacgaccagcugaucaugaagaaccaccugagagacaucaugggcauccccuacugcaacuacagcaaguacugcuaccugaaccacaccgugaccggcaagaccagccugcccagaugcugccuggugagcaacggcagcuaccugaacgagacccacuucagcgacgacaucgagcagcaggccgacaacaugaucaccgagaugcugcagaaggaguacauggacagacagggcaagaccccccugggccugguggaccuguucguguucagcaccagcuucuaccugaucagcaucuuccugcaccuggugaagauccccacccacagacacgugaucggcaagcccugccccaagccccacagacugaaccacaugggcaucugcagcugcggccuguacaagcaccccggcgugcccgugaaguggaagagaugaggacuaguaauaaggaaacuguaugaaugucugugggcaggaagugaagagauccuucuguaaagguuuuuggaauuaugucugcugaauaauaaacuuuuuugaaauaauaaaucugguagaaaaaugagaucucaaaggcucuuuucagagccaccaaaaaaaaaaaaaaaaaaaaaaaaaaaaaaaaaaaaaaaaaaaaaaaaaaaaaaaaaaaaaaaaaaaaaaaaaaaaaaaaaaaaaaaaaaaaaaaaaaaaa

SEQ ID NO: 34263 - RNA, 1809 nt, Artificial Sequence
  mRNA product Design b-4 (hSL-A100) comprising derived and/or modified sequence from LASV(LASV237-NIG-2010;Clade II)__AIT17638__GPCmut8 (opt4)
aggagagucccgcagucggcguccagcggcucugcuuguucgugugugugucguugcaggccuuauucaagcuuaccaugggccagaucaucaccuucuuccaggaggugccccacgugaucgaggaggugaugaacaucgugcugaucgcccugagccugcuggccauccugaagggcaucuacaacguggccaccugcggccuguucggccuggugagcuuccugcugcugugcggcagaagcugcagcaccaccuacaagggcguguacgagcugcagacccuggagcuggacauggccagccugaacaugugcaugccccugagcugcaccaagaacaacagccaccacuacaucauggugggcaacgagaccggccuggagcugacccugaccaacaccagcaucaucaaccacaaguucugcaaccugagcgacgcccacaagaaggaccuguacgaccacgcccugaugagcaucaucagcaccuuccaccugagcauccccaacuucaaccaguacgaggccaugagcugcgacuucaacggcggcaagaucagcgugcaguacaaccugagccacaccuacgccguggacgccgccaaccacugcggcaccaucgccaacggcgugcugcagaccuucaugagaauggccuggggcggcagcuacaucgcccuggacagcggcaagggcagcugggacugcaucaugaccagcuaccaguaccugaucauccagaacaccaccugggaggaccacugccaguucagcagacccagccccaucggcuaccugggccugcugagccagagaaccagagacaucuacaucagcagaagacugcugggcaccuucaccuggacccugagcgacagcgagggcaacgagacccccggcggcuacugccugaccagauggaugcugaucgaggccgagcugaagugcuucggcaacaccgccguggccaagugcaacgagaagcacgacgaggaguucugcgacaugcugagacuguucgacuucugcaagcaggccaucagaagacugaagacccccgcccagaugagcauccagcugaucaacaaggccgugaacgcccugaucaacgaccagcugaucaugaagaaccaccugagagacaucaugggcauccccuacugcaacuacagcaaguacugcuaccugaaccacaccgugaccggcaagaccagccugcccagaugcugccuggugagcaacggcagcuaccugaacgagacccacuucagcgacgacaucgagcagcaggccgacaacaugaucaccgagcugcugcagaaggaguacauggacagacagggcaagaccccccugggccugguggaccuguucguguucagcaccagcuucuaccugaucagcaucuuccugcaccugaucaagauccccacccacagacacaucaccggcaagcccugccccaagccccacagacugaaccacaugggcaucugcagcugcggccuguacaagcaccccggcgugcccgugaaguggaagagaugaggacuaguaauaaggaaacuguaugaaugucugugggcaggaagugaagagauccuucuguaaagguuuuuggaauuaugucugcugaauaauaaacuuuuuugaaauaauaaaucugguagaaaaaugagaucucaaaggcucuuuucagagccaccaaaaaaaaaaaaaaaaaaaaaaaaaaaaaaaaaaaaaaaaaaaaaaaaaaaaaaaaaaaaaaaaaaaaaaaaaaaaaaaaaaaaaaaaaaaaaaaaaaaaa

SEQ ID NO: 34264 - RNA, 1809 nt, Artificial Sequence
  mRNA product Design b-4 (hSL-A100) comprising derived and/or modified sequence from LASV(LASV253-NIG-2011;Clade II)__AIT17670__GPCmut8 (opt4)
aggagagucccgcagucggcguccagcggcucugcuuguucgugugugugucguugcaggccuuauucaagcuuaccaugggccagaucaucaccuucuuccaggaggugccccacgugaucgaggaggugaugaacaucgugcugaucgcccugagccugcuggccauccugaagggcaucuacaacguggccaccugcggccuguucggccuggugagcuuccugcugcugugcggcagaagcugcagcaccaccuacaagggcguguacgagcugcagacccuggagcuggacauggccagccugaacaugugcaugccccugagcugcaccaagaacaacagccaccacuacaucauggugggcaacgagaccggccuggagcugacccugaccaacaccagcaucaucaaccacaaguucugcaaccugagcgacgcccacaagaagaaccuguacgaccacgcccugaugagcaucaucagcaccuuccaccugagcauccccaacuucaaccaguacgaggccaugagcugcgacuucaacggcggcaagaucagcgugcaguacaaccugagccacaccuacgccguggacgccgccaaccacugcggcaccaucgccaacggcgugcugcagaccuucaugagaauggccuggggcggcagcuacaucgcccuggacagcggcaagggcagcugggacugcaucaugaccagcuaccaguaccugaucauccagaacaccaccugggaggaccacugccaguucagcagacccagccccaucggcuaccugggccugcugagccagagaaccagagacaucuacaucagcagaagacugcugggcaccuucaccuggacccugagcgacagcgagggcaacgagacccccggcggcuacugccugaccagauggaugcugaucgaggccgagcugaagugcuucggcaacaccgccguggccaagugcaacgagaagcacgacgaggaguucugcgacaugcugagacuguucgacuucugcaagcaggccaucagaagacugaaggcccccgcccagaugagcauccagcugaucaacaaggccgugaacgcccugaucaacgaccagcugaucaugaagaaccaccugagagacaucaugggcauccccuacugcaacuacagcaaguacugcuaccugaaccacaccgugaccggcagaaccagccugcccagaugcugccuggugagcaacggcagcuaccugaacgagacccacuucagcgacgacaucgagcagcaggccgacaacaugaucaccgagcugcugcagaaggaguacaucgacagacagggcaagaccccccugggccugguggaccuguucguguucagcaccagcuucuaccugaucagcaucuuccugcaccuggugaagauccccacccacagacacaucaucggcaagcccugccccaagccccacagacugaaccacaugggcaucugcagcugcggccuguacaagcaccccggcgugcccgugaaguggaagagaugaggacuaguaauaaggaaacuguaugaaugucugugggcaggaagugaagagauccuucuguaaagguuuuuggaauuaugucugcugaauaauaaacuuuuuugaaauaauaaaucugguagaaaaaugagaucucaaaggcucuuuucagagccaccaaaaaaaaaaaaaaaaaaaaaaaaaaaaaaaaaaaaaaaaaaaaaaaaaaaaaaaaaaaaaaaaaaaaaaaaaaaaaaaaaaaaaaaaaaaaaaaaaaaaa

SEQ ID NO: 34265 - RNA, 1809 nt, Artificial Sequence
  mRNA product Design b-4 (hSL-A100) comprising derived and/or modified sequence from LASV(LASV254-NIG-2011;Clade II)__AIT17674__GPCmut8 (opt4)
aggagagucccgcagucggcguccagcggcucugcuuguucgugugugugucguugcaggccuuauucaagcuuaccaugggccagaucaucaccuucuuccaggaggugccccacgugaucgaggaggugaugaacaucgugcugaucgcccugagccugcuggccauccugaagggcaucuacaacguggccaccugcggccuguucggccuggugagcuuccugcugcugugcggcagaagcugcagcaccaccuacaagggcguguacgagcugcagacccuggagcuggacaugaccaaccugaacaugugcaugccccugagcugcaccaagaacaacagccaccacuacaucauggugggcaacgagaccggccuggagcugacccugaccaacaccagcaucaucaaccacaaguucugcaaccugagcgacgcccacaagaagaaccuguacaaccacgcccugaugagcaucaucagcaccuuccaccugagcauccccaacuucaaccaguacgaggccaugagcugcgacuucaacggcggcaagaucagcgugcaguacaaccugagccacagcuacgccguggacgccgccaaccacugcggcaccaucgccaacggcgugcugcagaccuucaugagaauggccuggggcggcagcuacaucgcccuggacagcggcaagggcaacugggacugcaucaugaccagcuaccaguaccugaucauccagaacaccaccugggaggaccacugccaguucagcagacccagccccaucggcuaccugggccugcugagccagagaaccagagacaucuacaucagcagaagacugcugggcaccuucaccuggacccugagcgacagcgagggcaacgagacccccggcggcuacugccugaccagauggaugcugaucgaggccgagcugaagugcuucggcaacaccgccguggccaagugcaacgagaagcacgacgaggaguucugcgacaugcugagacuguucgacuucugcaagcaggccaucagaagacugaagacccccgcccaggccaacauccagcugaucaacaaggccgugaacgcccugaucaacgaccagcugaucaugaagaaccaccugagagacaucaugggcauccccuacugcaacuacagcaaguacugcuaccugaaccacaccgugaccggcaagaccagccugcccagaugcugccuggugagcaacggcagcuaccugaacgagacccacuucagcgacgacaucgagcagcaggccgacaacaugaucaccgagcugcugcagaaggaguacauggacagacagggcaagaccccccugggccugguggaccuguucguguucagcaccagcuucuaccugaucagcaucuuccugcaccuggugaagauccccacccacagacacgugaucggcaagcccugccccaagccccacagacugaaccacaugggcaucugcagcugcggccuguacaagcaccccggcgugcccgugaaguggaagagaugaggacuaguaauaaggaaacuguaugaaugucugugggcaggaagugaagagauccuucuguaaagguuuuuggaauuaugucugcugaauaauaaacuuuuuugaaauaauaaaucugguagaaaaaugagaucucaaaggcucuuuucagagccaccaaaaaaaaaaaaaaaaaaaaaaaaaaaaaaaaaaaaaaaaaaaaaaaaaaaaaaaaaaaaaaaaaaaaaaaaaaaaaaaaaaaaaaaaaaaaaaaaaaaaa

SEQ ID NO: 34266 - RNA, 1809 nt, Artificial Sequence
  mRNA product Design b-4 (hSL-A100) comprising derived and/or modified sequence from LASV(Nig08-A19;Clade III)__ADU56618__GPCmut8 (opt4)
aggagagucccgcagucggcguccagcggcucugcuuguucgugugugugucguugcaggccuuauucaagcuuaccaugggccagaucgugaccuucuuccaggaggugccccacgugaucgaggaggugaugaacaucgugcugaucgcccugagcauccuggccauccugaagggccuguacaacaucgccaccugcggccugaucggccuggugaccuuccugcugcugagcggcagaagcugcagcaugaccuacaagggcguguacgagcugcagacccuggagcugaacaugaacacccugaacaugugcaugccccugagcugcaccaagaacaacagccaccacuacaucauggugggcaacgagaccggccuggagcugacccugaccaacaccagccugcugcaccacaaguucugcaaccugagcgacgcccacaagaagaaccuguacgaccacacccugaugagcaucaucagcaccuuccaccugagcauccccaacuucaaccaguacgaggccaugagcugcgacuucaacggcggcaagaucaccgugcaguacaaccugagccacagcuacgccaucgacgccgccaaccacugcggcaccguggccaacggcgugcugcagaccuucaugagaauggccuggggcggcagcuacaucgcccuggacagcggcagaggcaagugggacugcaucaugaccagcuaccaguaccugaucauccagaacaccaccugggaggaccacugccaguucagcagacccagccccaucggcuaccugggccugcugagccagagaaccagagacaucuacaucagcagaagacugcugggcaccuucaccuggacccugagcgacagcgagggcaacgagacccccggcggcuacugccugaccagauggaugcugaucgaggccgagcugaagugcuucggcaacaccgccguggccaagugcaacgagaagcacgacgaggaguucugcgacaugcugagacuguucgacuucugcaagcaggccaucagaagacugaaggcccccgcccagaugagcauccagcugaucaacaaggccgugaacgcccugaucaacgaccagcugaucaugaagaaccaccugagagacaucaugggcauccccuacugcaacuacagcaaguacugcuaccugaaccacaccagcaccggcagaaccagccugcccagaugcugccuggugagcaacggcagcuaccugaacgagacccacuucagcgacgacaucgagcagcaggccgacaacaugaucaccgagaugcugcagaaggaguaccuggacagacagggcaagaccccccugggccugguggaccuguucguguucagcaccagcuucuaccugaucagcaucuuccugcaccuggugaagauccccacccacagacacaucgugggcaagcccugccccaagccccacagacugaaccacaugggcaucugcagcugcggccuguacaagcagcccggcgugcccgugagauggaagagaugaggacuaguaauaaggaaacuguaugaaugucugugggcaggaagugaagagauccuucuguaaagguuuuuggaauuaugucugcugaauaauaaacuuuuuugaaauaauaaaucugguagaaaaaugagaucucaaaggcucuuuucagagccaccaaaaaaaaaaaaaaaaaaaaaaaaaaaaaaaaaaaaaaaaaaaaaaaaaaaaaaaaaaaaaaaaaaaaaaaaaaaaaaaaaaaaaaaaaaaaaaaaaaaaa

SEQ ID NO: 34267 - RNA, 1812 nt, Artificial Sequence
  mRNA product Design b-4 (hSL-A100) comprising derived and/or modified sequence from LASV(G1180-SLE-2010;Clade IV)__AIT17168__GPCmut8 (opt4)
aggagagucccgcagucggcguccagcggcucugcuuguucgugugugugucguugcaggccuuauucaagcuuaccaugggccagaucgugaccuucuuccaggaggugccccacgugaucgaggaggugaugaacaucgugcugaucgcccugagcauccuggccgugcugaagggccuguacaacuucgccaccugcggccuggugggccugcugaccuuccugcugcugugcggcagaagcugcaccgccagcagauacaagggcguguacgagcugcagacccuggagcugaacauggagacccugaacaugugcaugccccugagcugcaccaagaacaacagccaccacuacaucauggugggcaacgagaccggccuggagcugacccugaccaacaccagcaucaucaaccacaaguucugcaaccugagcgacgcccacaagaagaaccuguacgaccacgcccugaugagcaucaucagcaccuuccaccugagcauccccaacuucaaccaguacgaggccaugagcugcgacuucaacggcggcaagaucagcgugcaguacaaccugagccacagcuacgccggcgacgccgccaaccacugcggcaccguggccaacggcgugcugcagaccuucaugagaauggccuggggcggcagcuacaucgcccuggacagcggccacggcagcugggacugcaucaugaccagcuaccaguaccugaucauccagaacaccaccugggaggaccacugccaguucagcagacccagccccaucggcuaccugggccugcugagccagagaaccagagacaucuacaucagcagaagacugcugggcaccuucaccuggacccugagcgacagcgagggcaaggacacccccggcggcuacugccugaccagauggaugcugaucgaggccgagcugaagugcuucggcaacaccgccguggccaagugcaacgagaagcacgacgaggaguucugcgacaugcugagacuguucgacuucugcaagcaggccauccagagacugaaggcccccgcccagaugagcauccagcugaucaacaaggccgugaacgcccugaucaacgaccagcugaucaugaagaaccaccugagagacaucaugggcauccccuacugcaacuacagcaaguacugcuaccugaaccacaccaccaccggcaagaccagccugcccaagugcugccuggugagcaacggcagcuaccugaacgagacccacuucagcgacgacaucgagcagcaggccgacaacaugaucaccgagaugcugcagaaggaguacauggagagacagggcaagaccccccugggccugguggaccuguucguguucagcaccagcuucuaccugaucagcaucuuccugcaccuggugaagauccccacccacagacacaucgugggcaagagcugccccaagccccacagacugaaccacaugggcaucugcagcugcggccuguacaagcagcccggcgugcccgugaaguggaagagaugaggacuaguaauaaggaaacuguaugaaugucugugggcaggaagugaagagauccuucuguaaagguuuuuggaauuaugucugcugaauaauaaacuuuuuugaaauaauaaaucugguagaaaaaugagaucucaaaggcucuuuucagagccaccaaaaaaaaaaaaaaaaaaaaaaaaaaaaaaaaaaaaaaaaaaaaaaaaaaaaaaaaaaaaaaaaaaaaaaaaaaaaaaaaaaaaaaaaaaaaaaaaaaaaa

SEQ ID NO: 34268 - RNA, 1812 nt, Artificial Sequence
  mRNA product Design b-4 (hSL-A100) comprising derived and/or modified sequence from LASV(G1442-SLE-2011;Clade IV)__AIT17180__GPCmut8 (opt4)
aggagagucccgcagucggcguccagcggcucugcuuguucgugugugugucguugcaggccuuauucaagcuuaccaugggccagaucgugaccuucuuccaggaggugccccacgugaucgaggaggugaugaacaucgugcugaucgcccugagcauccuggccgugcugaagggccuguacaacguggccaccugcggccugaucggccuggugaccuuccugcugcugugcggcagaagcugcaccaccacccuguacaagggcguguacgagcugcagacccuggagcugaacauggagacccugaacaugugcaugccccugagcugcaccaagaacaacagccaccacuacaucagagugggcaacgagaccggccuggagcugacccugaccaacaccagcaucaucaaccacaaguucugcaaccugagcgacgcccacaagaagaaccuguacgaccacgcccugaugagcaucaucagcaccuuccaccugagcauccccaacuucaaccaguacgaggccaugagcugcgacuucaacggcggcaagaucagcgugcaguacaaccugagccacagcuacgccggcgacgccgccaaccacugcggcaccguggccaacggcgugcugcagaccuucaugagaauggccuggggcggcagcuacaucgcccuggacagcggcagaggcaacugggacugcaucaugaccagcuaccaguaccugaucauccagaacaccaccugggacgaccacugccaguucagcagacccagccccaucggcuaccugggccugcugagccagagaaccagagacguguacaucagcagaagacugcugggcaccuucaccuggacccugagcgacagcgagggcaaggacacccccggcggcuacugccugaccagauggaugcugaucgaggccgagcugaagugcuucggcaacaccgccguggccaagugcaacgagaagcacgacgaggaguucugcgacaugcugagacuguucgacuucugcaagcaggccauccagagacugaaggcccccgcccagaugagcauccagcugaucaacaaggccgugaacgcccugaucaacgaccagcugaucaugaagaaccaccugagagacaucaugggcauccccuacugcaacuacagcaaguacugcuaccugaacaacaccgccaccggcaagaccagccugcccaagugcugccugaucagcaacggcagcuaccugaacgagacccacuucagcgacgacaucgagcaggaggccgacaacaugaucaccgagaugcugcagaaggaguacauggagagacagggcaagaccccccugggccugguggaccuguucguguucagcaccagcuucuaccugaucagcaucuuccugcaccuggugaagauccccacccacagacacaucgugggcaagagcugccccaagccccacagacugaaccacaugggcaucugcagcugcggccuguacaagcagcccggcgugcccgugagauggaagagaugaggacuaguaauaaggaaacuguaugaaugucugugggcaggaagugaagagauccuucuguaaagguuuuuggaauuaugucugcugaauaauaaacuuuuuugaaauaauaaaucugguagaaaaaugagaucucaaaggcucuuuucagagccaccaaaaaaaaaaaaaaaaaaaaaaaaaaaaaaaaaaaaaaaaaaaaaaaaaaaaaaaaaaaaaaaaaaaaaaaaaaaaaaaaaaaaaaaaaaaaaaaaaaaaa

SEQ ID NO: 34269 - RNA, 1812 nt, Artificial Sequence
  mRNA product Design b-4 (hSL-A100) comprising derived and/or modified sequence from LASV(G3010-SLE-2013;Clade IV)__AIT17344__GPCmut8 (opt4)
aggagagucccgcagucggcguccagcggcucugcuuguucgugugugugucguugcaggccuuauucaagcuuaccaugggccagaucgugaccuucuuccaggaggugccccacgugaucgaggaggugaugaacaucgugcugaucgcccugagcauccuggccgugcugaagggccuguacaacuucgccaccugcggccuggugggccuggugaccuuccugcugcugugcggcagaagcugcaccaccagccuguacaagggcguguacgagcugcagacccuggagcugaacauggagacccugaacaugugcaugccccugagcugcaccaagaacaacagccaccacuacaucauggugggcaacgagaccggccuggagcugacccugaccaacaccagcaucaucaaccacaaguucugcaaccugagcgacgcccacaagaagaaccuguacaaccacgcccugaugagcaucaucagcaccuuccaccugagcauccccaacuucaaccaguacgaggccaugagcugcgacuucaacggcggcaagaucagcgugcaguacaaccugagccacagcuacgccggcgacgccgccagccacugcggcaccguggccaacggcgugcugcagaccuucaugagaauggccuggggcggcagcuacaucgcccuggacagcggcuacggcaagugggacugcaucaugaccagcuaccaguaccugaucauccagaacaccaccugggaggaccacugccaguucagcagacccagccccaucggcuaccugggccugcugagccagagaaccagagacaucuacaucagcagaagacugcugggcaccuucaccuggacccugagcgacagcgagggcaaggacacccccggcggcuacugccugaccagauggaugcugaucgaggccgagcugaagugcuucggcaacaccgccguggccaagugcaacgagaagcacgacgaggaguucugcgacaugcugagacuguucgacuucugcaagcaggccauccagagacugaagacccccgcccagaugagcauccagcugaucaacaaggccgugaacgcccugaucaacgaccagcugaucaugaagaaccaccugagagacaucaugggcauccccuacugcaacuacagcaaguacugcuaccugaaccacaccaccaccggcaagaccagccugcccaagugcugccuggugagcaacggcagcuaccugaacgagacccacuucagcgacgacaucgagcagcaggccgacaacaugaucaccgagaugcugcagaaggaguacauggagagacagggcaagaccccccugggccugguggaccuguucguguucagcaccagcuucuaccugaucagcaucuuccugcaccuggugaagauccccacccacagacacaucgugggcaagagcugccccaagccccacagacugaaccacaugggcaucugcagcugcggccuguacaagcagcccggcgugcccgugagauggaagagaugaggacuaguaauaaggaaacuguaugaaugucugugggcaggaagugaagagauccuucuguaaagguuuuuggaauuaugucugcugaauaauaaacuuuuuugaaauaauaaaucugguagaaaaaugagaucucaaaggcucuuuucagagccaccaaaaaaaaaaaaaaaaaaaaaaaaaaaaaaaaaaaaaaaaaaaaaaaaaaaaaaaaaaaaaaaaaaaaaaaaaaaaaaaaaaaaaaaaaaaaaaaaaaaaa

SEQ ID NO: 34270 - RNA, 1812 nt, Artificial Sequence
  mRNA product Design b-4 (hSL-A100) comprising derived and/or modified sequence from LASV(G502-SLE-2009;Clade IV)__AIT17126__GPCmut8 (opt4)
aggagagucccgcagucggcguccagcggcucugcuuguucgugugugugucguugcaggccuuauucaagcuuaccaugggccagaucgugaccuucuuccaggaggugccccacgugaucgaggaggugaugaacaucgugcugaucgcccugagcauccuggccgugcugaagggccuguacaacuucgccaccugcggccuggugggccugcugaccuuccugcugcugugcggcagaagcugcaccaccggccuguacaagggcguguacgagcugcagacccuggagcugaacauggagacccugaacaugugcaugccccugagcugcaccaagaacaacagccaccacuacaucauggugggcaacgagaccggccuggagcugacccugaccaacaccagcaucaucaaccacaaguucugcaaccugagcgacgcccacaagaagaaccuguacgaccacgcccugaugagcaucaucagcaccuuccaccugagcauccccaacuucaaccaguacgaggccaugagcugcgacuucaacggcggcaagaucagcgugcaguacaaccugagccacagcuacgccggcgacgccgccgaccacugcggcaccguggccaacggcgugcugcagaccuucaugagaauggccuggggcggcagcuacaucgcccuggacagcggcagaggcagaugggacugcaucaugaccagcuaccaguaccugaucauccagaacaccaccugggaggaccacugccaguucagcagacccagccccaucggcuaccugggccugcugagccagagaaccagagacaucuacaucagcagaagacugcugggcaccuucaccuggacccugagcgacagcgagggcaaggacacccccggcggcuacugccugaccagauggaugcugaucgaggccgagcugaagugcuucggcaacaccgccguggccaagugcaacgagaagcacgacgaggaguucugcgacaugcugagacuguucgacuucugcaagcaggccauccagagacugaaggcccccgcccagaugagcauccagcugaucaacaaggccgugaacgcccugaucaacgaccagcuggugaugaagaaccaccugagagacaucaugggcauccccuacugcaacuacagcagauacugcuaccugaaccacaccaccaccggcagaaccagccugcccaagugcugccuggugagcaacggcagcuaccugaacgagacccacuucagcgacgacaucgagcagcaggccgacaacaugaucaccgagaugcugcagaaggaguacauggagagacagggcaagaccccccugggccugguggaccuguucguguucagcaccagcuucuaccugaucagcaucuuccugcaccuggugaagauccccacccacagacacaucgugggcaagagcugccccaagccccacagacugaaccacaugggcaucugcagcugcggccuguacaagcagcccggcgugcccgugaaguggaagagaugaggacuaguaauaaggaaacuguaugaaugucugugggcaggaagugaagagauccuucuguaaagguuuuuggaauuaugucugcugaauaauaaacuuuuuugaaauaauaaaucugguagaaaaaugagaucucaaaggcucuuuucagagccaccaaaaaaaaaaaaaaaaaaaaaaaaaaaaaaaaaaaaaaaaaaaaaaaaaaaaaaaaaaaaaaaaaaaaaaaaaaaaaaaaaaaaaaaaaaaaaaaaaaaaa

SEQ ID NO: 34271 - RNA, 1812 nt, Artificial Sequence
  mRNA product Design b-4 (hSL-A100) comprising derived and/or modified sequence from LASV(G733-SLE-2010;Clade IV)__AIT17154__GPCmut8 (opt4)
aggagagucccgcagucggcguccagcggcucugcuuguucgugugugugucguugcaggccuuauucaagcuuaccaugggccagaucgugaccuucuuccaggaggugccccacgugaucgaggaggugaugaacaucgugcugaucgcccugagcauccuggccgugcugaagggccuguacaacuucgccaccugcggcaucgugggccuggugagcuuccugcugcugugcggcagaagcugcaccaccagccuguacaagggcguguacgagcugcagacccuggagcugaacauggagacccugaacaugugcaugccccugagcugcaccaagaacaacagccaccacuacaucauggugggcaacgagaccggccuggagcugacccugaccaacaccagcaucaucaaccacaaguucugcaaccugagcgacgcccacaagaagaaccuguacgaccacgcccugaugagcaucaucagcaccuuccaccugagcauccccaacuucaaccaguacgaggccaugagcugcgacuucaacggcggcaagaucagcgugcaguacaaccugagccacagcuacgccggcgacgccgccaaccacugcggcaccaucgccaacggcgugcugcagaccuucaugagaauggccuggggcggcagcuacaucgcccuggacagcggcagagacagaugggacugcaucaugaccagcuaccaguaccugaucauccagaacaccaccugggaggaccacugccaguucagcagacccagccccaucggcuaccugggccugcugagccagagaaccagagacaucuacaucagcagaagacugcugggcaccuucaccuggacccugagcgacagcgagggcaaggacacccccggcggcuacugccugaccagauggaugcugaucgaggccgagcugaagugcuucggcaacaccgccguggccaagugcaacgagaagcacgacgaggaguucugcgacaugcugagacuguucgacuucugcaagcaggccauccagagacugaaggcccccgcccagaugagcauccagcugaucaacaaggccgugaacgcccugaucaacgaccagcugaucaugaagaaccaccugagagacaucaugggcauccccuacugcaacuacagcaaguacugcuaccugaaccacaccaccaccggcaagaccagccugcccaagugcugccuggugagcaacggcagcuaccugaacgagacccacuucagcgacgacaucgagcagcaggccgacaacaugaucaccgagaugcugcagaaggaguacauggagagacagggcaagaccccccugggccugguggaccuguucguguucagcaccagcuucuaccugaucagcaucuuccugcaccuggugaagauccccacccacagacacguggugggcaagagcugccccaagccccacagacugaaccacaugggcaucugcagcugcggccuguacggccagcccggcgugcccgugaaguggaagagaugaggacuaguaauaaggaaacuguaugaaugucugugggcaggaagugaagagauccuucuguaaagguuuuuggaauuaugucugcugaauaauaaacuuuuuugaaauaauaaaucugguagaaaaaugagaucucaaaggcucuuuucagagccaccaaaaaaaaaaaaaaaaaaaaaaaaaaaaaaaaaaaaaaaaaaaaaaaaaaaaaaaaaaaaaaaaaaaaaaaaaaaaaaaaaaaaaaaaaaaaaaaaaaaaa

SEQ ID NO: 34272 - RNA, 1812 nt, Artificial Sequence
  mRNA product Design b-4 (hSL-A100) comprising derived and/or modified sequence from MOPV/LASV reassortant(IGS-1;Clade IV)__AFY05576__GPCmut8 (opt4)
aggagagucccgcagucggcguccagcggcucugcuuguucgugugugugucguugcaggccuuauucaagcuuaccaugggccagaucgugaccuucuuccaggaggugccccacgugaucgaggaggugaugaacaucgugcugaucgcccugagcgugcuggccgugcugaagggccuguacaacuucgccaccugcggccuggugggccuggugaccuuccugcugcugugcggcagaagcugcaccaccagccuguacaagggcguguacgagcugcagacccuggagcugaacauggagacccugaacaugugcaugccccugagcugcaccaagaacaacagccaccacuacaucauggugggcaacgagaccggccuggagcugacccugaccaacaccagcaucaucaaccacaaguucugcaaccugagcgacgcccacaagaagaaccuguacgaccacgcccugaugagcaucaucagcaccuuccaccugagcauccccaacuucaaccaguacgaggccaugagcugcgacuucaacggcggcaagaucagcgugcaguacaaccugagccacagcuacgccggcgacgccgccaaccacugcggcaccguggccaacggcgugcugcagaccuucaugagaauggccuggggcggcagcuacaucgcccuggacagcggcagaggcaacugggacugcaucaugaccagcuaccaguaccugaucauccagaacaccaccugggaggaccacugccaguucagcagacccagccccaucggcuaccugggccugcugagccagagaaccagagacaucuacaucagcagaagacugcugggcaccuucaccuggacccugagcgacagcgagggcgaggacacccccggcggcuacugccugaccagauggaugcugaucgaggccgagcugaagugcuucggcaacaccgccguggccaagugcaacgagaagcacgacgaggaguucugcgacaugcugagacuguucgacuucugcaagcaggccauccagagacugaaggcccccgcccagaugagcauccagcugaucaacaaggccgugaacgcccugaucaacgaccagcugaucaugaagaaccaccugagagacaucaugggcauccccuacugcaacuacagcaaguacugcuaccugaaccacaccaccaccggcagaaccagccugcccaagugcugccuggugagcaacggcagcuaccugaacgagacccacuucagcgacgacaucgagcagcaggccgacaacaugaucaccgagaugcugcagaaggaguacauggagagacagggcaagaccccccugggccugguggaccuguucguguucagcaccagcuucuaccugaucagcaucuuccugcaccuggugaagauccccacccacagacacaucgugggcaagagcugccccaagccccacagacugaaccacaugggcaucugcagcugcggccuguacaagcagcccggcgugcccgugaaguggaagagaugaggacuaguaauaaggaaacuguaugaaugucugugggcaggaagugaagagauccuucuguaaagguuuuuggaauuaugucugcugaauaauaaacuuuuuugaaauaauaaaucugguagaaaaaugagaucucaaaggcucuuuucagagccaccaaaaaaaaaaaaaaaaaaaaaaaaaaaaaaaaaaaaaaaaaaaaaaaaaaaaaaaaaaaaaaaaaaaaaaaaaaaaaaaaaaaaaaaaaaaaaaaaaaaaa

SEQ ID NO: 34273 - RNA, 1812 nt, Artificial Sequence
  mRNA product Design b-4 (hSL-A100) comprising derived and/or modified sequence from LASV(LM765-SLE-2012;Clade IV)__AIT17814__GPCmut8 (opt4)
aggagagucccgcagucggcguccagcggcucugcuuguucgugugugugucguugcaggccuuauucaagcuuaccaugggccagaucgugaccuucuuccaggaggugccccacgugaucgaggaggugaugaacaucgugcugaucgcccugagcauccuggccgugcugaagggccuguacaacuucgccaccugcggccuggugggccuggugaccuuccugcugcugugcggcagaagcugcaccaccagccuguacaagggcguguacgagcugcagacccuggagcugaacauggagacccugaacaugugcaugccccugagcugcaccaagaacaacagccaccacuacaucauggugggcaacgagaccggccuggagcugacccugaccaacaccagcaucaucgaccacaaguucugcaaccugagcgacgcccacagaaagaaccuguacgaccacgcccugaugagcaucaucagcaccuuccaccugagcauccccaacuucaaccaguacgaggccaugagcugcgacuucaacggcggcaagaucagcgugcaguacaaccugagccacagcuacgccaaggacgccgccgaccacugcggcaccguggccaacggcgugcugcagaccuucaugagaauggccuggggcggcagcuacaucgcccuggacagcggcagaggcagaugggacugcaucaugaccagcuaccaguaccugaucauccagaacaccaccugggaggaccacugccaguucagcagacccagccccaucggcuaccugggccugcugagccagagaaccagagacaucuacaucagcagaagacugcugggcaccuucaccuggacccugagcgacagcgagggcaaggacacccccggcggcuacugccugaccagauggaugcugaucgaggccgagcugaagugcuucggcaacaccgccguggccaagugcaacgagaagcacgacgaggaguucugcgacaugcugagacuguucgacuucugcaagcaggccauccagagacugaaggcccccgcccagaugagcauccagcugaucaacaaggccgugaacgcccugaucaacgaccagcugaucaugaagaaccaccugagagacaucaugggcauccccuacugcaacuacagcaaguacugcuaccugaaccacaccaccaccggcaagaccagccugcccaagugcugccuggugagcaacggcagcuaccugaacgagacccacuucagcgacgacaucgagcagcaggccgacaacaugaucaccgagaugcugcagaaggaguacauggagagacagggcaagaccccccugggccugguggaccuguucguguucagcaccagcuucuaccugaucagcaucuuccugcaccuggugaagauccccacccacagacacaucgugggcaagcccugccccaagccccacagacugaaccacaugggcaucugcagcugcggccuguacaagcagcccggcgugcccgugaaguggaagagaugaggacuaguaauaaggaaacuguaugaaugucugugggcaggaagugaagagauccuucuguaaagguuuuuggaauuaugucugcugaauaauaaacuuuuuugaaauaauaaaucugguagaaaaaugagaucucaaaggcucuuuucagagccaccaaaaaaaaaaaaaaaaaaaaaaaaaaaaaaaaaaaaaaaaaaaaaaaaaaaaaaaaaaaaaaaaaaaaaaaaaaaaaaaaaaaaaaaaaaaaaaaaaaaaa

SEQ ID NO: 34274 - RNA, 1812 nt, Artificial Sequence
  mRNA product Design b-4 (hSL-A100) comprising derived and/or modified sequence from LASV(LM776-SLE-2012;Clade IV)__AIT17824__GPCmut8 (opt4)
aggagagucccgcagucggcguccagcggcucugcuuguucgugugugugucguugcaggccuuauucaagcuuaccaugggccagaucgugaccuucuuccaggaggugccccacgugaucgaggaggugaugaacaucgugcugaucgcccugagcauccuggccgugcugaagggccuguacaacuucgccaccugcggccuggugggccuggugaccuuccugcugcugugcggcagaagcugcaccaccagcguguacaagggcguguacgagcugcagacccuggagcugaacauggagacccugaacaugugcaugccccugagcugcaccaagaacaacagccaccacuacaucauggugggcaacgagaccggccuggagcugacccugaccaacaccagcaucaucaaccacaaguucugcaaccugagcgacgcccacaagaagaaccuguacgaccacgcccugaugagcaucaucagcaccuuccaccugagcauccccaacuucaaccaguacgaggccaugagcugcgacuucaacggcggcaagaucagcgugcaguacaaccugagccacagcuacgccggcgacgccgccaaccacugcggcaccguggccaacggcgugcugcagaccuucaugagaauggccuggggcggcagcuacaucgcccuggacagcggccacggcaagugggacugcaucaugaccagcuaccaguaccugaucauccagaacaccaccugggaggaccacugccaguucagcagacccagccccaucggcuaccugggccugcugagccagagaaccagagacaucuacaucagcagaagacugcugggcaccuucaccuggacccugagcgacagcgagggcaaggacacccccggcggcuacugccugaccagauggaugcugaucgaggccgagcugaagugcuucggcaacaccgccguggccaagugcaacgagaagcacgacgaggaguucugcgacaugcugagacuguucgacuucugcaagcaggccauccagagacugaaggcccccgcccagaugagcauccagcugaucaacaaggccgugaacgcccugaucaacgaccagcugaucaugaagaaccaccugagagacaucaugggcauccccuacugcaacuacagcaaguacugcuaccugaaccacaccaccaccggcaagaccagccugcccaagugcugccuggugagcaacggcagcuaccugaacgagacccacuucagcgacgacaucgagcagcaggccgacaacaugaucaccgagaugcugcagaaggaguacauggagagacagggcaagaccccccugggccugguggaccuguucguguucagcaccagcuucuaccugaucagcaucuuccugcaccuggugaagauccccacccacagacacaucgugggcaagagcugccccaagccccacagacugaaccacaugggcaucugcagcugcggccuguacaagcagcccggcgugcccgugagauggaagagaugaggacuaguaauaaggaaacuguaugaaugucugugggcaggaagugaagagauccuucuguaaagguuuuuggaauuaugucugcugaauaauaaacuuuuuugaaauaauaaaucugguagaaaaaugagaucucaaaggcucuuuucagagccaccaaaaaaaaaaaaaaaaaaaaaaaaaaaaaaaaaaaaaaaaaaaaaaaaaaaaaaaaaaaaaaaaaaaaaaaaaaaaaaaaaaaaaaaaaaaaaaaaaaaaa

SEQ ID NO: 34275 - RNA, 1812 nt, Artificial Sequence
  mRNA product Design b-4 (hSL-A100) comprising derived and/or modified sequence from LASV(Mad39;Clade IV)__ANH09722__GPCmut8 (opt4)
aggagagucccgcagucggcguccagcggcucugcuuguucgugugugugucguugcaggccuuauucaagcuuaccaugggccagaucgugaccuucuuccaggaggugccccacgugaucgaggaggugaugaacaucgugcugaucgcccugagcauccuggccgugcugaagggccuguacaacguggccaccugcggccugaucggccuggugaccuuccugcugcugugcggcagaagcugcaccaccacccuguacaagggcguguacgagcugcaggcccuggagcugaacauggagacccugaacaugugcaugccccugagcugcaccaagaacaacagccaccacuacaucagagugggcaacgagaccggccuggagcugacccugaccaacaccagccugaucaaccacaaguucugcaaccugagcgacgcccacaagaagaaccuguacgaccacgcccugaugagcaucaucagcaccuuccaccugagcauccccaacuucaaccaguacgaggccaugagcugcgacuucaacgacggcaagaucagcgugcaguacaaccugagccacaccuacgccggcgacaccgccaaccacugcggcaccguggccaacggcgugcugcagaccuucaugagaauggccuggggcggcagcuacaucgcccuggacagcggcagaggcggcugggacugcaucaugaccagcuaccaguaccugaucauccagaacaccaccugggaggaccacugccaguucagcagacccagccccaucggcuaccugggccugcugagccagagaaccagagacaucuacaucagcagaagacugcugggcaccuucaccuggacccugagcgacagcgagggcaaggacacccccggcggcuacugccugaccagauggaugcugaucgaggccgagcugaagugcuucggcaacaccgccguggccaagugcaacgagaagcacgacgaggaguucugcgacaugcugagacuguucgacuucugcaagcaggccauccagagacugaaggcccccgcccagaugagcauccagcugaucaacaaggccgugaacgcccugaucaacgaccagcugaucaugaagaaccaccugagagacaucaugggcauccccuacugcaacuacagcaaguacugcuaccugaaccacaccgugaccggcaagaccagccugcccaagugcugccuggugagcaacggcagcuaccugaacgagacccacuucagcgacgacaucgagcagcaggccgacaacaugaucaccgagaugcugcagaaggaguacauggagagacagggcaagaccccccugggccugguggaccuguucguguucagcaccagcuucuaccugaucagcaucuuccugcaccuggugaagauccccacccacagacacguggugggcaagcccugccccaagccccacagacugaaccacaugggcaucugcagcugcggcuucuacaagcagcccggcgugcccgugagauggaagagaugaggacuaguaauaaggaaacuguaugaaugucugugggcaggaagugaagagauccuucuguaaagguuuuuggaauuaugucugcugaauaauaaacuuuuuugaaauaauaaaucugguagaaaaaugagaucucaaaggcucuuuucagagccaccaaaaaaaaaaaaaaaaaaaaaaaaaaaaaaaaaaaaaaaaaaaaaaaaaaaaaaaaaaaaaaaaaaaaaaaaaaaaaaaaaaaaaaaaaaaaaaaaaaaaa

SEQ ID NO: 34276 - RNA, 1812 nt, Artificial Sequence
  mRNA product Design b-4 (hSL-A100) comprising derived and/or modified sequence from LASV(Z0947-SLE-2011;Clade IV)__AIT17840__GPCmut8 (opt4)
aggagagucccgcagucggcguccagcggcucugcuuguucgugugugugucguugcaggccuuauucaagcuuaccaugggccagaucgugaccuucuuccaggaggugccccacgugaucgaggaggugaugaacaucgugcugaucgcccugagcauccuggccgugcugaagggccuguacaacuucgccaccugcggccuggugggccuggugaccuuccugcugcugugcggcagaagcugcaccaucagccuguacaagggcguguacgagcugcagacccuggagcugaacauggagacccugaacaugugcaugccccugagcugcaccaagaacaacagccaccacuacaucauggugggcaacgagaccggccuggagcugacccugaccaacaccagcaucaucaaccacaaguucugcaaccugagcgacgcccacaagaagaaccuguacgaccacgcccugaugagcaucaucagcaccuuccaccugagcauccccaacuucaaccaguacgaggccaugagcugcgacuucaacggcggcaagaucagcgugcaguacaaccugagccacagcuacgccggcgacgccgccaaccacugcggcaccguggccaacggcgugcugcagaccuucaugagaauggccuggggcggcagcuacaucgcccuggacagcggcagagacagaugggacugcaucaugaccagcuaccaguaccugaucauccagaacaccaccugggaggaccacugccaguucagcagacccagccccaucggcuaccugggccugcugagccagagaaccagagacaucuacaucagcagaagacugcugggcaccuucaccuggacccugagcgacagcgagggcaaggacacccccggcggcuacugccugaccagauggaugcugaucgaggccgagcugaagugcuucggcaacaccgccguggccaagugcaacgagaagcacgacgaggaguucugcgacaugcugagacuguucgacuucugcaagcaggccauccagagacugaaggcccccgcccagaugagcauccagcugaucaacaaggccgugaacgcccugaucaacgaccagcugaucaugaagaaccaccugagagacaucaugggcauccccuacugcaacuacagcaaguacugcuaccugaaccacaccaccaccggcaagaccagccugcccaagugcugccuggugagcaacggcagcuaccugaacgagacccacuucagcgacgacaucgagcagcaggccgacaacaugaucaccgagaugcugcagaaggaguacauggagagacagggcaagaccccccugggccugguggaccuguucguguucagcaccagcuucuaccugaucagcaucuuccugcaccuggugaagauccccacccacagacacaucgugggcaagcccugccccaagccccacagacugaaccacaugggcaucugcagcugcggccuguacaagcagcccggcgugcccgugaaguggaagagaugaggacuaguaauaaggaaacuguaugaaugucugugggcaggaagugaagagauccuucuguaaagguuuuuggaauuaugucugcugaauaauaaacuuuuuugaaauaauaaaucugguagaaaaaugagaucucaaaggcucuuuucagagccaccaaaaaaaaaaaaaaaaaaaaaaaaaaaaaaaaaaaaaaaaaaaaaaaaaaaaaaaaaaaaaaaaaaaaaaaaaaaaaaaaaaaaaaaaaaaaaaaaaaaaa

SEQ ID NO: 34277 - RNA, 1812 nt, Artificial Sequence
  mRNA product Design b-4 (hSL-A100) comprising derived and/or modified sequence from LASV(Josiah;Clade IV)__NP_694870__GPCmut8 (opt5)
aggagagucccgcagucggcguccagcggcucugcuuguucgugugugugucguugcaggccuuauucaagcuuaccaugggccagaucgugaccuucuuucaagaggucccccacguuauugaagaggugaugaacaucgugcugauugcccucagcguccuggcugugcuuaaggggcuguacaauuucgccacaugcggacucguuggccuggugacguuucuucugcucugugggagauccugcaccacaucucuguauaaaggagucuacgaacugcagacccucgagcugaacauggaaacacuuaauauguguaugccucugagcugcaccaagaacaauucccaucacuauaucauggugggcaacgagacagggcucgagcugacccuuacgaauaccucuauuaucaaccauaaauucuguaaucugagcgacgcgcacaagaaaaaccucuacgaucaugcucugauguccaucauuucuacauuucaccugagcaucccgaauuucaaccaguaugaagccauguccugcgacuuuaauggaggcaagauuagcguucaguacaaccucucucacuccuaugccggcgaugcugccaaucauugugggaccguggcuaacggaguccugcaaacauucaugcggauggccuggggcgggagcuacaucgcgcuugacucuggacgcggcaacugggauugcauuaugaccuccuaccaguaucugaucauucagaauacgacaugggaggaccacugucaguuuagcagacccucuccuaucggguaccucggacugcuuucccaacggacccgcgauaucuauauuagcagacggcugcucggcacauucaccuggacccuguccgacucugaaggcaaggauacacccgggggauacugccugacgcgcuggaugcucaucgaggccgagcugaaauguuuuggcaacaccgcuguggccaagugcaaugaaaaacaugacgaggaguucugcgauaugcuuagacuguuugacuucuguaagcaggcuauucagcggcucaaagccccugcgcagaugagcauccaacugauuaacaaggccgugaaugcucuuaucaacgaucagcugaucaugaagaaucaccuccgcgacauuauggggauccccuauugcaacuacuccaaauauuguuaccugaaucacacaaccacaggaagaaccagccugccuaagugcugucucgucucuaacggcuccuaccugaaugaaacgcauuucagcgacgauauugaacagcaagccgacaacaugaucacagagaugcuucagaaagaguauauggaacggcaggggaagaccccgcugggacucguugaucuguuuguguucucuaccagcuuuuaccugauuuccaucuuccuucaccucgugaaaauccccacacaucgccacauugucggcaagucuugcccuaaaccccauagacugaaucacaugggcaucuguagcugcgggcuguauaagcagccuggagugcccguuaaguggaaacggugaggacuaguaauaaggaaacuguaugaaugucugugggcaggaagugaagagauccuucuguaaagguuuuuggaauuaugucugcugaauaauaaacuuuuuugaaauaauaaaucugguagaaaaaugagaucucaaaggcucuuuucagagccaccaaaaaaaaaaaaaaaaaaaaaaaaaaaaaaaaaaaaaaaaaaaaaaaaaaaaaaaaaaaaaaaaaaaaaaaaaaaaaaaaaaaaaaaaaaaaaaaaaaaaa

SEQ ID NO: 34278 - RNA, 1809 nt, Artificial Sequence
  mRNA product Design b-4 (hSL-A100) comprising derived and/or modified sequence from LASV(LP;Clade I)__AAF86701__GPCmut8 (opt5)
aggagagucccgcagucggcguccagcggcucugcuuguucgugugugugucguugcaggccuuauucaagcuuaccaugggccagaucauuaccuucuuucaagaggugccccacgucaucgaagagguuaugaacauugugcugaucgcccucagccugcuugcuauucugaaggggcucuacaauaucgccacaugcggaaucauuggccugguggcguuccuuuuucugugugggaaauccugcucucucacgcugaagggaggcuaugaacugcagacccucgagcugaacauggaaacacuuaauauguguaugccucugagcugcaccaaaaacuccucucaucacuacaucagagucgggaaugagacaggacucgagcugacccuuacaaacaccagcauuaucaaucauaaguucuguaaccuguccgacgcucacaaaaagaaucucuaugaucaugcccugaugucuauuaucagcacguuucaccuguccauuccgaacuucaaucaguacgaagccaugagcugcgacuuuaacggcggcaagaucucugugcaguauaaucucucccacagcuacgcuggggaugccgcugagcauuguggaaccguugccaacggcgugcugcaaacauucaugcggauggcguggggagggcgcuauaucgcccuugacucuggcaaagggaauugggauugcauuaugaccuccuaccaguaccugaucauucagaacacaaccugggaagaccacugucaguuuagcagacccucuccuaucggauaucucggccugcuuucccaacggacgcgcgauauuuacaucagcagacggcugcucggcacauucaccuggacacuguccgacucugaggggaacgagacccccggaggcuauugccugacccgcuggaugcucaucgaagcugagcugaaguguuuugggaauacagccgucgcuaaaugcaacgaaaagcaugaugaggaguucugcgacaugcuuagacuguuugauuucuguaaacaggccauucggcgccucaaggcgccugcccagaugagcauccagcugauuaauaaggcugugaacgcccuuaucaaugaccaacugauuaugaaaaaccaccucagagauaucaugggaauccccuacugcaauuauuccaaguacuguuaucugaaccacacgagcucuggccggaccucccugccuaaaugcugucucauuagcaaugggucuuaccugaacgaaacacaguucagcgacgacaucgagcagcaagcugauaauaugauuaccgaaaugcuucagaaggaguacaucgaacgccagggaaaaacaccgcugggccucguugacauuuuuaucuucuccaccucuuuuuaucugauuagcaucuuccugcaucuuaucaagauucccacgcacagacauaucgugggcaaaccuugccccaagccucaccggcucaaccauaugggggucuguuccugcggacuguacaagcaccccggcgugccgacaaaauggaagcgcugaggacuaguaauaaggaaacuguaugaaugucugugggcaggaagugaagagauccuucuguaaagguuuuuggaauuaugucugcugaauaauaaacuuuuuugaaauaauaaaucugguagaaaaaugagaucucaaaggcucuuuucagagccaccaaaaaaaaaaaaaaaaaaaaaaaaaaaaaaaaaaaaaaaaaaaaaaaaaaaaaaaaaaaaaaaaaaaaaaaaaaaaaaaaaaaaaaaaaaaaaaaaaaaaa

SEQ ID NO: 34279 - RNA, 1809 nt, Artificial Sequence
  mRNA product Design b-4 (hSL-A100) comprising derived and/or modified sequence from LASV(803213;Clade II)__AAF86703__GPCmut8 (opt5)
aggagagucccgcagucggcguccagcggcucugcuuguucgugugugugucguugcaggccuuauucaagcuuaccaugggccagaucauuaccuucuuucaagaggugccccacgucaucgaagagguuaugaacauugugcugaucgcccucagccugcuugcuauucugaaggggaucuacaauguggccacaugcggacucuucggccugaucuccuuucuucugcucugugggagaucuugcagcgucacguauaaaggaguguacgaacugcagacccuggagcucaacauggcgaaucugaacauguguaugccucuuuccugcacaaagaauaacucucaucacuauauuaugguuggcaaugaaaccgggcuggagcucacacugaccaacacaagcaucauuaaucauaaauucuguaaccuuuccgacgcucacaagaaaaaucuguacgaucaugcccucaugucuaucauuagcaccuuucaccuguccaucccgaacuucaaucaguaugaggccaugagcugcgacuuuaacggaggcaagauuucugugcaguacaaucugucccacagcuucgcugucgaugccgcuaaccauuguggcacgaucgccaacggggugcuccaaaccuuuaugcggauggcguggggaggcucuuauaucgcccuggacuccgggaagggaaauugggauugcauuaugacaagcuaccaguaccuuaucauucagaacaccacaugggaagaccacugucaguucucucgccccuccccuaucggcuaucuggggcuccugagccaaagaacccgggauauuuacaucucccgcagacuucugggaacguuuacauggacccucucugacagcgagggcaaugaagcucccggcggguauugccugacacgguggaugcugaucgaggccgagcucaaauguuucggaaacaccgcuguugccaagugcaaugaaaaacaugaugaggaauuuugcgacaugcugcgccuuuucgauuucuguaagcaggcgauuaaaagacugaagaccccugcccagauguccauccagcucauuaacaaggcugugaaugcccugaucaacgaccaacuuauuaugaaaaaucaucugcgggauaucaugggcauccccuacugcaacuauagccgcuacuguuaucucaaucacacagucacggggaagaccucucugccuagaugcugucugguguccaacggaagcuaccucaaugagacacacuuuucugacgacauugaacagcaggcugauaacaugaucaccgagaugcugcaaaaagaguacauggaccggcagggcaagacaccgcuugggcugguggaucucuucgucuuuagcaccuccuucuaucugauuucuaucuuucugcaccuuguuaaaauucccacgcaucgccacaucgugggaaagccuugccccaaaccucauagacucaaucacaugggcauuuguagcugcggccuguacaagcaccccggggugccggucaaguggaaacggugaggacuaguaauaaggaaacuguaugaaugucugugggcaggaagugaagagauccuucuguaaagguuuuuggaauuaugucugcugaauaauaaacuuuuuugaaauaauaaaucugguagaaaaaugagaucucaaaggcucuuuucagagccaccaaaaaaaaaaaaaaaaaaaaaaaaaaaaaaaaaaaaaaaaaaaaaaaaaaaaaaaaaaaaaaaaaaaaaaaaaaaaaaaaaaaaaaaaaaaaaaaaaaaaa

SEQ ID NO: 34280 - RNA, 1809 nt, Artificial Sequence
  mRNA product Design b-4 (hSL-A100) comprising derived and/or modified sequence from LASV(GA391;Clade III)__CAA36645__GPCmut8 (opt5)
aggagagucccgcagucggcguccagcggcucugcuuguucgugugugugucguugcaggccuuauucaagcuuaccaugggccagaucgugaccuucuuucaagaggucccccacguuauugaagaggugaugaacaucgugcugauugcccucagcauccuggcuauucuuaaggggcuguacaaugucgccacaugcggacucaucggccuggugacguuccuucugcucuccgggagaucuuguagccugaucuauaaaggaaccuacgaacugcagacacucgagcugaacauggaaacccuuaauaugugcaugccucuguccuguacaaagaacaauucucaucacuauauucggguuggcaacgagaccgggcucgagcugacacuuaccaauacgagcauccugaaccauaaauuuugcaaucucuccgacgcgcacaagcgcaaccuguacgaucauucucugaugagcauuaucuccaccuuccaccucagcauuccgaauuuuaaccaguaugaagcuaugucuugugacuucaauggaggcaaaaucacagugcaguacaaccugucccacagcuuugccgucgaugccgcuggccauugcgggacccuugccaauggagugcugcaaacauucaugagaauggcuuggggcgggucuuauauugcccucgacuccggacggggcaacugggauuguaucaugaccagcuaccaguaccugaucauucagaacacgacaugggacgaucacugccaguuuucucgccccuccccuaucggguaucuuggacugcucagccaaagaacccgggacauuuacaucucccgcagacugcugggcacauucaccuggacccucucugauagcgagggcaaugaaacacccgggggauauugucugacgcgguggaugcuuauugaggcggagcugaagugcuuuggcaacaccgccguugcuaaguguaaugaaaaacaugacgaggaguucugcgauaugcuccgccuguuugacuucugcaagcaggccaucagacggcuuaaaaccccugcucagauguccauccagcugauuaacaaggccgugaaugcgcucaucaacgaucaacugauuaugaaaaaucaucugcgcgacaucauggggauucccuacuguaacuauagcagauacugcuaucucaaucacacaucuacaggaaagaccucccugccucgguguugccuuaucagcaacggcucuuaccugaaugaaacgaaguucagcgacgauaucgaacagcaggccgacaacaugauuacagagaugcuccaaaaagaguacaucgaucgccaggggaagaccccgcugggacuggucgaccuuuuuguguucuccaccucuuuuuaucucauuagcaucuuccugcaccuggugaaaauucccacacacagacauaucgucggcaagccuugucccaaaccucaccggcucaaucauaugggcauuugcuccugugggcuguacaagcagcccggaguuccggugagauggaaacgcugaggacuaguaauaaggaaacuguaugaaugucugugggcaggaagugaagagauccuucuguaaagguuuuuggaauuaugucugcugaauaauaaacuuuuuugaaauaauaaaucugguagaaaaaugagaucucaaaggcucuuuucagagccaccaaaaaaaaaaaaaaaaaaaaaaaaaaaaaaaaaaaaaaaaaaaaaaaaaaaaaaaaaaaaaaaaaaaaaaaaaaaaaaaaaaaaaaaaaaaaaaaaaaaaa

SEQ ID NO: 34281 - RNA, 1812 nt, Artificial Sequence
  mRNA product Design b-4 (hSL-A100) comprising derived and/or modified sequence from LASV(AV;Clade V)__CCA30314__GPCmut8 (opt5)
aggagagucccgcagucggcguccagcggcucugcuuguucgugugugugucguugcaggccuuauucaagcuuaccaugggccagaucgugaccuucuuucaagaggucccccacguuauugaagaggugaugaacaucgugcugauugcccucagcauccuggcuguccuuaaggggcuguacaauauugccacaugcggacucaucggccugaucacguuccuucugcucugugggagauccugcucuagcaaccuguauaaaggaguguacgaacugcagucccucgaccugaauauggagacccuuaacauguguaugccucugucuugcacaaagaauaacagccaucacuauauucggguuggcaaugauaccgggcucgaacugacacuuaccaacacauccauccugaaucauaaauuuuguaaccucucugacgcgcacaagaaagaucuguacgaccaugcucugaugagcauuaucuccaccuuccaccucagcauuccgaauuuuaaccaguaugaggccaugucuugcgauuucaauggaggcaagaucuccgugcaguacaaccugagccacucuuaugccauugacgcugccaaucauuguggcacggucgcuaacgggauccuucaaaccuuuaugcgcauggccuggggaggcuccuacaucgcgcuggauagcgggagaggaaacugggacugcauuaugacaucuuaccaguaucucaucauucagaauaccacaugggagaaccacugucaguucucccggcccagcccuaucggcuaccuggggcuucugucccaacgcaccagagauauuuauaucucucggcgccuccugggaacguuuacauggacccugagcgacuccgaaggcaaugccacacccggcggguacugccucaccagauggaugcugaucgaggcugaacuuaaguguuucggaaacaccgccguggcuaaaugcaaugagaagcaugaugaggaauuuugcgacaugcugcgccucuucgauuuuuguaaacaggccauuagccggcugaagucuccugcgcagauguccauccagcuuauuaacaaagccguuaaugcucugaucaacgaccaacucauuaugaagaaucaccugagagacaucaugggcauccccuauugcaacuacagcaaguauuguuaccugaaucacacaauuacggggaaaaccucucucccuaagugcugucuggugagcaacggauccuaccuuaaugagacacauuucucugaugacaucgaacagcaggccgauaacaugauuaccgagaugcugcaaaaagaauauauggagcggcagggcaagacaccgcucgggcuggucgaccuguucguguuuagcaccuccuucuaccuuaucagcauuuuucuccgccuggugaaaauccccacgcacagacauauugucggaaagccuugccccaaaccucaccggcugaaucauaugggcaucuguucuugcggccucuauaagcagcccgggguuccggugcgcuggaagagaugaggacuaguaauaaggaaacuguaugaaugucugugggcaggaagugaagagauccuucuguaaagguuuuuggaauuaugucugcugaauaauaaacuuuuuugaaauaauaaaucugguagaaaaaugagaucucaaaggcucuuuucagagccaccaaaaaaaaaaaaaaaaaaaaaaaaaaaaaaaaaaaaaaaaaaaaaaaaaaaaaaaaaaaaaaaaaaaaaaaaaaaaaaaaaaaaaaaaaaaaaaaaaaaaa

SEQ ID NO: 34282 - RNA, 1809 nt, Artificial Sequence
  mRNA product Design b-4 (hSL-A100) comprising derived and/or modified sequence from LASV(Togo/2016/7082;Clade VI)__AMR44577__GPCmut8 (opt5)
aggagagucccgcagucggcguccagcggcucugcuuguucgugugugugucguugcaggccuuauucaagcuuaccaugggccagaucauuaccuucuuucaagaggugccccacgucaucgaagagguuaugaacauugugcugaucgcccucagccugcuugcuauucugaaggggguguacaaugucgccacaugcggaaucaucggccucgugacguuccuguuucuuugugggagauccugcucucugauuuauaaaggaagcuacgaacuccagacccuggagcugaacauggaaacacucaauauguguaugccucuguccugcaccaagaacucuagccaucacuauauccggguuggcaaugagacagggcuugagcugacccucacaaacaccuccauuaucaaucauaaauucuguaaccugucugacgcgcacaagcgcaaucuuuacgaucaugcucugaugagcauucucuccacguuucaccugagcaucccgaacuucaaucaguaugaagccaugucuugcgacuuuaacggaggcaaaauuuccgugcaguacaaucugagccacgccuaugcugucgaugccgcugagcauuguggcaccguggccaacgggguucuccaaacauucaugagaauggcguggggaggcucuuacaucgcccuggacuccgggcggggaaauugggauugcaucaugaccagcuaccaguaucuuauuauccagaacacaaccugggaagaccacugucaguuuucucgccccuccccuauuggcuaccuggggcuccugagccaaagaacgcgggauaucuauauuucccgcagacuucugggaacauucaccuggacacucucugacagcgagggcaacgagacccccggcggguacugccugacccgguggaugcugaucgaagcugagcucaaguguuuuggaaauacagccguggcuaagugcaacgaaaaacaugaugaggaguucugcgacaugcugcgccuuuuugauuucuguaagcaggccauccagagacugaaauccccugcgcagaugagcauucaacucaucaauaaggccgucaacgcucugauuaaugaccagcuuaucaugaaaaaccaucugcgggauaugaugggcauucccuauugcaauuacucuaaguauuguuaccucaaccacacguccagcgggcgcaccucucugccuaagugcugucuggugagcaauggauccuaccucaacgaaacacacuucucugacgacaucgagcagcaagccgauaauaugaucaccgaaaugcugcagaaagaguauauugacagacagggcaagacaccgcuugggcugguggaucucuuugucuucagcaccuccuuuuaccugaucagcauuuuccugcaccuuaucaaaauucccacgcaucggcacaucguuggaaagccuugccccaaaccucaucgccucaaccacaugggcauuuguucuugcggccuguauaagcagcccggggugccgacaagauggaaacggugaggacuaguaauaaggaaacuguaugaaugucugugggcaggaagugaagagauccuucuguaaagguuuuuggaauuaugucugcugaauaauaaacuuuuuugaaauaauaaaucugguagaaaaaugagaucucaaaggcucuuuucagagccaccaaaaaaaaaaaaaaaaaaaaaaaaaaaaaaaaaaaaaaaaaaaaaaaaaaaaaaaaaaaaaaaaaaaaaaaaaaaaaaaaaaaaaaaaaaaaaaaaaaaaa

SEQ ID NO: 34283 - RNA, 1809 nt, Artificial Sequence
  mRNA product Design b-4 (hSL-A100) comprising derived and/or modified sequence from LASV(KAK-428;Clade n.d. (VII))__ANH09740__GPCmut8 (opt5)
aggagagucccgcagucggcguccagcggcucugcuuguucgugugugugucguugcaggccuuauucaagcuuaccaugggccagaucgugaccuucuuucaagaggucccccacguuauugaagaggugaugaacaucgugcugauugcccucagccugcuugcuauccugaaggggcucuacaauuucgccacaugcggagucauuggccugaucacguuucuucugcucugugggagauccugcucugcgaccuauaaaggacaguacgaacugcagacacuggagcucaacauggaaagccugaauauguguaugccucuuuccugcaccaagaacaauucucaucacuauauccgggcuggcaacaauacagggcuggagcucacccugacaaacaccagcauuaucucccauaaauucuguaaucuuucugacgcccacaagaaaaaccuguacgaucauacgcucaugagcauuaucaccacauuucaccuguccauuccgaauuucaaccaguaugaggccaugagcugcgacuuuaauggaggcaagaucucuauucaauacaaccugucccacagcuaugcuggcgaugccgcucagcauugugggaccguggccaauggaguucuccagacauucaugcgcauggcguggggcgggucuuaccuggcccuugacuccggaagacggggcugggauugcaucaucagcucuuaccaguaucugauuauccaaaacaccacgugggacgaucacugucaguuuucccgccccagcccuauuggguaccucggauucgugucccagaagacaagagacaucuauauuucucggcgccugcuuggcaccuuuacauggacccugagcgauuccgaaggccaugacaugcccgggggauacugccucaccagauggaugcugaucgaggcugaucugaaauguuucggcaacacagccgucgcuaagugcaaugaaaaacacgacgaggaguuuugcgauauguggcgccucuucgacuucuguaagcaggccauccaacggcugaaagcgccugcccagaugaacauucagcuuaucaauaaggcugugaacgcccugauuaaugaccaacucaugaugaagaaccaccugagagauaucauggggauucccuauugcaauuacagcaaauuuuguuaucuuaacaauacgaccacaggacggaccucucugccucgcugcugucucaucuccaacggcagcuaccugaaugaaacacauuucucugacgauaucgagcagcaggcugacaacaugauuaccgaaaugcugcagaaggaguacauggauagacaagggaaaacgccgcucggacugguugaccuuuuuguguucagcacauccuuuuaucugaucaccauuuuccuccaccuggucaagauccccacccaucggcacauugugggcaaaccuugccccaagccucaucgccugaaucacaugggcaucuguucuugcgggcuuuacaaacagcccggagugccggucagauggaagcggugaggacuaguaauaaggaaacuguaugaaugucugugggcaggaagugaagagauccuucuguaaagguuuuuggaauuaugucugcugaauaauaaacuuuuuugaaauaauaaaucugguagaaaaaugagaucucaaaggcucuuuucagagccaccaaaaaaaaaaaaaaaaaaaaaaaaaaaaaaaaaaaaaaaaaaaaaaaaaaaaaaaaaaaaaaaaaaaaaaaaaaaaaaaaaaaaaaaaaaaaaaaaaaaaa

SEQ ID NO: 34284 - RNA, 1809 nt, Artificial Sequence; identical to SEQ ID NO: 34278
  mRNA product Design b-4 (hSL-A100) comprising derived and/or modified sequence from LASV(Pinneo-NIG-1969;Clade I)__AIT17836__GPCmut8 (opt5)

SEQ ID NO: 34285 - RNA, 1809 nt, Artificial Sequence
  mRNA product Design b-4 (hSL-A100) comprising derived and/or modified sequence from LASV(ISTH0009-NIG-2011;Clade II)__AIT17404__GPCmut8 (opt5)
aggagagucccgcagucggcguccagcggcucugcuuguucgugugugugucguugcaggccuuauucaagcuuaccaugggccagaucauuaccuucuuucaagaggugccccacgucaucgaagagguuaugaacauugugcugaucgcccucagccugcuugcuauucugaaggggaucuacaauguggccacaugcggacucuucggccuggucuccuuucuucugcucugugggagaucuugcagcacgaccuauaaaggaguguacgaacugcagacacuggagcucgacauggcgucccugaacauguguaugccucuuucuugcaccaagaauaacagccaucacuauaucaugguuggcaaugaaacagggcuggagcucacccugacaaacaccuccauuaucaaucauaaauucuguaaccuuucugaugcucacaagaaaaaucuguacgaccaugcccucaugagcauuaucuccacguuucaccugagcauuccgaacuucaaucaguaugaggccaugucuugcgauuuuaacggaggcaagaucuccgugcaguacaaucugagccacgcuuaugccgucgacgcugccaaccauuguggcaccauugcgaauggggugcuccaaacauucaugcggauggccuggggaggcucuuacaucgcucuggauuccgggaagggaagcugggacugcaucaugaccucuuaccaguaucuuauuauccagaacacaaccugggaagaucacugucaguuuucccgccccagcccuauuggcuaccuggggcuccugucccaaagaacgcgggacaucuauauuucucgcagacuucugggaacauucaccuggacacucagcgauuccgagggcaacgaaacccccggcggguacugccugacccgguggaugcugaucgaggccgagcucaaauguuuuggaaauacagcuguugccaagugcaacgaaaaacaugacgaggaguucugcgauaugcugcgccuuuuugacuucuguaagcaggcgaucagacggcugaaaacgccugcccagaugagcauucagcucaucaauaaggcugugaacgcccugauuaaugaucaacuuaucaugaagaaccaucugcgcgacauuaugggcauccccuauugcaauuacucuaaauauuguuaccucaaccacaccgucacagggaagaccucccugccuagaugcugucuggugagcaauggaucuuaccucaacgaaacacacuucagcgacgauaucgaacagcaggcugacaauaugauuaccgagcugcuucaaaaagaguauauggaucggcagggcaagacgccgcuggggcucguggaccuguuugucuucuccacaucuuuuuaccugaucagcauuuuccuucaccucaucaaaauucccacccaucgccacaucaccggaaagccuugccccaaaccucauagacugaaccacaugggcauuuguuccugcggccuguauaagcaccccgggguuccggugaaguggaaacggugaggacuaguaauaaggaaacuguaugaaugucugugggcaggaagugaagagauccuucuguaaagguuuuuggaauuaugucugcugaauaauaaacuuuuuugaaauaauaaaucugguagaaaaaugagaucucaaaggcucuuuucagagccaccaaaaaaaaaaaaaaaaaaaaaaaaaaaaaaaaaaaaaaaaaaaaaaaaaaaaaaaaaaaaaaaaaaaaaaaaaaaaaaaaaaaaaaaaaaaaaaaaaaaaa

SEQ ID NO: 34286 - RNA, 1809 nt, Artificial Sequence
  mRNA product Design b-4 (hSL-A100) comprising derived and/or modified sequence from LASV(ISTH2010-NIG-2012;Clade II)__AIT17482__GPCmut8 (opt5)
aggagagucccgcagucggcguccagcggcucugcuuguucgugugugugucguugcaggccuuauucaagcuuaccaugggccagaucauuaccuucuuucaagaggugccccacgucaucgaagagguuaugaacauugugcugaucgcccucagccugcuugcuauucugaaggggaucuacaauguggccacaugcggacucuucggccuggucuccuuucuucugcucugugggagaucuugcagcacgaccuauaaaggaguguacgaacugcagacacuggagcucgacauggcgucccugaacauguguaugccucuuucuugcaccaagaauaacagccaucacuauaucaugguuggcaaugaaacagggcuggagcucacccugacaaacaccuccauuaucaaucauaaauucuguaaccuuucugaugcucacaagaaaaaucuguacgaccaugcccucaugagcauuaucuccacguuucaccugagcauuccgaacuucaaucaguaugaggccaugucuugcgauuuuaacggaggcaagaucuccgugcaguacaaucugagccacgcuuaugccgucgacgcugccaaccauuguggcaccauugcgaauggggugcuccaaacauucaugcggauggccuggggaggcucuuacaucgcucuggauuccgggaagggaagcugggacugcaucaugaccucuuaccaguaucuuauuauccagaacauuacaugggaagaucacugucaguuuucccgccccagcccuaucggcuaccuggggcuccugucccaaagaacccgggacauuuauaucucucgcagacuucugggaacguucacauggacccucagcgauuccgagggcaacgaaacacccggcggguacugccugacccgguggaugcugaucgaggccgagcucaaauguuuuggaaauaccgcuguugccaagugcaacgaaaaacaugacgaggaguucugcgauaugcugcgccuuuuugacuucuguaagcaggcgauuagacggcugaaaacgccugcccagaugagcauccagcucauuaauaaggcugugaacgcccugaucaaugaucaacuuauuaugaagaaccaucugcgcgacaucaugggcauccccuauugcaauuacucuaaauauuguuaccucaaccacacagucaccgggaagacaucccugccuagaugcugucuggugagcaauggaucuuaccucaacgaaacccacuucagcgacgauauugaacagcaggcugacaauaugaucacagagcugcuucaaaaagaguauauugaucggcagggcaagaccccgcuggggcucguggaccuguuugucuucuccacgucuuuuuaccugaucagcauuuuccuucaccucguuaaaauccccacacaucgccacguggugggaaagccuugccccaaaccucauagacugaaccacaugggcauuuguuccugcggccuguauaagcaccccggggucccggugaaguggaaacggugaggacuaguaauaaggaaacuguaugaaugucugugggcaggaagugaagagauccuucuguaaagguuuuuggaauuaugucugcugaauaauaaacuuuuuugaaauaauaaaucugguagaaaaaugagaucucaaaggcucuuuucagagccaccaaaaaaaaaaaaaaaaaaaaaaaaaaaaaaaaaaaaaaaaaaaaaaaaaaaaaaaaaaaaaaaaaaaaaaaaaaaaaaaaaaaaaaaaaaaaaaaaaaaaa

SEQ ID NO: 34287 - RNA, 1809 nt, Artificial Sequence
  mRNA product Design b-4 (hSL-A100) comprising derived and/or modified sequence from LASV(Lassa virus/H.sapiens-wt/NGA/2015/ISTH_0543;Clade II)__AVO03639__GPCmut8 (opt5)
aggagagucccgcagucggcguccagcggcucugcuuguucgugugugugucguugcaggccuuauucaagcuuaccaugggccagaucauuaccuucuuucaagaggugccccacgucaucgaagagguuaugaacauugugcugaucgcccucagccugcuugcuauucugaaggggaucuacaauguggccacaugcggacucuucggccuggucuccuuucuucugcucugugggagaucuugcagcacgaccuauaaaggaguguacgaacugcagacacuggagcucgacauggcgaaccugaauauguguaugccucuuuccugcaccaagaacaauucucaucacuauaucaugguuggcaacgaaacagggcuggagcucacccugacaaauaccagcauuaucaaccauaaauucuguaaucuuuccgaugcucacaagaaaaaccuguacgaccaugcccucaugucuauuaucagcacguuucaccuguccauuccgaauuucaaccaguaugaggccaugagcugcgauuuuaauggaggcaagaucucugugcaguacaaccugucccacaccuaugcugucgacgccgcuaaucauuguggcacaauugccaacggggugcuccaaaccuucaugcggauggcguggggaggcagcuacaucgcccuggauucugggaagggauccugggacugcaucaugacaagcuaccaguaucuuguuauucagaacaccacgugggaagaucacugucaguuuucucgccccuccccuaucggcuaccuggggcuccugagccaaagaacacgggacauuuauaucucccgcagacuucugggaaccuucacauggacccucucugauagcgagggcaaugaaacccccggcggguacugccugacacgguggaugcugauugaggcugagcucaaauguuuuggaaacacggccguggcuaagugcaaugaaaaacaugacgaggaguucugcgauaugcugcgccuuuuugacuucuguaagcaggccaucagacggcugaaaaccccugcgcagauguccauccagcucauuaacaaggccgucaaugcucugaucaacgaucaacuuauuaugaagaaucaucugcgcgacaucaugggcauucccuauugcaacuacagcaaauauuguuaccucaaucacacagugaccgggaagacaucucugccuagaugcugucugguguccaacggaagcuaccucaaugaaacccacuucucugacgauaucgaacagcaggccgacaacaugaucacggagcugcuucaaaaagaguauauugaucggcagggcaagacaccgcuggggcucgucgaccuguuuguuuucagcaccuccuuuuaccugaucucuauuuuccuucaccucgugaaaauccccacccaucgccacauuacaggaaagccuugccccaaaccucauagacugaaucacaugggcaucuguagcugcggccuguauaagcaccccggggugccggucaaguggaaacggugaggacuaguaauaaggaaacuguaugaaugucugugggcaggaagugaagagauccuucuguaaagguuuuuggaauuaugucugcugaauaauaaacuuuuuugaaauaauaaaucugguagaaaaaugagaucucaaaggcucuuuucagagccaccaaaaaaaaaaaaaaaaaaaaaaaaaaaaaaaaaaaaaaaaaaaaaaaaaaaaaaaaaaaaaaaaaaaaaaaaaaaaaaaaaaaaaaaaaaaaaaaaaaaaa

SEQ ID NO: 34288 - RNA, 1809 nt, Artificial Sequence
  mRNA product Design b-4 (hSL-A100) comprising derived and/or modified sequence from LASV(Lassa virus/H.sapiens-wt/NGA/2016/ISTH_0009;Clade II)__AVO03571__GPCmut8 (opt5)
aggagagucccgcagucggcguccagcggcucugcuuguucgugugugugucguugcaggccuuauucaagcuuaccaugggccagaucauuaccuucuuucaagaggugccccacgucaucgaagagguuaugaacauugugcugaucgcccucagccugcuugcuauucugaaggggaucuacaauguggccacaugcggacuccugggccuugucuccuuccugcuccugugugggagaucuugcagcacgaccuauaaaggaguguacgaacugcagacacucgagcuggacauggcgucccuuaacauguguaugccucugucuugcaccaagaauaacagccaucacuauaucaugguuggcaaugaaacagggcucgagcugacccuuacaaacaccuccauuaucaaucauaaauuuuguaaccugucugaugcucacaagaaaaaucucuacgaccaugcccugaugagcauuaucuccacguuccaccugagcauuccgaacuuuaaucaguaugaggccaugucuugcgauuucaacggaggccggaucuccgugcaguacaaucucagccacucuuaugcugucgacgccgcuaaccauuguggcaccauugccaauggggugcugcaaacauuuaugcgcauggcguggggaggcuccuacaucgcccuugauagcgggaagggaucuugggacugcaucaugaccuccuaccaguaucugauuauccagaacacaaccugggaagaucacugucaguucagcagacccuccccuauuggcuaccucgggcugcuuucucaacggacgcgcgacaucuauauuagcagacggcugcucggaacauuuaccuggacacuguccgauagcgagggcaacgaaacccccggcggguacugccugacccgcuggaugcucaucgaggcugagcugaaguguuucggaaauacagccguugcuaaaugcaacgaaaagcaugacgaggaauuuugcgauaugcuuagacuguucgacuuuuguaaacaggccauccggcgccucaagacgccugcgcagaugucuauucagcugaucaauaaagccgugaacgcucuuauuaaugaucaacugaucaugaagaaccaccucagagacauuaugggcauccccuauugcaauuacuccaaguauuguuaccugaaccacaccgucacagggaaaaccagccugccucggugcugucucgugucuaauggaagcuaccugaacgagacacauuucuccgacgauaucgaacagcaggccgacaauaugauuaccgagcuucugcaaaaggaguauaucgaucgccagggcaaaacgccgcucgggcugguggaccuguucgucuuuucuaccagcuucuaccuuauuuccaucuuucuccaccugguuaagauucccacacauagacacaucaccggaaaaccuugccccaagccucaucggcugaaccacaugggcauuuguagcugcggccucuauaaucaccccggggugccggugaaauggaagcgcugaggacuaguaauaaggaaacuguaugaaugucugugggcaggaagugaagagauccuucuguaaagguuuuuggaauuaugucugcugaauaauaaacuuuuuugaaauaauaaaucugguagaaaaaugagaucucaaaggcucuuuucagagccaccaaaaaaaaaaaaaaaaaaaaaaaaaaaaaaaaaaaaaaaaaaaaaaaaaaaaaaaaaaaaaaaaaaaaaaaaaaaaaaaaaaaaaaaaaaaaaaaaaaaaa

SEQ ID NO: 34289 - RNA, 1809 nt, Artificial Sequence
  mRNA product Design b-4 (hSL-A100) comprising derived and/or modified sequence from LASV(Lassa virus/H.sapiens-wt/NGA/2016/ISTH_0017;Clade II)__AVO03567__GPCmut8 (opt5)
aggagagucccgcagucggcguccagcggcucugcuuguucgugugugugucguugcaggccuuauucaagcuuaccaugggccagaucauuaccuucuuucaagaggugccccacgucaucgaagagguuaugaacauugugcugaucgcccucagccugcuugcuauucugaaggggaucuacaauguggccacaugcggacucuucggccuggucuccuuucuucugcucugugggagaucuugcagcacgaccuauaaaggaguguacgaacugcagacacuggagcucgacauggcgucccugaacauguguaugccucuuucuugcaccaagaauaacagccaucacuauaucaugguuggcaaugaaacagggcuggagcucacccugacaaacaccuccauuaucaaucauaaauucuguaaccuuucugaugcucacaagaaaaaucuguacgaccaugcccucaugagcauuaucuccacguuucaccugagcauuccgaacuucaaucaguaugaggccaugucuugcgauuuuaacggaggcaagaucuccgugcaguacaaucugagccacaccuaugcuauugacgccgcuaaccauuguggcacaaucgccaaugggguccuccaaaccuucaugcggauggcguggggaggcucuuacaucgcccuggauuccgggaagggaagcugggacugcauuaugacaucuuaccaguaucuuaucauucagaacaccacgugggaagaucacugucaguuuucccgccccagcccuaucggcuaccuggggcuccugucccaaagaacacgggacauuuauaucucucgcagacuucugggaaccuucacauggacccucagcgauuccgagggcaacgaaacccccggcggguacugccugacacgguggaugcugaucgaggcugagcucaaauguuuuggaaauacggccguggcuaagugcaacgaaaaacaugacgaggaguucugcgauaugcugcgccuuuuugacuucuguaagcaggccauuagacggcugaaaaccccugcgcagaugagcauccagcucauuaauaaggccguuaacgcucugaucaaugaucaacuuauuaugaagaaccaucugcgcgacaucaugggcauccccuauugcaauuacucuaaauauuguuaccucaaccacacagugaccgggaagacaucccugccuagaugcugucuggucagcaauggaucuuaccucaacgaaacccacuucagcgacgauauugaacagcaggccgacaauaugaucacggagcugcuucaaaaagaguauauggaucggcagggcaagacaccgcuggggcucguggaccuguuuguguucuccaccucuuuuuaccugauuagcaucuuccuucaccucguccgcauucccacccauagacacguuaucggaaaaccuugccccaagccucaucggcugaaccacaugggcauuuguuccugcggccuguauaaacaccccggggugccggugaaguggaagcgcugaggacuaguaauaaggaaacuguaugaaugucugugggcaggaagugaagagauccuucuguaaagguuuuuggaauuaugucugcugaauaauaaacuuuuuugaaauaauaaaucugguagaaaaaugagaucucaaaggcucuuuucagagccaccaaaaaaaaaaaaaaaaaaaaaaaaaaaaaaaaaaaaaaaaaaaaaaaaaaaaaaaaaaaaaaaaaaaaaaaaaaaaaaaaaaaaaaaaaaaaaaaaaaaaa

SEQ ID NO: 34290 - RNA, 1809 nt, Artificial Sequence
  mRNA product Design b-4 (hSL-A100) comprising derived and/or modified sequence from LASV(Lassa virus/H.sapiens-wt/NGA/2018/ISTH_0959;Clade II)__AVV65099__GPCmut8 (opt5)
aggagagucccgcagucggcguccagcggcucugcuuguucgugugugugucguugcaggccuuauucaagcuuaccaugggccagaucauuaccuucuuucaagaggugccccacgucaucgaagagguuaugaacauugugcugaucgcccucagccugcuugcuauucugaaggggaucuacaauguggucacaugcggacucuucggccugguguccuuucuucugcucugugggagaucuugcagcacgaccuauaaaggaguuuacgaacugcagacacuggagcucgacauggccucccugaacauguguaugccucuuucuugcaccaagaauaacagccaucacuauaucauggugggcaaugaaacagggcuggagcucacccugacaaacaccuccauuaucaaucauaaauucuguaaccuuucugaugcgcacaagaaaaaucuguacgaccaugcucucaugagcauuaucuccacguuucaccugagcauuccgaacuucaaucaguaugaggccaugucuugcgauuuuaacggaggcaagaucuccguccaguacaaucugagccacgccuaugcuauugacgccgcuaaccauuguggcaccaucgccaauggggugcuccaaacauucaugcggauggcguggggaggcucuuacaucgcccuggauuccgggaagggaagcugggacugcauuaugaccucuuaccaguaucuuaucauucagaacacaaccugggaagaucacugucaguuuucccgccccagcccuaucggcuaccuggggcuccugucccaaagaacgcgggacauuuauaucucucgcagacuucugggaacauucaccuggacacucagcgauuccgagggcaacgaaacccccggcggguacugccugacccgguggaugcugaucgaggcugagcucaaauguuuuggaaauacagccguugcuaagugcaacgaaaaacaugacgaggaguucugcgauaugcugcgccuuuuugacuucuguaagcaggccauuagacggcugaaaacgccugcgcagaugagcauccagcucauuaauaaggccgugaacgcucugaucaaugaucaacuuauuaugaagaaccaucugcgcgacaucaugggcauccccuauugcaauuacucuaaauauuguuaccucaaccacaccgucacagggaagaccucccugccuagaugcugucuggugagcaauggaucuuaccucaacgaaacacacuucagcgacgauauugaacagcaggccgacaauaugaucaccgagcugcuucaaaaagaguauauugaucggcagggcaagacgccgcuggggcucguggaccuguuugucuucuccacaucuuuuuaccugaucagcauuuuccuucaccucguuaaaauccccacccaucgccacgugauuggaaagccuugccccaaaccucauagacugaaccacaugggcaucuguuccugcggccuguauaagcaccccggggugccggucaaguggaaacggugaggacuaguaauaaggaaacuguaugaaugucugugggcaggaagugaagagauccuucuguaaagguuuuuggaauuaugucugcugaauaauaaacuuuuuugaaauaauaaaucugguagaaaaaugagaucucaaaggcucuuuucagagccaccaaaaaaaaaaaaaaaaaaaaaaaaaaaaaaaaaaaaaaaaaaaaaaaaaaaaaaaaaaaaaaaaaaaaaaaaaaaaaaaaaaaaaaaaaaaaaaaaaaaaa

SEQ ID NO: 34291 - RNA, 1809 nt, Artificial Sequence
  mRNA product Design b-4 (hSL-A100) comprising derived and/or modified sequence from LASV(LASV003-NIG-2008;Clade II)__AIT17580__GPCmut8 (opt5)
aggagagucccgcagucggcguccagcggcucugcuuguucgugugugugucguugcaggccuuauucaagcuuaccaugggccagaucauuaccuucuuucaagaggugccccacgucaucgaagagguuaugaacauugugcugaucgcccucagccugcuugcuauucugaaggggaucuacaauguggccacaugcggacucuucggccuggucuccuuucuucugcucugugggagaucuugcagcacgaccuauaaaggaguguacgaacugcagacacuggagcucgacauggcgucccugaacauguguaugccucuuucuugcaccaagaauaacagccaucacuauaucaugguuggcaaugaaacagggcuggagcucacccugacaaacaccuccauuaucaaucauaaauucuguaaccuuucugaugcucacaagaaaaaucuguacgaccaugcccucaugagcauuaucuccacguuucaccugagcauuccgaacuucaaucaguaugaggccaugucuugcgauuuuaacggaggcaagaucuccgugcaguacaaucugagccacaccuaugcugucgacgccgcuaaccauuguggcacaauugccaauggggugcuccaaaccuucaugcggauggcguggggaggcucuuacaucgcccuggauuccgggaagggaagcugggacugcaucaugacaucuuaccaguaucuuauuauccagaacaccacgugggaagaucacugucaguuuucccgccccagcccuauuggcuaccuggggcuccugucccaaagaacacgggacaucuauauuucucgcagacuucugggaaccuucacauggacccucagcgauuccgagagcaacgaaacccccggcggcuacugccugacacgguggaugcugaucgaggcugagcucaaauguuuugggaauacggccguugcuaagugcaacgaaaaacaugacgaggaguucugcgauaugcugcgccuuuuugacuucuguaagcaggccaucagacggcugaaagcgccugcccagaugucuauucagcucaucaauaaggcugugaacgcccugauuaaugaucaacuuaucaugaagaaccaucugcgcgacauuaugggaauccccuauugcaauuacuccaaauauuguuaccucaaccacaccgucacaggcagaaccagccugccucggugcugucuggugucuaaugggagcuaccucaacgaaacacacuucuccgacgauaucgaacagcaggcugacaauaugauuaccgagcugcuucaaaaggaguauauggaucgccagggaaaaacgccgcugggccucguggaccuguuugucuucucuaccagcuuuuaccugaucuccauuuuccuucaccucguuaagauccccacacauagacacgugauugggaaaccuugccccaagccucaucggcugaaccacaugggaaucuguagcugcggccuguauaaacaccccggcgugccggucaaguggaagcgcugaggacuaguaauaaggaaacuguaugaaugucugugggcaggaagugaagagauccuucuguaaagguuuuuggaauuaugucugcugaauaauaaacuuuuuugaaauaauaaaucugguagaaaaaugagaucucaaaggcucuuuucagagccaccaaaaaaaaaaaaaaaaaaaaaaaaaaaaaaaaaaaaaaaaaaaaaaaaaaaaaaaaaaaaaaaaaaaaaaaaaaaaaaaaaaaaaaaaaaaaaaaaaaaaa

SEQ ID NO: 34292 - RNA, 1809 nt, Artificial Sequence
  mRNA product Design b-4 (hSL-A100) comprising derived and/or modified sequence from LASV(LASV035-NIG-2009;Clade II)__AIT17588__GPCmut8 (opt5)
aggagagucccgcagucggcguccagcggcucugcuuguucgugugugugucguugcaggccuuauucaagcuuaccaugggccagaucauuaccuucuuucaagaggugccccacgucaucgaagagguuaugaacauugugcugaucgcccucagccugcuugcuauucugaaggggaucuacaauguggccacaugcggacucuucggccuggucuccuuucuucugcucugugggagaucuugcagcacgaccuauaaaggaguguacgaacugcagacacuggagcucgacauggcgucccugaacauguguaugccucuuucuugcaccaagaauaacagccaucacuauaucaugguuggcaaugaaacagggcuggagcucacccugacaaacaccuccauuaucaaucauaaauucuguaaccuuucugaugcucacaagaaaaaucuguacgaccaugcccucaugagcauuaucuccacguuucaccugagcauuccgaacuucaaucaguaugaggccaugucuugcgauuuuaacggaggcaagaucuccgugcaguacaaucugagccacgcuuaugccgucgacgcugccaaccauuguggcaccauugcgaauggggugcuccaaacauucaugcggauggccuggggaggcucuuacaucgcucuggauuccgggaagggaagcugggacugcaucaugaccucuuaccaguaucuuauuauccagaacacaaccugggaagaucacugucaguuuucccgccccagcccuauuggcuaccuggggcuccugucccaaagaacgcgggacaucuauauuucucgcagacuucugggaacauucaccuggacacucagcgauuccgagggcaacgaaacccccggcggguacugccugacccgguggaugcugaucgaggccgagcucaaauguuuuggaaauacagcuguugccaagugcaacgaaaaacaugacgaggaguucugcgauaugcugcgccuuuuugacuucuguaagcaggcgaucagacggcugaaagccccugcucagaugagcauucagcucaucaauaaggccgugaacgcucugauuaaugaucaacuuaucaugaagaaccaucugcgcgacauuaugggcauccccuauugcaauuacucuaaauauuguuaccucaaccacacggucaccgggaagacaucccugccuagaugcugucuggugagcaauggaucuuaccucaacgaaacccacuucagcgacgauaucgaacagcaggccgacaauaugauuacagagcugcuucaaaaagaguauaucgaucggcagggcaagaccccgcuggggcucguggaccuguuugucuucuccacgucuuuuuaccugauuagcaucuuccuucaccucguuaaaauucccacacaucgccacgugaucggaaagccuugccccaaaccucauagacugaaccacaugggcauuuguuccugcggccuguauaagcaccccggggugccggucaaguggaaacggugaggacuaguaauaaggaaacuguaugaaugucugugggcaggaagugaagagauccuucuguaaagguuuuuggaauuaugucugcugaauaauaaacuuuuuugaaauaauaaaucugguagaaaaaugagaucucaaaggcucuuuucagagccaccaaaaaaaaaaaaaaaaaaaaaaaaaaaaaaaaaaaaaaaaaaaaaaaaaaaaaaaaaaaaaaaaaaaaaaaaaaaaaaaaaaaaaaaaaaaaaaaaaaaaa

SEQ ID NO: 34293 - RNA, 1809 nt, Artificial Sequence
  mRNA product Design b-4 (hSL-A100) comprising derived and/or modified sequence from LASV(LASV1000-NIG-2009;Clade II)__AIT17782__GPCmut8 (opt5)
aggagagucccgcagucggcguccagcggcucugcuuguucgugugugugucguugcaggccuuauucaagcuuaccaugggccagaucauuaccuucuuucaagaggugccccacgucaucgaagagguuaugaacauugugcugaucgcccucagccugcuugcuauucugaaggggaucuacaauguggccacaugcggacucuucggccuggucuccuuucuucugcucugugggagaucuugcagcacgaccuauaaaggaguguacgaacugcagacacuggagcucgacauggcgucccugaacauguguaugccucuuucuugcaccaagaauaacagccaucacuauaucaugguuggcaaugaaacagggcuggagcucacccugacaaacaccuccauuaucaaucauaaauucuguaaccuuucugaugcucacaagaaaaaucuguacgaccaugcccucaugagcauuaucuccacguuucaccugagcauuccgaacuucaaucaguaugaggccaugucuugcgauuuuaacggaggcaagaucuccgugcaguacaaucugagccacaccuaugcugucgacgccgcuaaccauuguggcacaauugccaauggggugcuccaaaccuucaugcggauggcguggggaggcucuuacaucgcccuggauuccgggaagggaagcugggacugcaucaugacaucuuaccaguaucuuauuauccagaacaccacgugggaagaucacugucaguuuucccgccccagcccuauuggcuaccuggggcuccugucccaaagaacacgggacaucuauauuucucgcagacuucugggaaccuucacauggacccucagcgauuccgagggcaacgaaacccccggcggguacugccugacacgguggaugcugaucgaggcugagcucaaauguuuuggaaauacggccguugcuaagugcaacgaaaaacaugacgaggaguucugcgauaugcugcgccuuuuugacuucuguaagcaggccaucaaaagacugaagaccccugcgcagaugagcauucagcucaucaauaaggccgugaacgcucugauuaaugaucaacuuaucaugaaaaaccaucugcgggacauuaugggcauccccuauugcaauuacucuaaguauuguuaccucaaccacacagucaccgggaaaacaucccugccucgcugcugucuggugagcaauggaucuuaccucaacgaaacccacuucagcgacgauaucgaacagcaggccgacaauaugauuacggagcugcuucaaaaggaguauaucgauagacagggcaaaacaccgcuggggcucguggaccuguuugucuucuccaccucuuuuuaccugauuagcaucuuccuucaccucguuaagauucccacccaucggcacguggugggaaaaccuugccccaagccucaucgccugaaccacaugggcaucuguuccugcggccuguauaagcaccccggggucccggugaaauggaagagaugaggacuaguaauaaggaaacuguaugaaugucugugggcaggaagugaagagauccuucuguaaagguuuuuggaauuaugucugcugaauaauaaacuuuuuugaaauaauaaaucugguagaaaaaugagaucucaaaggcucuuuucagagccaccaaaaaaaaaaaaaaaaaaaaaaaaaaaaaaaaaaaaaaaaaaaaaaaaaaaaaaaaaaaaaaaaaaaaaaaaaaaaaaaaaaaaaaaaaaaaaaaaaaaaa

SEQ ID NO: 34294 - RNA, 1809 nt, Artificial Sequence
  mRNA product Design b-4 (hSL-A100) comprising derived and/or modified sequence from LASV(LASV221-NIG-2010;Clade II)__AIT17624__GPCmut8 (opt5)
aggagagucccgcagucggcguccagcggcucugcuuguucgugugugugucguugcaggccuuauucaagcuuaccaugggccagaucauuaccuucuuucaagaggugccccacgucaucgaagagguuaugaacauugugcugaucgcccucagccugcuugcuauucugaaggggaucuacaauguggccacaugcggacucuucggccuggucuccuuucuucugcucugugggagaucuugcagcacgaccuauaaaggaguguacgaacugcagacacuggagcucgacauggcgucccugaacauguguaugccucuuucuugcaccaagaauaacagccaucacuauaucaugguuggcaaugaaacagggcuggagcucacccugacaaacaccuccauuaucaaucauaaauucuguaaccuuucugaugcucacaagaaaaaucuguacgaccaugcccucaugagcauuaucuccacguuucaccugagcauuccgaacuucaaucaguaugaggccaugucuugcgauuuuaacggaggcaagaucuccgugcaguacaaucugagccacaccuaugcuauugacgccgcuaaccauuguggcacaaucgccaaugggguccuccaaaccuucaugcggauggcguggggaggcucuuacaucgcccuggauuccgggaagggaagcugggacugcauuaugacaucuuaccaguaucuuaucauucagaacaccacgugggaagaucacugucaguuuucccgccccagcccuaucggcuaccuggggcuccugucccaaagaacacgggacauuuauaucucucgcagacuucugggaaccuucacauggacccucagcgauuccgagggcaacgaaacccccggcggguacugccugacacgguggaugcugaucgaggcugagcucaaauguuuuggaaauacggccguggcuaagugcaacgaaaaacaugacgaggaguucugcgauaugcugcgccuuuuugacuucuguaagcaggccauuagacggcugaaaaccccugcgcagaugagcauccagcucauuaauaaggccguuaacgcucugaucaaugaucaacuuauuaugaagaaccaucugcgcgacaucaugggcauccccuauugcaauuacucuaaauauuguuaccucaaccacacagugaccgggaagacaucccugccuagaugcugucuggucagcaauggaucuuaccucaacgaaacccacuucagcgacgauauugaacagcaggccgacaauaugaucacggagaugcugcaaaaagaguauauggaucggcagggcaagacaccgcuugggcugguggaccucuuuguguucuccaccucuuuuuaccugauuagcaucuuccugcaccuugucaaaauucccacccaucgccacguuaucggaaagccuugccccaaaccucauagacucaaccacaugggcauuuguuccugcggccuguauaagcaccccggggugccggugaaguggaaacggugaggacuaguaauaaggaaacuguaugaaugucugugggcaggaagugaagagauccuucuguaaagguuuuuggaauuaugucugcugaauaauaaacuuuuuugaaauaauaaaucugguagaaaaaugagaucucaaaggcucuuuucagagccaccaaaaaaaaaaaaaaaaaaaaaaaaaaaaaaaaaaaaaaaaaaaaaaaaaaaaaaaaaaaaaaaaaaaaaaaaaaaaaaaaaaaaaaaaaaaaaaaaaaaaa

SEQ ID NO: 34295 - RNA, 1809 nt, Artificial Sequence
  mRNA product Design b-4 (hSL-A100) comprising derived and/or modified sequence from LASV(LASV237-NIG-2010;Clade II)__AIT17638__GPCmut8 (opt5)
aggagagucccgcagucggcguccagcggcucugcuuguucgugugugugucguugcaggccuuauucaagcuuaccaugggccagaucauuaccuucuuucaagaggugccccacgucaucgaagagguuaugaacauugugcugaucgcccucagccugcuugcuauucugaaggggaucuacaauguggccacaugcggacucuucggccuggucuccuuucuucugcucugugggagaucuugcagcacgaccuauaaaggaguguacgaacugcagacacuggagcucgacauggcgucccugaacauguguaugccucuuucuugcaccaagaauaacagccaucacuauaucaugguuggcaaugaaacagggcuggagcucacccugacaaacaccuccauuaucaaucauaaauucuguaaccuuucugaugcucacaagaaagaccuguacgaucaugcccucaugagcauuaucuccacguuucaccugagcauuccgaauuucaaccaguaugaggccaugucuugcgacuuuaauggaggcaagaucuccgugcaguacaaccugagccacaccuaugcugucgaugccgcuaaucauuguggcacaauugccaacggggugcuccaaaccuucaugcggauggcguggggaggcucuuacaucgcccuggacuccgggaagggaagcugggauugcaucaugacaucuuaccaguaucuuauuauccagaauaccacgugggaagaccacugucaguuuucccgccccagcccuauuggcuaccuggggcuccugucccaaagaacacgggauaucuauauuucucgcagacuucugggaaccuucacauggacccucagcgacuccgagggcaacgaaacccccggcggguacugccugacacgguggaugcugaucgaggcugagcucaaauguuuuggaaacacggccguugcuaagugcaaugaaaaacaugaugaggaguucugcgacaugcugcgccuuuuugauuucuguaagcaggccaucagacggcugaaaaccccugcgcagaugagcauucagcucaucaacaaggccgugaaugcucugauuaacgaccaacuuaucaugaagaaucaucugcgcgacauuaugggcauccccuauugcaacuacucuaaauauuguuaccucaaucacacagucaccgggaagacaucccugccuagaugcugucuggugagcaacggaucuuaccucaaugaaacccacuucagcgaugacaucgaacagcaggccgauaacaugauuacggagcugcuucaaaaagaguauauggaccggcagggcaagacaccgcuggggcucguggaucuguuugucuucuccaccucuuuuuaccugaucagcauuuuccuucaccucaucaaaauucccacccaucgccacaucacaggaaagccuugccccaaaccucauagacugaaucacaugggcauuuguuccugcggccuguauaagcaccccgggguuccggugaaguggaaacggugaggacuaguaauaaggaaacuguaugaaugucugugggcaggaagugaagagauccuucuguaaagguuuuuggaauuaugucugcugaauaauaaacuuuuuugaaauaauaaaucugguagaaaaaugagaucucaaaggcucuuuucagagccaccaaaaaaaaaaaaaaaaaaaaaaaaaaaaaaaaaaaaaaaaaaaaaaaaaaaaaaaaaaaaaaaaaaaaaaaaaaaaaaaaaaaaaaaaaaaaaaaaaaaaa

SEQ ID NO: 34296 - RNA, 1809 nt, Artificial Sequence
  mRNA product Design b-4 (hSL-A100) comprising derived and/or modified sequence from LASV(LASV253-NIG-2011;Clade II)__AIT17670__GPCmut8 (opt5)
aggagagucccgcagucggcguccagcggcucugcuuguucgugugugugucguugcaggccuuauucaagcuuaccaugggccagaucauuaccuucuuucaagaggugccccacgucaucgaagagguuaugaacauugugcugaucgcccucagccugcuugcuauucugaaggggaucuacaauguggccacaugcggacucuucggccuggucuccuuucuucugcucugugggagaucuugcagcacgaccuauaaaggaguguacgaacugcagacacuggagcucgacauggcgucccugaacauguguaugccucuuucuugcaccaagaauaacagccaucacuauaucaugguuggcaaugaaacagggcuggagcucacccugacaaacaccuccauuaucaaucauaaauucuguaaccuuucugaugcucacaagaaaaaucuguacgaccaugcccucaugagcauuaucuccacguuucaccugagcauuccgaacuucaaucaguaugaggccaugucuugcgauuuuaacggaggcaagaucuccgugcaguacaaucugagccacaccuaugcugucgacgccgcuaaccauuguggcacaauugccaauggggugcuccaaaccuucaugcggauggcguggggaggcucuuacaucgcccuggauuccgggaagggaagcugggacugcaucaugacaucuuaccaguaucuuauuauccagaacaccacgugggaagaucacugucaguuuucccgccccagcccuauuggcuaccuggggcuccugucccaaagaacacgggacaucuauauuucucgcagacuucugggaaccuucacauggacccucagcgauuccgagggcaacgaaacccccggcggguacugccugacacgguggaugcugaucgaggcugagcucaaauguuuuggaaauacggccguugcuaagugcaacgaaaaacaugacgaggaguucugcgauaugcugcgccuuuuugacuucuguaagcaggccaucagacggcugaaagcgccugcccagaugagcauucagcucaucaauaaggcugugaacgcccugauuaaugaucaacuuaucaugaagaaccaucugcgcgacauuaugggcauccccuauugcaauuacucuaaauauuguuaccucaaccacaccgucacagggagaaccucccugccucggugcugucuggugagcaauggaucuuaccucaacgaaacacacuucagcgacgauaucgaacagcaggcugacaauaugauuaccgagcugcuucaaaaggaguauaucgaucgccagggcaaaacgccgcuggggcucguggaccuguuugucuucuccacaucuuuuuaccugauuagcaucuuccuucaccucguuaagauucccacccauagacacaucauuggaaaaccuugccccaagccucaucggcugaaccacaugggcaucuguuccugcggccuguauaaacaccccggggugccggugaaguggaagcgcugaggacuaguaauaaggaaacuguaugaaugucugugggcaggaagugaagagauccuucuguaaagguuuuuggaauuaugucugcugaauaauaaacuuuuuugaaauaauaaaucugguagaaaaaugagaucucaaaggcucuuuucagagccaccaaaaaaaaaaaaaaaaaaaaaaaaaaaaaaaaaaaaaaaaaaaaaaaaaaaaaaaaaaaaaaaaaaaaaaaaaaaaaaaaaaaaaaaaaaaaaaaaaaaaa

SEQ ID NO: 34297 - RNA, 1809 nt, Artificial Sequence
  mRNA product Design b-4 (hSL-A100) comprising derived and/or modified sequence from LASV(LASV254-NIG-2011;Clade II)__AIT17674__GPCmut8 (opt5)
aggagagucccgcagucggcguccagcggcucugcuuguucgugugugugucguugcaggccuuauucaagcuuaccaugggccagaucauuaccuucuuucaagaggugccccacgucaucgaagagguuaugaacauugugcugaucgcccucagccugcuugcuauucugaaggggaucuacaauguggccacaugcggacucuucggccuggucuccuuucuucugcucugugggagaucuugcagcacgaccuauaaaggaguguacgaacugcagacacuggagcucgacaugaccaaccugaauauguguaugccucuuuccugcacaaagaacaauucucaucacuauaucaugguuggcaacgaaaccgggcuggagcucacacugaccaauacgagcauuaucaaccauaaauucuguaaucuuuccgaugcgcacaagaaaaaccuguacaaucaugcucucaugucuauuaucagcaccuuucaccuguccauuccgaacuucaaucaguaugaggccaugagcugcgacuuuaacggaggcaagaucucugugcaguacaaucugucccacagcuaugccgucgaugcugccaaccauuguggcacaauugcuaacggggugcuccaaaccuucaugcggauggccuggggaggcucuuacaucgcgcuggacuccgggaagggaaauugggauugcaucaugacaagcuaccaguaucuuauuauccagaacaccacgugggaagaccacugucaguuuucucgccccuccccuauuggcuaccuggggcuccugagccaaagaacacgggauaucuauauuucccgcagacuucugggaaccuucacauggacccucucugacagcgagggcaaugaaacccccggcggguacugccugacacgguggaugcugaucgaggccgagcucaaauguuuuggaaacacggcuguugccaagugcaaugaaaaacaugaugaggaguucugcgacaugcugcgccuuuuugauuucuguaagcaggcuaucagacggcugaaaaccccugcccaggcgaacauucagcucaucaauaaggccgugaacgcucugauuaaugaccaacuuaucaugaagaaccaucugcgcgauauuaugggcauccccuauugcaauuacuccaaauauuguuaccucaaccacacagucaccgggaagacaagccugccuagaugcugucuggugucuaauggauccuaccucaacgaaacccacuucagcgacgacaucgaacagcaggccgauaauaugauuacggagcugcuucaaaaagaguauauggaccggcagggcaagacaccgcuggggcucguggaucuguuugucuucucuaccagcuuuuaccugaucuccauuuuccuucaccucguuaaaauccccacccaucgccacgugauuggaaagccuugccccaaaccucauagacugaaccacaugggcaucuguucuugcggccuguauaagcaccccggggugccggucaaguggaaacggugaggacuaguaauaaggaaacuguaugaaugucugugggcaggaagugaagagauccuucuguaaagguuuuuggaauuaugucugcugaauaauaaacuuuuuugaaauaauaaaucugguagaaaaaugagaucucaaaggcucuuuucagagccaccaaaaaaaaaaaaaaaaaaaaaaaaaaaaaaaaaaaaaaaaaaaaaaaaaaaaaaaaaaaaaaaaaaaaaaaaaaaaaaaaaaaaaaaaaaaaaaaaaaaaa

SEQ ID NO: 34298 - RNA, 1809 nt, Artificial Sequence
  mRNA product Design b-4 (hSL-A100) comprising derived and/or modified sequence from LASV(Nig08-A19;Clade III)__ADU56618__GPCmut8 (opt5)
aggagagucccgcagucggcguccagcggcucugcuuguucgugugugugucguugcaggccuuauucaagcuuaccaugggccagaucgugaccuucuuucaagaggucccccacguuauugaagaggugaugaacaucgugcugauugcccucagcauccuggcuauucuuaaggggcuguacaauaucgccacaugcggacucaucggccuggucacguuccuucugcucuccgggagaucuuguagcaugaccuauaaaggaguguacgaacugcagacacuggagcucaacaugaauacccugaacaugugcaugccucuuuccuguacaaagaauaacucucaucacuauauuaugguuggcaaugaaaccgggcuggagcucacacugaccaacacgagccuucugcaucacaaauuuugcaaucucuccgacgcgcauaagaaaaaccuguacgaucacacccugaugucuaucauuagcacauuccaccucuccaucccgaauuuuaaccaguaugaggcuaugagcugugacuucaauggaggcaagauuaccgugcaguacaaccugucucauuccuaugccaucgaugccgcuaaucacugcggcacagucgccaacggggugcuucaaaccuuuaugcggauggcuuggggaggcagcuacauugcccuggacucugggcgcggaaagugggauuguaucaugacguccuaccaguaucucaucauucagaacacaaccugggaagaccauugccaguucagcagacccucuccuaucggcuaccuggggcuucugucccaacggacacgcgauauuuauaucagcagacggcuccugggaaccuuuaccuggacacuguccgacucugagggcaaugaaacgcccggcggguacugucucacccgcuggaugcugauugaggcggagcuuaaaugcuucggaaacacagccguugcuaaguguaaugaaaaacacgaugaggaauuuugcgacaugcugagacucuucgauuuuugcaagcaggccauccggcgccugaaagcuccugcccagaugagcauccagcuuauuaacaaggcggugaaugcccugaucaacgaccaacucauuaugaagaaucaccugagagauaucaugggcauucccuauuguaacuacuccaaauauugcuaccugaaucauaccagcacagggcggaccucucucccucgcuguugccuggucuccaacggaagcuaccuuaaugagacgcacuucucugacgacaucgaacagcaggcugauaacaugaucacagagaugcugcaaaaggaguaucucgacagacagggcaaaaccccgcuggggcugguggaucuuuucguguuuagcaccuccuucuaccucauuucuaucuuucugcaucuggucaagauucccacacaccggcauaucguuggaaaaccuugucccaagccucaccgccucaaucacaugggcauuugcagcuguggccuguauaaacagcccggggugccggugagauggaagcggugaggacuaguaauaaggaaacuguaugaaugucugugggcaggaagugaagagauccuucuguaaagguuuuuggaauuaugucugcugaauaauaaacuuuuuugaaauaauaaaucugguagaaaaaugagaucucaaaggcucuuuucagagccaccaaaaaaaaaaaaaaaaaaaaaaaaaaaaaaaaaaaaaaaaaaaaaaaaaaaaaaaaaaaaaaaaaaaaaaaaaaaaaaaaaaaaaaaaaaaaaaaaaaaaa

SEQ ID NO: 34299 - RNA, 1812 nt, Artificial Sequence
  mRNA product Design b-4 (hSL-A100) comprising derived and/or modified sequence from LASV(G1180-SLE-2010;Clade IV)__AIT17168__GPCmut8 (opt5)
aggagagucccgcagucggcguccagcggcucugcuuguucgugugugugucguugcaggccuuauucaagcuuaccaugggccagaucgugaccuucuuucaagaggucccccacguuauugaagaggugaugaacaucgugcugauugcccucagcauccuggcuguccuuaaggggcuguacaauuucgccacaugcggacucgugggccugcuuacguuucugcuccugugugggagauccugcaccgcgucucgguauaaaggaguuuacgaacugcagacacucgagcugaacauggaaacccuuaauauguguaugccucugagcugcacaaagaacaauucccaucacuauauuauggugggcaacgagaccgggcucgagcugacacuuaccaauacgucuaucaucaaccauaaauucuguaaucugagcgacgcucacaagaaaaaccucuacgaucaugcccugauguccauuaucucuaccuuucaccugagcauuccgaauuucaaccaguaugaagccauguccugcgacuuuaauggaggcaagaucagcguccaguacaaccucucucacuccuaugcuggcgaugccgcuaaucauugugggacaguggccaacggaguucugcaaaccuucaugcgcauggcguggggcgggagcuacauugcccuugacucuggacacggcuccugggauugcaucaugacaagcuaccaguaucugauuauccagaacaccacgugggaggaccauugucaguuuucuagacccuccccuaucggguaccucggacugcuuagccaacggacacgcgauauuuauaucuccagacggcugcucggcaccuucacauggacccugucugacagcgaaggcaaggauacccccgggggauacugccugacacgcuggaugcucauugaggcugagcugaaauguuuuggcaauacggccguggcuaagugcaacgaaaaacacgacgaggaguucugcgauaugcuuagacuguuugacuucuguaagcaggccauccagcggcucaaagcgccugcccagauguccauucaacugaucaauaaggcugucaacgcccuuaucaaugaucagcugauuaugaagaaccaccuccgcgacaucauggggauucccuauugcaauuacagcaaauauuguuaccugaaccauaccacaaccggaaagacaucucugccuaaaugcugucucguguccaauggcagcuaccugaacgaaacccacuucucugacgauaucgaacagcaagcugacaauaugauuacggagaugcuucagaaggaguauauggaaagacaggggaaaacaccgcugggacucguggaucuguuugucuucagcaccuccuuuuaccugaucucuaucuuccuucaucucguuaagauucccacccaccggcauaucgugggcaaaagcugcccuaagccccaccgccugaaccacaugggcauuuguuccugcgggcuguauaagcagccuggagugcccgucaaauggaagagaugaggacuaguaauaaggaaacuguaugaaugucugugggcaggaagugaagagauccuucuguaaagguuuuuggaauuaugucugcugaauaauaaacuuuuuugaaauaauaaaucugguagaaaaaugagaucucaaaggcucuuuucagagccaccaaaaaaaaaaaaaaaaaaaaaaaaaaaaaaaaaaaaaaaaaaaaaaaaaaaaaaaaaaaaaaaaaaaaaaaaaaaaaaaaaaaaaaaaaaaaaaaaaaaaa

SEQ ID NO: 34300 - RNA, 1812 nt, Artificial Sequence
  mRNA product Design b-4 (hSL-A100) comprising derived and/or modified sequence from LASV(G1442-SLE-2011;Clade IV)__AIT17180__GPCmut8 (opt5)
aggagagucccgcagucggcguccagcggcucugcuuguucgugugugugucguugcaggccuuauucaagcuuaccaugggccagaucgugaccuucuuucaagaggucccccacguuauugaagaggugaugaacaucgugcugauugcccucagcauccuggcuguccuuaaggggcuguacaauguggccacaugcggacucauuggccugguuacguuccuucugcucugugggagauccugcaccacaacccuguauaaaggaguguacgaacugcagacacucgagcugaacauggaaacccuuaauauguguaugccucugucuugcacaaagaacaauagccaucacuauauccgggucggcaacgagaccgggcucgagcugacgcuuaccaauacauccaucauuaaccauaaauuuuguaaucugucugacgcgcacaagaaaaaccucuacgaucaugcucugaugagcaucauuuccaccuuccaccugucuaucccgaauuuuaaccaguaugaagccaugagcugcgacuucaauggaggcaagauuuccgugcaguacaaccucagccacucuuaugccggcgaugcugccaaucauugugggacaguugcuaacggagugcugcaaaccuuuaugcgcauggccuggggcggguccuacaucgcgcuugacagcggaagaggcaacugggauugcauuaugacgucuuaccaguaucugaucauccagaauacaaccugggacgaucacugucaguucucccggcccagcccuauuggguaccucggacugcuuucucaacgcacaagagacgucuauaucucccggcgccugcucggcaccuuuaccuggacacugagcgauuccgagggcaaggacacgcccgggggauacugccugaccagauggaugcucauugaagccgagcugaaauguuucggcaacacagcuguggccaagugcaaugagaaacaugaugaagaguuuugcgacaugcuucggcuguucgauuuuuguaagcaggcuauccagcgccucaaagccccugcgcagaugucuauucaacugaucaacaaggccgugaaugcucuuaucaacgaccagcugauuaugaagaaucaccucagagacaucauggggauucccuauugcaacuacagcaaauauuguuaccugaauaacaccgccacaggaaagaccucccugccuaaaugcugucucaucagcaauggcucuuaccugaacgaaacgcacuucuccgaugacauugagcaggaagcugauaauaugaucacagagaugcuucaaaaggaguauauggaacggcaggggaaaaccccgcugggacucgucgaccuguucguuuuuagcaccucuuucuaccugaucagcauuuuucuucaucucgugaagauccccacacaccgccauauugugggcaaauccugcccuaagccccacagacugaaccauaugggcaucuguucuugcgggcuguauaagcagccuggaguccccgugcgguggaaacgcugaggacuaguaauaaggaaacuguaugaaugucugugggcaggaagugaagagauccuucuguaaagguuuuuggaauuaugucugcugaauaauaaacuuuuuugaaauaauaaaucugguagaaaaaugagaucucaaaggcucuuuucagagccaccaaaaaaaaaaaaaaaaaaaaaaaaaaaaaaaaaaaaaaaaaaaaaaaaaaaaaaaaaaaaaaaaaaaaaaaaaaaaaaaaaaaaaaaaaaaaaaaaaaaaa

SEQ ID NO: 34301 - RNA, 1812 nt, Artificial Sequence
  mRNA product Design b-4 (hSL-A100) comprising derived and/or modified sequence from LASV(G3010-SLE-2013;Clade IV)__AIT17344__GPCmut8 (opt5)
aggagagucccgcagucggcguccagcggcucugcuuguucgugugugugucguugcaggccuuauucaagcuuaccaugggccagaucgugaccuucuuucaagaggucccccacguuauugaagaggugaugaacaucgugcugauugcccucagcauccuggcuguccuuaaggggcuguacaauuucgccacaugcggacucgugggccugguuacguuucuucugcucugugggagauccugcaccacaucucuguauaaaggaguguacgaacugcagacccucgagcugaacauggaaacacuuaauauguguaugccucugagcugcaccaagaacaauucccaucacuauauuauggucggcaacgagacagggcucgagcugacccuuacgaauaccucuaucaucaaccauaaauucuguaaucugagcgacgcgcacaagaaaaaccucuacaaucaugcucugauguccauuaucucuacauuucaccugagcauuccgaacuucaaucaguaugaagccauguccugcgauuuuaacggaggcaagaucagcgugcaguacaaucucucucacuccuaugccggcgacgcugccagccauugugggaccguugcuaacggagugcugcaaacauucaugcggauggccuggggcgggucuuacauugcgcuugauuccggauacggcaagugggacugcaucaugaccagcuaucaguaccugauuauccagaacacgacaugggaggaucacugucaguuuucucgccccuccccuaucggguaucucggacugcuuagccaaagaacccgggacauuuacaucucccgcagacugcucggcacauucaccuggacccugucugauagcgaaggcaaagacacacccgggggauauugccugacgcgguggaugcucauugaggccgagcugaaguguuuuggcaauaccgcugucgccaaaugcaacgaaaagcaugaugaggaguucugcgacaugcuucgccuguuugauuucuguaaacaggcuauccagagacucaagaccccugcccagauguccauucaacugaucaauaaggcggugaacgcccuuaucaaugaccagcugauuaugaaaaaccaccuccgggauaucauggggauucccuacugcaauuauagcaaguacuguuaccugaaccacacaacaaccggaaaaacgucucugccuaagugcugucucguguccaauggcagcuaucugaacgaaacacauuucucugacgacaucgaacagcaagcugauaauaugauuaccgagaugcuucagaaagaguacauggaacgccaggggaagaccccgcugggacucgucgaccuguuuguuuucagcacauccuuuuaucugaucucuaucuuccuucaccucgugaaaauucccacccauagacacaucgugggcaagagcugcccuaagccccaucggcugaaccacaugggcauuuguuccugcgggcuguacaaacagccuggaguccccgugcgcuggaagagaugaggacuaguaauaaggaaacuguaugaaugucugugggcaggaagugaagagauccuucuguaaagguuuuuggaauuaugucugcugaauaauaaacuuuuuugaaauaauaaaucugguagaaaaaugagaucucaaaggcucuuuucagagccaccaaaaaaaaaaaaaaaaaaaaaaaaaaaaaaaaaaaaaaaaaaaaaaaaaaaaaaaaaaaaaaaaaaaaaaaaaaaaaaaaaaaaaaaaaaaaaaaaaaaaa

SEQ ID NO: 34302 - RNA, 1812 nt, Artificial Sequence
  mRNA product Design b-4 (hSL-A100) comprising derived and/or modified sequence from LASV(G502-SLE-2009;Clade IV)__AIT17126__GPCmut8 (opt5)
aggagagucccgcagucggcguccagcggcucugcuuguucgugugugugucguugcaggccuuauucaagcuuaccaugggccagaucgugaccuucuuucaagaggucccccacguuauugaagaggugaugaacaucgugcugauugcccucagcauccuggcuguccuuaaggggcuguacaauuucgccacaugcggacucgugggccugcuuacguuucugcuccugugugggagauccugcaccacaggacuguauaaaggcguuuacgaacuccagacccuggagcuuaacauggaaacacugaauauguguaugccucucucuugcaccaagaacaauagccaucacuauauuaugguggggaacgagacaggacuggagcuuacccugacgaauaccuccaucaucaaccauaaauucuguaaucucucugacgcgcacaagaaaaaccuguacgaucaugcucugaugagcauuaucuccacauuucaccucucuauuccgaauuucaaccaguaugaagccaugagcugcgacuuuaauggcggcaagaucuccguccaguacaaccugagccacucuuaugccggggaugcugccgaccauuguggaaccguggcuaauggcguucuucaaacauucaugcggauggccuggggaggguccuacauugcgcuggauagcggccgcgggagaugggacugcaucaugaccucuuaccaguaucucauuauccagaacacgacaugggaggaucacugucaguuuucccggcccagcccuaucggauaccugggccuucugucucaacgcaccagagacauuuauaucucccggcgccuccugggcacauucaccuggacccugagcgauuccgaagggaaggacacacccggaggcuacugccucacgagauggaugcugauugaggccgagcuuaaauguuuugggaacaccgcuguggccaagugcaaugaaaaacaugaugaggaguucugcgacaugcugcggcucuuugauuucuguaagcaggcuauccagcgccugaaagccccugcgcagaugucuauucaacuuaucaacaaggccgucaaugcucugaucaacgaccagcucgugaugaagaaucaccugagagacauuaugggaauccccuauugcaacuacagccgguauuguuaccugaaucacacaaccacaggccgcaccucccucccuaaaugcugucuggugagcaacgggucuuaccuuaaugaaacgcauuucuccgaugacauugaacagcaagccgauaacaugaucacagagaugcugcagaaggaguauauggaaagacagggaaaaaccccgcucggccuggucgaccuguuuguuuucagcaccucuuuuuaccuuauuagcaucuuccuccaccuggugaagauccccacacaucggcacauugugggcaaauccugcccuaagccccaucgccugaaucacauggggaucuguucuugcggacucuauaaacagccuggcguccccgugaaguggaagagaugaggacuaguaauaaggaaacuguaugaaugucugugggcaggaagugaagagauccuucuguaaagguuuuuggaauuaugucugcugaauaauaaacuuuuuugaaauaauaaaucugguagaaaaaugagaucucaaaggcucuuuucagagccaccaaaaaaaaaaaaaaaaaaaaaaaaaaaaaaaaaaaaaaaaaaaaaaaaaaaaaaaaaaaaaaaaaaaaaaaaaaaaaaaaaaaaaaaaaaaaaaaaaaaaa

SEQ ID NO: 34303 - RNA, 1812 nt, Artificial Sequence
  mRNA product Design b-4 (hSL-A100) comprising derived and/or modified sequence from LASV(G733-SLE-2010;Clade IV)__AIT17154__GPCmut8 (opt5)
aggagagucccgcagucggcguccagcggcucugcuuguucgugugugugucguugcaggccuuauucaagcuuaccaugggccagaucgugaccuucuuucaagaggucccccacguuauugaagaggugaugaacaucgugcugauugcccucagcauccuggcuguccuuaaggggcuguacaauuucgccacaugcggaauugugggccucguuuccuuucugcuucugugugggagaucuugcacgaccagccucuauaaaggaguguacgaacugcagacacuggagcucaacauggaaacccugaauauguguaugccucuuuccugcacaaagaacaauucucaucacuauaucauggucggcaacgagaccgggcuggagcucacacugaccaauacgagcaucauuaaccauaaauucuguaaucuuuccgacgcgcacaagaaaaaccuguacgaucaugcucucaugucuaucauuagcaccuuucaccuguccaucccgaauuucaaccaguaugaagccaugagcugcgacuuuaauggaggcaagauuucugugcaguacaaccugucccacagcuaugccggcgaugcugccaaucauugugggacaaucgcuaacggaguucuccaaaccuucaugcggauggccuggggcgggucuuacauugcgcuggacuccggacgcgauagaugggacugcaucaugacaagcuaccaguaucuuaucauucagaacaccacgugggaggaucacugucaguuuucucggcccuccccuaucggcuaccuggggcuccugagccaacgcacaagagacauuuauaucucccggcgccuucugggaaccuucacauggacccucucugauagcgaaggcaaggacacccccggcggguacugccugacaagauggaugcugauugaggccgagcucaaauguuuuggaaauacggcuguggccaagugcaacgaaaaacaugaugaggaguucugcgacaugcugcggcuuuuugauuucuguaagcaggcuauccagcgccugaaagccccugcgcagauguccauccaacucauuaauaaggccgucaacgcucugaucaaugaccagcuuauuaugaagaaccaccugagagacaucaugggcauucccuauugcaauuacagcaaauauuguuaccucaaccacaccacaaccgggaagacaucucugccuaaaugcugucugguguccaauggaagcuaccucaacgaaacccauuucucugaugacaucgaacagcaagccgauaauaugaucacggagaugcugcagaaggaguauauggaacggcagggcaaaacaccgcuugggcugguggaccucuuugucuucagcaccuccuuuuaccugauuucuaucuuccugcaccuuguuaagauucccacccaucgccacguggugggaaaaagcugcccuaagccccauagacucaaccacaugggcaucuguuccugcggccuguaugggcagccuggaguccccgugaaguggaaacggugaggacuaguaauaaggaaacuguaugaaugucugugggcaggaagugaagagauccuucuguaaagguuuuuggaauuaugucugcugaauaauaaacuuuuuugaaauaauaaaucugguagaaaaaugagaucucaaaggcucuuuucagagccaccaaaaaaaaaaaaaaaaaaaaaaaaaaaaaaaaaaaaaaaaaaaaaaaaaaaaaaaaaaaaaaaaaaaaaaaaaaaaaaaaaaaaaaaaaaaaaaaaaaaaa

SEQ ID NO: 34304 - RNA, 1812 nt, Artificial Sequence
  mRNA product Design b-4 (hSL-A100) comprising derived and/or modified sequence from MOPV/LASV reassortant(IGS-1;Clade IV)__AFY05576__GPCmut8 (opt5)
aggagagucccgcagucggcguccagcggcucugcuuguucgugugugugucguugcaggccuuauucaagcuuaccaugggccagaucgugaccuucuuucaagaggucccccacguuauugaagaggugaugaacaucgugcugauugcccucagcguccuggcugugcuuaaggggcuguacaauuucgccacaugcggacucguuggccuggugacguuucuucugcucugugggagauccugcaccacaucucuguauaaaggagucuacgaacugcagacccucgagcugaacauggaaacacuuaauauguguaugccucugagcugcaccaagaacaauucccaucacuauaucauggugggcaacgagacagggcucgagcugacccuuacgaauaccucuauuaucaaccauaaauucuguaaucugagcgacgcgcacaagaaaaaccucuacgaucaugcucugauguccaucauuucuacauuucaccugagcaucccgaauuucaaccaguaugaagccauguccugcgacuuuaauggaggcaagauuagcguucaguacaaccucucucacuccuaugccggcgaugcugccaaucauugugggaccguggcuaacggaguccugcaaacauucaugcggauggccuggggcgggagcuacaucgcgcuugacucuggacgcggcaacugggauugcauuaugaccuccuaccaguaucugaucauucagaauacgacaugggaggaccacugucaguuuagcagacccucuccuaucggguaccucggacugcuuucccaacggacccgcgauaucuauauuagcagacggcugcucggcacauucaccuggacccuguccgacucugaaggcgaggauacacccgggggauacugccugacgcgcuggaugcucaucgaggccgaacugaaguguuuuggcaacaccgcuguggccaaaugcaaugagaagcaugacgaagaguucugcgauaugcuuagacuguuugacuucuguaaacaggcuauucagcggcucaaggccccugcgcagaugagcauccaacugauuaacaaagccgugaaugcucuuaucaacgaucagcugaucaugaagaaucaccuccgcgacauuauggggauccccuauugcaacuacuccaaguauuguuaccugaaucacacaaccacaggaagaaccagccugccuaaaugcugucucgucucuaacggcuccuaccugaaugaaacgcauuucagcgacgauauugagcagcaagccgacaacaugaucacagagaugcuucagaaggaauauauggagcggcaggggaaaaccccgcugggacucguugaucuguuuguguucucuaccagcuuuuaccugauuuccaucuuccuucaccucgugaagauccccacacaucgccacauugucggcaaaucuugcccuaagccccauagacugaaucacaugggcaucuguagcugcgggcuguauaaacagccuggagugcccguuaaguggaagcggugaggacuaguaauaaggaaacuguaugaaugucugugggcaggaagugaagagauccuucuguaaagguuuuuggaauuaugucugcugaauaauaaacuuuuuugaaauaauaaaucugguagaaaaaugagaucucaaaggcucuuuucagagccaccaaaaaaaaaaaaaaaaaaaaaaaaaaaaaaaaaaaaaaaaaaaaaaaaaaaaaaaaaaaaaaaaaaaaaaaaaaaaaaaaaaaaaaaaaaaaaaaaaaaaa

SEQ ID NO: 34305 - RNA, 1812 nt, Artificial Sequence
  mRNA product Design b-4 (hSL-A100) comprising derived and/or modified sequence from LASV(LM765-SLE-2012;Clade IV)__AIT17814__GPCmut8 (opt5)
aggagagucccgcagucggcguccagcggcucugcuuguucgugugugugucguugcaggccuuauucaagcuuaccaugggccagaucgugaccuucuuucaagaggucccccacguuauugaagaggugaugaacaucgugcugauugcccucagcauccuggcuguccuuaaggggcuguacaauuucgccacaugcggacucgugggccugguuacguuucuucugcucugugggagauccugcaccacaucucuguauaaaggaguguacgaacugcagacccucgagcugaacauggaaacacuuaauauguguaugccucugagcugcaccaagaacaauucccaucacuauauuauggucggcaacgagacagggcucgagcugacccuuacgaauaccucuaucaucgaccauaaauucuguaaccugagcgaugcgcaccggaagaaucucuacgaccaugcucugauguccauuaucucuacauuucaccugagcauuccgaacuucaaucaguaugaagccauguccugcgauuuuaacggaggcaaaaucagcgugcaguacaaucucucucacuccuaugccaaggacgcugccgaucauuguggcaccguugcuaacggggugcugcaaacauucaugcgcauggccuggggaggcagcuacauugcgcuugacucugggagaggacggugggauugcaucaugaccuccuaccaguaucugauuauccagaauacgacaugggaggaccacugucaguuuagccgccccucuccuaucggcuaccucgggcugcuuucccaaagaacccgggauauuuauaucagccgcagacugcucggaacauucaccuggacccuguccgacucugaaggcaaggauacacccggcggguacugccugacgcgguggaugcucauugaggccgagcugaaauguuuuggaaacaccgcugucgccaagugcaacgaaaaacaugacgaggaguucugcgauaugcuucgccuguuugacuucuguaagcaggcuauccagagacucaaagccccugcgcagaugagcauucaacugaucaauaaggccgugaacgcucuuaucaaugaccagcugauuaugaagaaccaccuccgggauaucaugggcauucccuauugcaauuacuccaaauauuguuaccugaaccacacaaccacagggaagaccagccugccuaaaugcugucucgugucuaauggauccuaccugaacgaaacgcauuucagcgacgauaucgaacagcaagccgacaauaugauuacagagaugcuucagaaggaguauauggaacgccagggcaaaaccccgcuggggcucgucgaucuguuuguuuucucuaccagcuuuuaccugaucuccaucuuccuucaccucgugaagauucccacacauagacacaucgugggaaaaccuugccccaagccucaucggcugaaccacaugggcauuuguucuugcggccuguauaagcagcccggggucccggugaaauggaagcgcugaggacuaguaauaaggaaacuguaugaaugucugugggcaggaagugaagagauccuucuguaaagguuuuuggaauuaugucugcugaauaauaaacuuuuuugaaauaauaaaucugguagaaaaaugagaucucaaaggcucuuuucagagccaccaaaaaaaaaaaaaaaaaaaaaaaaaaaaaaaaaaaaaaaaaaaaaaaaaaaaaaaaaaaaaaaaaaaaaaaaaaaaaaaaaaaaaaaaaaaaaaaaaaaaa

SEQ ID NO: 34306 - RNA, 1812 nt, Artificial Sequence
  mRNA product Design b-4 (hSL-A100) comprising derived and/or modified sequence from LASV(LM776-SLE-2012;Clade IV)__AIT17824__GPCmut8 (opt5)
aggagagucccgcagucggcguccagcggcucugcuuguucgugugugugucguugcaggccuuauucaagcuuaccaugggccagaucgugaccuucuuucaagaggucccccacguuauugaagaggugaugaacaucgugcugauugcccucagcauccuggcuguccuuaaggggcuguacaauuucgccacaugcggacucgugggccugguuacguuucuucugcucugugggagauccugcaccacaucuguguauaaaggagucuacgaacugcagacccuggagcucaacauggaaacacugaauauguguaugccucuuagcugcaccaagaacaauucccaucacuauauuauggugggcaacgagacagggcuggagcucacccugacgaauaccucuaucaucaaccauaaauucuguaaucuuagcgacgcgcacaagaaaaaccuguacgaucaugcucucauguccauuaucucuacauuucaccugagcauuccgaauuucaaccaguaugaagccauguccugcgacuuuaauggaggcaagaucagcguucaguacaaccugucucacuccuaugccggcgaugcugccaaucauugugggaccguggcuaacggaguccuccaaacauucaugcggauggccuggggcgggagcuacauugcgcuggacucuggacacggcaagugggauugcaucaugaccuccuaccaguaucuuauuauccagaacacgacaugggaggaccauugucaguuuagccgccccucuccuaucggguaccugggacuccugucccaaagaacccgggauauuuauaucagccgcagacuucugggcacauucaccuggacccucuccgacucugaaggcaaagauacacccgggggauacugccugacgcgguggaugcugauugaggccgagcucaaguguuuuggcaauaccgcuguggccaaaugcaacgaaaagcacgacgaggaguucugcgauaugcugcgccuuuuugacuucuguaaacaggcuauccagagacugaaggccccugcgcagaugagcauucaacucaucaauaaggccgugaacgcucugaucaaugaucagcuuauuaugaaaaaccaucugcgggacaucauggggauucccuauugcaauuacuccaaguauuguuaccucaaccacacaaccacaggaaaaaccagccugccuaagugcugucuggucucuaauggcuccuaccucaacgaaacgcacuucagcgacgauaucgaacagcaagccgacaauaugauuacagagaugcugcagaaagaguauauggaacgccaggggaagaccccgcuuggacugguugaucucuuuguguucucuaccagcuuuuaccugaucuccaucuuccugcaucuugugaaaauucccacacacagacauaucgucggcaagucuugcccuaagccccaccggcucaaccacaugggcauuuguagcugcgggcuguauaaacagccuggagugcccguucgcuggaagagaugaggacuaguaauaaggaaacuguaugaaugucugugggcaggaagugaagagauccuucuguaaagguuuuuggaauuaugucugcugaauaauaaacuuuuuugaaauaauaaaucugguagaaaaaugagaucucaaaggcucuuuucagagccaccaaaaaaaaaaaaaaaaaaaaaaaaaaaaaaaaaaaaaaaaaaaaaaaaaaaaaaaaaaaaaaaaaaaaaaaaaaaaaaaaaaaaaaaaaaaaaaaaaaaaa

SEQ ID NO: 34307 - RNA, 1812 nt, Artificial Sequence
  mRNA product Design b-4 (hSL-A100) comprising derived and/or modified sequence from LASV(Mad39;Clade IV)__ANH09722__GPCmut8 (opt5)
aggagagucccgcagucggcguccagcggcucugcuuguucgugugugugucguugcaggccuuauucaagcuuaccaugggccagaucgugaccuucuuucaagaggucccccacguuauugaagaggugaugaacaucgugcugauugcccucagcauccuggcuguccuuaaggggcuguacaauguggccacaugcggacucauuggccugguuacguuccuucugcucugugggagauccugcaccacaacccuguauaaaggaguguacgaacugcaggcgcucgagcugaacauggaaacacuuaauauguguaugccucugucuugcaccaagaacaauagccaucacuauauccgggucggcaacgagacagggcucgagcugacccuuacgaauaccucccugaucaaccauaaauuuuguaaucucucugacgcucacaagaaaaaccuguacgaucaugcccugaugagcauuaucuccacauuccaccucucuauuccgaauuuuaaccaguaugaagccaugagcugcgacuucaaugauggaaagaucuccgugcaguacaaccugagccacaccuaugcuggcgacacagccaaucauuguggcaccguugcuaacggggugcuucaaacguuuaugcgcauggccuggggaggcucuuacauugcgcuggauuccgggagaggaggcugggacugcaucaugacaagcuaccaguaucucauuauccagaacaccacaugggaggaucacugucaguucucucggcccuccccuaucggguaccugggacuucugagccaacgcaccagagacauuuauaucucucggcgccuccugggcaccuuuacauggacgcuguccgauagcgaaggcaaggacacccccgggggauacugccucacaagauggaugcugauugaggccgagcuuaaauguuucggcaauaccgcugucgccaagugcaacgaaaaacaugaugaggaauuuugcgacaugcugcgccucuucgauuuuuguaagcaggcuauccagcggcugaaagccccugcgcagauguccauucaacuuaucaauaaggccgugaacgcucugaucaaugaccagcucauuaugaagaaccaccugagagacaucauggggauucccuauugcaauuacucuaaauauuguuaccugaaccacacagugaccggaaagacgagccucccuaaaugcugucuggucuccaauggcagcuaccuuaacgagacacauuucucugaugacaucgaacagcaagccgauaauaugauuaccgagaugcugcagaaggaguauauggaacggcaggggaaaaccccgcucggacugguugaccuguucguguuuuccaccagcuucuaccuuaucucuaucuuucuccaccuggugaagauucccacacaucgccacgucgugggcaaaccuugccccaagccucauagacugaaccacaugggcaucuguagcugcggguucuauaagcagcccggaguuccggugcgguggaaacgcugaggacuaguaauaaggaaacuguaugaaugucugugggcaggaagugaagagauccuucuguaaagguuuuuggaauuaugucugcugaauaauaaacuuuuuugaaauaauaaaucugguagaaaaaugagaucucaaaggcucuuuucagagccaccaaaaaaaaaaaaaaaaaaaaaaaaaaaaaaaaaaaaaaaaaaaaaaaaaaaaaaaaaaaaaaaaaaaaaaaaaaaaaaaaaaaaaaaaaaaaaaaaaaaaa

SEQ ID NO: 34308 - RNA, 1812 nt, Artificial Sequence
  mRNA product Design b-4 (hSL-A100) comprising derived and/or modified sequence from LASV(Z0947-SLE-2011;Clade IV)__AIT17840__GPCmut8 (opt5)
aggagagucccgcagucggcguccagcggcucugcuuguucgugugugugucguugcaggccuuauucaagcuuaccaugggccagaucgugaccuucuuucaagaggucccccacguuauugaagaggugaugaacaucgugcugauugcccucagcauccuggcuguccuuaaggggcuguacaauuucgccacaugcggacucgugggccugguuacguuucuucugcucugugggagauccugcaccauuucucuguauaaaggaguguacgaacugcagacacucgagcugaacauggaaacccuuaauauguguaugccucugagcugcacaaagaacaauucccaucacuauaucauggucggcaacgagaccgggcucgagcugacacuuaccaauacgucuaucauuaaccauaaauucuguaaucugagcgacgcgcacaagaaaaaccucuacgaucaugcucugauguccaucauuucuaccuuucaccugagcaucccgaauuucaaccaguaugaagccauguccugcgacuuuaauggaggcaagauuagcgugcaguacaaccucucucacuccuaugccggcgaugcugccaaucauugugggacaguugcuaacggagugcugcaaaccuucaugcggauggccuggggcgggagcuacaucgcgcuugacucuggacgcgauagaugggacugcauuaugacauccuaccaguaucugaucauccagaacaccacgugggaggaucacugucaguuuagccggcccucuccuauuggcuaccucgggcugcuuucccaacgcacaagagacaucuauauuagccggcgccugcucggaaccuucacauggacccuguccgauucugaaggcaaggacacccccggcggguacugccugacaagauggaugcucaucgaggccgagcugaaauguuuuggaaauacggcugucgccaagugcaacgaaaaacaugaugaggaguucugcgacaugcuucggcuguuugauuucuguaagcaggcuauucagcgccucaaagccccugcgcagaugagcauccaacugaucaauaaggccgugaacgcucuuauuaaugaccagcugaucaugaagaaccaccucagagacauuaugggcauccccuauugcaauuacuccaaauauuguuaccugaaccacaccacaaccgggaagacaagccugccuaaaugcugucucgugucuaauggauccuaccugaacgaaacccauuucagcgaugacauugaacagcaagccgauaauaugaucacggagaugcuucagaaggaguauauggaacggcagggcaaaacaccgcuggggcucgucgaccuguuuguuuucucuaccagcuuuuaccugaucuccauuuuccuucaccucgugaagauccccacccaucgccacauugugggaaaaccuugccccaagccucauagacugaaccacaugggcaucuguucuugcggccuguauaagcagcccggggucccggugaaauggaagcggugaggacuaguaauaaggaaacuguaugaaugucugugggcaggaagugaagagauccuucuguaaagguuuuuggaauuaugucugcugaauaauaaacuuuuuugaaauaauaaaucugguagaaaaaugagaucucaaaggcucuuuucagagccaccaaaaaaaaaaaaaaaaaaaaaaaaaaaaaaaaaaaaaaaaaaaaaaaaaaaaaaaaaaaaaaaaaaaaaaaaaaaaaaaaaaaaaaaaaaaaaaaaaaaaa

SEQ ID NO: 34309 - RNA, 1788 nt, Artificial Sequence
  mRNA product Design b-4 (A100) comprising derived and/or modified sequence from LASV(Josiah;Clade IV)__NP_694870__GPCmut8 (opt1)
aggagagucccgcagucggcguccagcggcucugcuuguucgugugugugucguugcaggccuuauucaagcuuaccaugggccagaucgugaccuucuuccaggaggucccccacgugaucgaggaggugaugaacaucguccugaucgcccucagcgugcuggccgugcugaaggggcucuacaacuucgcgaccugcggccuggucgggcuggugacguuccuccugcugugcggccgcuccugcaccaccagccucuacaaggggguguacgagcugcagacccuggagcucaacauggagacgcugaacaugugcaugccgcuguccugcaccaagaacaacagccaccacuacaucauggucggcaacgagaccggccucgagcugacgcugaccaacaccuccaucaucaaccacaaguucugcaaccucagcgacgcccacaagaagaaccuguacgaccacgcccugauguccaucaucagcaccuuccaccucuccauccccaacuucaaccaguacgaggccaugagcugcgacuucaacgggggcaagaucuccgugcaguacaaccugagccacuccuacgccggggacgcggccaaccacugcggcacgguggccaacgggguccugcagaccuucaugcggauggccuggggcggcagcuacaucgcgcucgacuccgggcgcggcaacugggacugcaucaugaccagcuaccaguaccugaucauccagaacaccacgugggaggaccacugccaguucucccggcccagccccaucggguaccugggccuccugucccagcgcacccgggacaucuacaucagccgccggcugcucggcaccuucaccuggacgcugagcgacuccgaggggaaggacaccccgggcggguacugccugacccgcuggaugcucaucgaggccgagcugaagugcuucggcaacaccgccguggccaagugcaacgagaagcacgacgaggaguucugcgacaugcugcggcuguucgacuucugcaagcaggccauccagcgccugaaggcgcccgcccagaugagcauccagcugaucaacaaggccgugaacgcccucaucaacgaccagcugaucaugaagaaccaccuccgggacaucauggggauccccuacugcaacuacuccaaguacugcuaccucaaccacacgaccaccggccgcaccagccugcccaagugcugccuggucuccaacggcagcuaccucaacgagacgcacuucuccgacgacaucgagcagcaggccgacaacaugaucaccgagaugcugcagaaggaguacauggagcggcaggggaagacgccccugggccucguggaccuguucguguucagcaccuccuucuaccugaucagcaucuuccugcaccucgucaagaucccgacccaccgccacaucguggggaaguccugccccaagccccaccggcugaaccacaugggcaucugcagcugcgggcuguacaagcagcccggcgugccggucaaguggaagcgcugaggacuaguaauaaggaaacuguaugaaugucugugggcaggaagugaagagauccuucuguaaagguuuuuggaauuaugucugcugaauaauaaacuuuuuugaaauaauaaaucugguagaaaaaugagaucuaaaaaaaaaaaaaaaaaaaaaaaaaaaaaaaaaaaaaaaaaaaaaaaaaaaaaaaaaaaaaaaaaaaaaaaaaaaaaaaaaaaaaaaaaaaaaaaaaaaa

SEQ ID NO: 34310 - RNA, 1785 nt, Artificial Sequence
  mRNA product Design b-4 (A100) comprising derived and/or modified sequence from LASV(LP;Clade I)__AAF86701__GPCmut8 (opt1)
aggagagucccgcagucggcguccagcggcucugcuuguucgugugugugucguugcaggccuuauucaagcuuaccaugggccagaucaucaccuucuuccaggaggugccccacgucaucgaggaggugaugaacaucgugcugaucgcccucagccugcuggccauccucaaggggcuguacaacaucgcgaccugcggcaucaucgggcuggucgccuuccucuuccugugcggcaaguccugcagccugacgcucaagggcggguacgagcugcagacccuggagcucaacauggagacccugaacaugugcaugccgcuguccugcacgaagaacagcucccaccacuacauccgcgugggcaacgagaccgggcucgagcugacccugaccaacacgagcaucaucaaccacaaguucugcaaccucuccgacgcccacaagaagaaccuguacgaccacgcccugaugagcaucaucuccaccuuccaccucagcauccccaacuucaaccaguacgaggccauguccugcgacuucaacggcgggaagaucagcgugcaguacaaccugucccacagcuacgcgggcgacgccgccgagcacugcgggaccgucgccaacggcgugcugcagaccuucaugcggauggcguggggcgggcgcuacaucgcccucgacuccggcaaggggaacugggacugcaucaugacgagcuaccaguaccugaucauccagaacaccaccugggaggaccacugccaguucucccggcccagccccaucggcuaccugggccuccugucccagcgcacccgggacaucuacaucagccgccggcugcucgggacguucaccuggacccugagcgacuccgagggcaacgagacccccgggggcuacugccugacgcgcuggaugcucaucgaggccgagcugaagugcuucgggaacaccgccguggccaagugcaacgagaagcacgacgaggaguucugcgacaugcugcggcuguucgacuucugcaagcaggcgauccgccggcugaaggcccccgcccagaugagcauccagcugaucaacaaggccgucaacgcccucaucaacgaccagcugaucaugaagaaccaccuccgcgacaucaugggcauccccuacugcaacuacuccaaguacugcuaccucaaccacaccagcuccggccggaccagccugcccaagugcugccugaucuccaacgggagcuaccucaacgagacgcaguucuccgacgacaucgagcagcaggcggacaacaugaucaccgagaugcugcagaaggaguacaucgagcgccagggcaagaccccgcuggggcucguggacaucuucaucuucagcaccuccuucuaccugaucagcaucuuccugcaccugaucaagaucccgacgcaccggcacaucgugggcaagcccugccccaagccccaccgccucaaccacaugggggucugcuccugcggccuguacaagcacccgggcgugcccaccaaguggaagcggugaggacuaguaauaaggaaacuguaugaaugucugugggcaggaagugaagagauccuucuguaaagguuuuuggaauuaugucugcugaauaauaaacuuuuuugaaauaauaaaucugguagaaaaaugagaucuaaaaaaaaaaaaaaaaaaaaaaaaaaaaaaaaaaaaaaaaaaaaaaaaaaaaaaaaaaaaaaaaaaaaaaaaaaaaaaaaaaaaaaaaaaaaaaaaaaaa

SEQ ID NO: 34311 - RNA, 1785 nt, Artificial Sequence
  mRNA product Design b-4 (A100) comprising derived and/or modified sequence from LASV(803213;Clade II)__AAF86703__GPCmut8 (opt1)
aggagagucccgcagucggcguccagcggcucugcuuguucgugugugugucguugcaggccuuauucaagcuuaccaugggccagaucaucaccuucuuccaggaggugccccacgucaucgaggaggugaugaacaucgugcugaucgcccucagccugcuggccauccucaaggggaucuacaacgucgcgaccugcggccuguucgggcugaucuccuuccuccugcugugcggccgcagcugcuccgugacguacaaggggguguacgagcuccagacccuggagcugaacauggccaaccucaacaugugcaugccgcugagcugcaccaagaacaacucccaccacuacaucauggucggcaacgagacgggccuggagcucacccugaccaacaccagcaucaucaaccacaaguucugcaaccuguccgacgcccacaagaagaaccucuacgaccacgcccugaugagcaucaucuccacguuccaccugagcauccccaacuucaaccaguacgaggccauguccugcgacuucaacgggggcaagaucagcgugcaguacaaccucucccacagcuucgcgguggacgccgccaaccacugcgggaccaucgccaacggcguccugcagaccuucaugcggauggcguggggcggguccuacaucgcccuggacagcggcaaggggaacugggacugcaucaugaccuccuaccaguaccucaucauccagaacacgaccugggaggaccacugccaguucagccgccccucccccaucggcuaccuggggcugcucagccagcggacccgcgacaucuacaucagccggcgccugcugggcaccuucacguggacccucuccgacagcgagggcaacgaggcccccgggggcuacugccugacccgguggaugcugaucgaggccgagcucaagugcuucgggaacaccgccguggcgaagugcaacgagaagcacgacgaggaguucugcgacaugcugcgccuguucgacuucugcaagcaggccaucaagcggcucaagacgcccgcccagauguccauccagcugaucaacaaggccgugaacgcccugaucaacgaccagcucaucaugaagaaccaccuccgcgacaucaugggcauccccuacugcaacuacagccgguacugcuaccugaaccacaccgucaccgggaagaccucccugccccgcugcugccuggugagcaacggcuccuaccugaacgagacgcacuucagcgacgacaucgagcagcaggcggacaacaugaucaccgagaugcuccagaaggaguacauggaccggcagggcaagaccccgcuggggcugguggaccucuucgucuucuccaccagcuucuaccugaucuccaucuuccugcaccuggugaagaucccgacgcaccgccacaucgugggcaagcccugccccaagccccaccggcucaaccacauggggaucugcagcugcggccuguacaagcacccggggguccccgugaaguggaagcgcugaggacuaguaauaaggaaacuguaugaaugucugugggcaggaagugaagagauccuucuguaaagguuuuuggaauuaugucugcugaauaauaaacuuuuuugaaauaauaaaucugguagaaaaaugagaucuaaaaaaaaaaaaaaaaaaaaaaaaaaaaaaaaaaaaaaaaaaaaaaaaaaaaaaaaaaaaaaaaaaaaaaaaaaaaaaaaaaaaaaaaaaaaaaaaaaaa

SEQ ID NO: 34312 - RNA, 1785 nt, Artificial Sequence
  mRNA product Design b-4 (A100) comprising derived and/or modified sequence from LASV(GA391;Clade III)__CAA36645__GPCmut8 (opt1)
aggagagucccgcagucggcguccagcggcucugcuuguucgugugugugucguugcaggccuuauucaagcuuaccaugggccagaucgugaccuucuuccaggaggucccccacgugaucgaggaggugaugaacaucguccugaucgcccucagcauccuggccauccugaaggggcucuacaacguggcgaccugcggccugaucgggcuggugacguuccuccugcuguccggccgcagcugcucccucaucuacaaggggaccuacgagcugcagacccuggagcucaacauggagacccugaacaugugcaugccgcugagcugcaccaagaacaacucccaccacuacauccgggucggcaacgagaccggccucgagcugacccugacgaacaccagcauccucaaccacaaguucugcaaccuguccgacgcccacaagcgcaaccuguacgaccacagccucauguccaucaucagcaccuuccaccuguccauccccaacuucaaccaguacgaggccaugagcugcgacuucaacgggggcaagaucaccgugcaguacaaccugucccacagcuucgccguggacgccgcggggcacugcggcacgcucgccaacgggguccugcagaccuucaugcggauggccuggggcggcuccuacaucgcccuggacagcgggcgcggcaacugggacugcaucaugaccuccuaccaguaccucaucauccagaacaccacgugggacgaccacugccaguucagccggcccucccccaucggguaccugggccugcucagccagcgcacccgggacaucuacaucagccgccggcugcugggcaccuucaccuggacgcucuccgacagcgaggggaacgagaccccgggcggguacugccugacccgcuggaugcugaucgaggcggagcucaagugcuucggcaacaccgccguggccaagugcaacgagaagcacgacgaggaguucugcgacaugcugcggcuguucgacuucugcaagcaggccauccgccggcucaagacgcccgcccagauguccauccagcugaucaacaaggcggugaacgcccugaucaacgaccagcucaucaugaagaaccaccuccgcgacaucauggggauccccuacugcaacuacagccgguacugcuaccugaaccacaccuccaccggcaagaccagccugccccgcugcugccugaucuccaacggcagcuaccugaacgagacgaaguucuccgacgacaucgagcagcaggccgacaacaugaucaccgagaugcuccagaaggaguacaucgaccggcaggggaagacgccccugggccuggucgaccuguucguguucagcaccuccuucuaccucaucagcaucuuccugcaccuggugaagaucccgacccaccgccacaucgucgggaagcccugccccaagccccaccggcucaaccacaugggcaucugcuccugcgggcuguacaagcagccgggcgugcccgugcgcuggaagcggugaggacuaguaauaaggaaacuguaugaaugucugugggcaggaagugaagagauccuucuguaaagguuuuuggaauuaugucugcugaauaauaaacuuuuuugaaauaauaaaucugguagaaaaaugagaucuaaaaaaaaaaaaaaaaaaaaaaaaaaaaaaaaaaaaaaaaaaaaaaaaaaaaaaaaaaaaaaaaaaaaaaaaaaaaaaaaaaaaaaaaaaaaaaaaaaaa

SEQ ID NO: 34313 - RNA, 1788 nt, Artificial Sequence
  mRNA product Design b-4 (A100) comprising derived and/or modified sequence from LASV(AV;Clade V)__CCA30314__GPCmut8 (opt1)
aggagagucccgcagucggcguccagcggcucugcuuguucgugugugugucguugcaggccuuauucaagcuuaccaugggccagaucgugaccuucuuccaggaggucccccacgugaucgaggaggugaugaacaucguccugaucgcccucagcauccuggccgugcugaaggggcucuacaacaucgcgaccugcggccugaucgggcugaucacguuccuccugcugugcggccgcuccugcagcuccaaccucuacaaggggguguacgagcugcagagccuggaccucaacauggagacccugaacaugugcaugccgcuguccugcaccaagaacaacagccaccacuacauccgggucggcaacgacacgggccucgagcugacccugaccaacaccuccauccucaaccacaaguucugcaaccugagcgacgcccacaagaaggaccuguacgaccacgcccucauguccaucaucagcacguuccaccuguccauccccaacuucaaccaguacgaggccaugagcugcgacuucaacgggggcaagaucuccgugcaguacaaccugagccacuccuacgccaucgacgcggccaaccacugcgggaccguggccaacggcauccuccagaccuucaugcgcauggccuggggcgggagcuacaucgcgcuggacuccggccgggggaacugggacugcaucaugaccagcuaccaguaccugaucauccagaacacgaccugggagaaccacugccaguucucccgccccagccccaucggcuaccucgggcugcugagccagcggacccgcgacaucuacaucucccggcgccuccugggcaccuucacguggacccugagcgacuccgagggcaacgccacccccgggggcuacugccucacccgguggaugcugaucgaggccgagcugaagugcuucgggaacacggccgucgccaagugcaacgagaagcacgacgaggaguucugcgacaugcuccgccuguucgacuucugcaagcaggcgaucagccggcugaagucccccgcccagaugagcauccagcucaucaacaaggccgugaacgcccugaucaacgaccagcugaucaugaagaaccaccuccgcgacaucaugggcauccccuacugcaacuacuccaaguacugcuaccugaaccacaccaucaccgggaagaccagccugcccaagugcugccucguguccaacggcagcuaccugaacgagacgcacuucuccgacgacaucgagcagcaggccgacaacaugaucaccgagaugcugcagaaggaguacauggagcggcagggcaagaccccgcucgggcuggucgaccuguucguguucagcaccuccuucuaccugaucagcaucuuccuccgccuggugaagaucccgacgcaccggcacaucgucggcaagcccugccccaagccccaccgccugaaccacauggggaucugcuccugcggccucuacaagcagccgggggugcccgugcgguggaagcgcugaggacuaguaauaaggaaacuguaugaaugucugugggcaggaagugaagagauccuucuguaaagguuuuuggaauuaugucugcugaauaauaaacuuuuuugaaauaauaaaucugguagaaaaaugagaucuaaaaaaaaaaaaaaaaaaaaaaaaaaaaaaaaaaaaaaaaaaaaaaaaaaaaaaaaaaaaaaaaaaaaaaaaaaaaaaaaaaaaaaaaaaaaaaaaaaaa

SEQ ID NO: 34314 - RNA, 1785 nt, Artificial Sequence
  mRNA product Design b-4 (A100) comprising derived and/or modified sequence from LASV(Togo/2016/7082;Clade VI)__AMR44577__GPCmut8 (opt1)
aggagagucccgcagucggcguccagcggcucugcuuguucgugugugugucguugcaggccuuauucaagcuuaccaugggccagaucaucaccuucuuccaggaggugccccacgucaucgaggaggugaugaacaucgugcugaucgcccucagccugcuggccauccucaagggggucuacaacguggcgaccugcggcaucaucgggcuggugacguuccuguuccucugcggccgcuccugcagccugaucuacaagggguccuacgagcugcagacccucgagcugaacauggagacccugaacaugugcaugccgcucagcugcacgaagaacuccagccaccacuacauccgggucggcaacgagaccggccuggagcugacccucaccaacacguccaucaucaaccacaaguucugcaaccugagcgacgcccacaagcgcaaccuguacgaccacgcccucauguccauccugagcaccuuccaccuguccauccccaacuucaaccaguacgaggccaugagcugcgacuucaacgggggcaagaucuccgugcaguacaaccucagccacgccuacgcgguggacgccgccgagcacugcgggaccgucgccaacggcgugcugcagaccuucaugcggauggcguggggcggguccuacaucgcccuggacagcggccgcgggaacugggacugcaucaugacguccuaccaguaccucaucauccagaacaccaccugggaggaccacugccaguucagccggcccucccccaucggcuaccuggggcugcucagccagcgcacccgggacaucuacaucagccgccggcugcugggcacguucaccuggacccucuccgacagcgagggcaacgagacccccgggggcuacugccugacgcgcuggaugcugaucgaggccgagcucaagugcuucgggaacaccgccguggccaagugcaacgagaagcacgacgaggaguucugcgacaugcugcggcuguucgacuucugcaagcaggcgauccagcgccucaagucccccgcccagaugagcauccagcugaucaacaaggccgucaacgcccugaucaacgaccagcucaucaugaagaaccaccuccgggacaugaugggcauccccuacugcaacuacuccaaguacugcuaccugaaccacaccagcuccgggcgcaccagccugcccaagugcugccugguguccaacggcagcuaccugaacgagacgcacuucuccgacgacaucgagcagcaggccgacaacaugaucaccgagaugcuccagaaggaguacaucgaccggcagggcaagaccccgcuggggcugguggaccucuucgucuucagcaccuccuucuaccugaucagcaucuuccugcaccugaucaagaucccgacgcaccgccacaucgugggcaagcccugccccaagccccaccggcucaaccacauggggaucugcuccugcggccuguacaagcagccgggggugcccacccgcuggaagcggugaggacuaguaauaaggaaacuguaugaaugucugugggcaggaagugaagagauccuucuguaaagguuuuuggaauuaugucugcugaauaauaaacuuuuuugaaauaauaaaucugguagaaaaaugagaucuaaaaaaaaaaaaaaaaaaaaaaaaaaaaaaaaaaaaaaaaaaaaaaaaaaaaaaaaaaaaaaaaaaaaaaaaaaaaaaaaaaaaaaaaaaaaaaaaaaaa

SEQ ID NO: 34315 - RNA, 1785 nt, Artificial Sequence
  mRNA product Design b-4 (A100) comprising derived and/or modified sequence from LASV(KAK-428;Clade n.d. (VII))__ANH09740__GPCmut8 (opt1)
aggagagucccgcagucggcguccagcggcucugcuuguucgugugugugucguugcaggccuuauucaagcuuaccaugggccagaucgugaccuucuuccaggaggucccccacgugaucgaggaggugaugaacaucguccugaucgcccucagccugcuggccauccucaaggggcuguacaacuucgcgaccugcggcgugaucgggcugaucacguuccuccugcugugcggccgcuccugcagcgccaccuacaaggggcaguacgagcuccagacccuggagcugaacauggagucccucaacaugugcaugccgcugagcugcacgaagaacaacucccaccacuacauccgggccggcaacaacaccggccuggagcucacccugaccaacacgagcaucaucucccacaaguucugcaaccugagcgacgcccacaagaagaaccucuacgaccacacccugauguccaucaucaccaccuuccaccugagcauccccaacuucaaccaguacgaggccauguccugcgacuucaacgggggcaagaucagcauccaguacaaccucucccacagcuacgcgggggacgccgcccagcacugcggcacgguggccaacgggguccugcagaccuucaugcgcauggcguggggcggcuccuaccuggcccucgacagcgggcggcgcggcugggacugcaucaucuccagcuaccaguaccugaucauccagaacaccaccugggacgaccacugccaguucucccggcccagccccaucggguaccugggcuucgugagccagaagacgcgcgacaucuacaucucccggcgccuccugggcaccuucaccuggacccugagcgacuccgaggggcacgacaugccgggcggguacugccucacgcgguggaugcugaucgaggccgaccugaagugcuucggcaacaccgccguggccaagugcaacgagaagcacgacgaggaguucugcgacauguggcgccucuucgacuucugcaagcaggcgauccagcggcugaaggcccccgcccagaugaacauccagcugaucaacaaggccgucaacgcccucaucaacgaccagcugaugaugaagaaccaccuccgcgacaucauggggauccccuacugcaacuacagcaaguucugcuaccugaacaacaccaccacgggccggaccucccugccccgcugcugccugaucagcaacggcuccuaccucaacgagacccacuucagcgacgacaucgagcagcaggcggacaacaugaucaccgagaugcugcagaaggaguacauggaccggcaggggaagacgccccugggccucguggaccuguucguguucuccaccagcuucuaccugaucaccaucuuccuccaccuggucaagaucccgacccaccgccacaucguggggaagcccugccccaagccccaccggcugaaccacaugggcaucugcuccugcgggcuguacaagcagccgggcgugcccguccgcuggaagcggugaggacuaguaauaaggaaacuguaugaaugucugugggcaggaagugaagagauccuucuguaaagguuuuuggaauuaugucugcugaauaauaaacuuuuuugaaauaauaaaucugguagaaaaaugagaucuaaaaaaaaaaaaaaaaaaaaaaaaaaaaaaaaaaaaaaaaaaaaaaaaaaaaaaaaaaaaaaaaaaaaaaaaaaaaaaaaaaaaaaaaaaaaaaaaaaaa

SEQ ID NO: 34316 - RNA, 1785 nt, Artificial Sequence; identical to SEQ ID NO: 34310
  mRNA product Design b-4 (A100) comprising derived and/or modified sequence from LASV(Pinneo-NIG-1969;Clade I)__AIT17836__GPCmut8 (opt1)

SEQ ID NO: 34317 - RNA, 1785 nt, Artificial Sequence
  mRNA product Design b-4 (A100) comprising derived and/or modified sequence from LASV(ISTH0009-NIG-2011;Clade II)__AIT17404__GPCmut8 (opt1)
aggagagucccgcagucggcguccagcggcucugcuuguucgugugugugucguugcaggccuuauucaagcuuaccaugggccagaucaucaccuucuuccaggaggugccccacgucaucgaggaggugaugaacaucgugcugaucgcccucagccugcuggccauccucaaggggaucuacaacgucgcgaccugcggccuguucgggcugguguccuuccuccugcugugcggccgcagcugcuccacgaccuacaaggggguguacgagcuccagacccuggagcuggacauggccagccucaacaugugcaugccgcuguccugcacgaagaacaacagccaccacuacaucauggucggcaacgagaccggccuggagcucacccugaccaacacguccaucaucaaccacaaguucugcaaccugagcgacgcccacaagaagaaccucuacgaccacgcccugauguccaucaucagcaccuuccaccuguccauccccaacuucaaccaguacgaggccaugagcugcgacuucaacgggggcaagaucuccgugcaguacaaccucagccacgcguacgccguggacgccgccaaccacugcgggaccaucgcgaacggcguccugcagaccuucaugcggauggccuggggcggguccuacaucgcccuggacagcggcaagggguccugggacugcaucaugacgagcuaccaguaccucaucauccagaacaccaccugggaggaccacugccaguucucccgccccagccccaucggcuaccuggggcugcucagccagcggacccgcgacaucuacaucucccggcgccugcugggcacguucaccuggacccucagcgacuccgagggcaacgagacccccgggggcuacugccugacgcgguggaugcugaucgaggccgagcucaagugcuucgggaacaccgccguggcgaagugcaacgagaagcacgacgaggaguucugcgacaugcugcgccuguucgacuucugcaagcaggccauccggcgccucaagacccccgcccagaugagcauccagcugaucaacaaggccgugaacgcccugaucaacgaccagcucaucaugaagaaccaccuccgggacaucaugggcaucccguacugcaacuacuccaaguacugcuaccugaaccacaccgucacggggaagaccagccugccccgcugcugccugguguccaacggcagcuaccugaacgagacccacuucuccgacgacaucgagcagcaggcggacaacaugaucaccgagcuccugcagaaggaguacauggaccggcagggcaagacgccccuggggcucguggaccuguucgucuucagcaccuccuucuaccugaucagcaucuuccugcaccucaucaagaucccgacccaccgccacaucaccggcaagcccugccccaagccccaccggcugaaccacauggggaucugcuccugcggccuguacaagcacccgggggugcccgugaaguggaagcgcugaggacuaguaauaaggaaacuguaugaaugucugugggcaggaagugaagagauccuucuguaaagguuuuuggaauuaugucugcugaauaauaaacuuuuuugaaauaauaaaucugguagaaaaaugagaucuaaaaaaaaaaaaaaaaaaaaaaaaaaaaaaaaaaaaaaaaaaaaaaaaaaaaaaaaaaaaaaaaaaaaaaaaaaaaaaaaaaaaaaaaaaaaaaaaaaaa

SEQ ID NO: 34318 - RNA, 1785 nt, Artificial Sequence
  mRNA product Design b-4 (A100) comprising derived and/or modified sequence from LASV(ISTH2010-NIG-2012;Clade II)__AIT17482__GPCmut8 (opt1)
aggagagucccgcagucggcguccagcggcucugcuuguucgugugugugucguugcaggccuuauucaagcuuaccaugggccagaucaucaccuucuuccaggaggugccccacgucaucgaggaggugaugaacaucgugcugaucgcccucagccugcuggccauccucaaggggaucuacaacgucgcgaccugcggccuguucgggcugguguccuuccuccugcugugcggccgcagcugcuccacgaccuacaaggggguguacgagcuccagacccuggagcuggacauggccagccucaacaugugcaugccgcuguccugcacgaagaacaacagccaccacuacaucauggucggcaacgagaccggccuggagcucacccugaccaacacguccaucaucaaccacaaguucugcaaccugagcgacgcccacaagaagaaccucuacgaccacgcccugauguccaucaucagcaccuuccaccuguccauccccaacuucaaccaguacgaggccaugagcugcgacuucaacgggggcaagaucuccgugcaguacaaccucagccacgcguacgccguggacgccgccaaccacugcgggaccaucgcgaacggcguccugcagaccuucaugcggauggccuggggcggguccuacaucgcccuggacagcggcaagggguccugggacugcaucaugacgagcuaccaguaccucaucauccagaacaucaccugggaggaccacugccaguucucccgccccagccccaucggcuaccuggggcugcucagccagcggacccgcgacaucuacaucucccggcgccugcugggcaccuucacguggacccucagcgacuccgagggcaacgagacccccgggggcuacugccugacccgguggaugcugaucgaggccgagcucaagugcuucgggaacacggccguggcgaagugcaacgagaagcacgacgaggaguucugcgacaugcugcgccuguucgacuucugcaagcaggccauccggcgccucaagacccccgcccagaugagcauccagcugaucaacaaggccgugaacgcccugaucaacgaccagcucaucaugaagaaccaccuccgggacaucaugggcauccccuacugcaacuacuccaaguacugcuaccugaaccacaccgucaccgggaagacgagccugccccgcugcugccugguguccaacggcagcuaccugaacgagacccacuucuccgacgacaucgagcagcaggcggacaacaugaucaccgagcuccugcagaaggaguacaucgaccggcagggcaagaccccgcuggggcucguggaccuguucgucuucagcacguccuucuaccugaucagcaucuuccugcaccucgugaagaucccgacccaccgccacguggucggcaagcccugccccaagccccaccggcugaaccacauggggaucugcuccugcggccuguacaagcacccgggggugcccgugaaguggaagcgcugaggacuaguaauaaggaaacuguaugaaugucugugggcaggaagugaagagauccuucuguaaagguuuuuggaauuaugucugcugaauaauaaacuuuuuugaaauaauaaaucugguagaaaaaugagaucuaaaaaaaaaaaaaaaaaaaaaaaaaaaaaaaaaaaaaaaaaaaaaaaaaaaaaaaaaaaaaaaaaaaaaaaaaaaaaaaaaaaaaaaaaaaaaaaaaaaa

SEQ ID NO: 34319 - RNA, 1785 nt, Artificial Sequence
  mRNA product Design b-4 (A100) comprising derived and/or modified sequence from LASV(Lassa virus/H.sapiens-wt/NGA/2015/ISTH_0543;Clade II)__AVO03639__GPCmut8 (opt1)
aggagagucccgcagucggcguccagcggcucugcuuguucgugugugugucguugcaggccuuauucaagcuuaccaugggccagaucaucaccuucuuccaggaggugccccacgucaucgaggaggugaugaacaucgugcugaucgcccucagccugcuggccauccucaaggggaucuacaacgucgcgaccugcggccuguucgggcugguguccuuccuccugcugugcggccgcagcugcuccacgaccuacaaggggguguacgagcuccagacccuggagcuggacauggccaaccucaacaugugcaugccgcugagcugcacgaagaacaacucccaccacuacaucauggucggcaacgagaccggccuggagcucacccugaccaacacgagcaucaucaaccacaaguucugcaaccuguccgacgcccacaagaagaaccucuacgaccacgcccugaugagcaucaucuccaccuuccaccugagcauccccaacuucaaccaguacgaggccauguccugcgacuucaacgggggcaagaucagcgugcaguacaaccucucccacaccuacgcgguggacgccgccaaccacugcgggaccaucgccaacggcguccugcagacguucaugcggauggcguggggcgggagcuacaucgcccuggacuccggcaaggggagcugggacugcaucaugaccuccuaccaguaccucgugauccagaacaccaccugggaggaccacugccaguucagccgccccucccccaucggcuaccuggggcugcucagccagcggacgcgcgacaucuacaucagccggcgccugcugggcaccuucaccuggacccucuccgacagcgagggcaacgagacgcccgggggcuacugccugacccgguggaugcugaucgaggccgagcucaagugcuucgggaacaccgccguggccaagugcaacgagaagcacgacgaggaguucugcgacaugcugcgccuguucgacuucugcaagcaggcgauccggcgccucaagacccccgcccagauguccauccagcugaucaacaaggccgucaacgcccugaucaacgaccagcucaucaugaagaaccaccuccgggacaucaugggcauccccuacugcaacuacagcaaguacugcuaccugaaccacacggugaccgggaagaccucccugccccgcugcugccuggugagcaacggcuccuaccugaacgagacccacuucagcgacgacaucgagcagcaggccgacaacaugaucacggagcuccugcagaaggaguacaucgaccggcagggcaagaccccgcuggggcucgucgaccuguucguguucuccaccagcuucuaccugaucuccaucuuccugcaccucgugaagaucccgacccaccgccacaucacgggcaagcccugccccaagccccaccggcugaaccacauggggaucugcagcugcggccuguacaagcacccggggguccccgugaaguggaagcgcugaggacuaguaauaaggaaacuguaugaaugucugugggcaggaagugaagagauccuucuguaaagguuuuuggaauuaugucugcugaauaauaaacuuuuuugaaauaauaaaucugguagaaaaaugagaucuaaaaaaaaaaaaaaaaaaaaaaaaaaaaaaaaaaaaaaaaaaaaaaaaaaaaaaaaaaaaaaaaaaaaaaaaaaaaaaaaaaaaaaaaaaaaaaaaaaaa

SEQ ID NO: 34320 - RNA, 1785 nt, Artificial Sequence
  mRNA product Design b-4 (A100) comprising derived and/or modified sequence from LASV(Lassa virus/H.sapiens-wt/NGA/2016/ISTH_0009;Clade II)__AVO03571__GPCmut8 (opt1)
aggagagucccgcagucggcguccagcggcucugcuuguucgugugugugucguugcaggccuuauucaagcuuaccaugggccagaucaucaccuucuuccaggaggugccccacgucaucgaggaggugaugaacaucgugcugaucgcccucagccugcuggccauccucaaggggaucuacaacgucgcgaccugcggccugcuggggcucguguccuuccugcugcucugcggccgcagcugcuccacgaccuacaaggggguguacgagcugcagacccuggagcucgacauggccagccugaacaugugcaugccgcuguccugcacgaagaacaacagccaccacuacaucauggucggcaacgagaccggccucgagcugacccugaccaacacguccaucaucaaccacaaguucugcaaccucagcgacgcccacaagaagaaccuguacgaccacgcccugauguccaucaucagcaccuuccaccucuccauccccaacuucaaccaguacgaggccaugagcugcgacuucaacgggggccggaucuccgugcaguacaaccugagccacuccuacgcgguggacgccgccaaccacugcgggaccaucgccaacggcguccugcagaccuucaugcgcauggcguggggcgggagcuacaucgcccucgacuccggcaaggggagcugggacugcaucaugacguccuaccaguaccugaucauccagaacaccaccugggaggaccacugccaguucagccggcccagccccaucggcuaccuggggcuccugucccagcgcacccgggacaucuacaucagccgccggcugcucggcacguucaccuggacccuguccgacagcgagggcaacgagacccccgggggcuacugccugacgcgcuggaugcucaucgaggccgagcugaagugcuucgggaacaccgccguggccaagugcaacgagaagcacgacgaggaguucugcgacaugcugcggcuguucgacuucugcaagcaggcgauccgccggcugaagacccccgcccagauguccauccagcugaucaacaaggccgugaacgcccucaucaacgaccagcugaucaugaagaaccaccuccgcgacaucaugggcaucccguacugcaacuacagcaaguacugcuaccucaaccacaccgucacggggaagaccucccugccccggugcugccuggugagcaacggcuccuaccucaacgagacccacuucagcgacgacaucgagcagcaggccgacaacaugaucaccgagcugcugcagaaggaguacaucgaccgccagggcaagacgccccucgggcugguggaccuguucgucuucuccaccagcuucuaccugaucuccaucuuccuccaccuggugaagaucccgacccaccggcacaucaccggcaagcccugccccaagccccaccgccugaaccacauggggaucugcagcugcggccucuacaaccacccgggggugcccgucaaguggaagcggugaggacuaguaauaaggaaacuguaugaaugucugugggcaggaagugaagagauccuucuguaaagguuuuuggaauuaugucugcugaauaauaaacuuuuuugaaauaauaaaucugguagaaaaaugagaucuaaaaaaaaaaaaaaaaaaaaaaaaaaaaaaaaaaaaaaaaaaaaaaaaaaaaaaaaaaaaaaaaaaaaaaaaaaaaaaaaaaaaaaaaaaaaaaaaaaaa

SEQ ID NO: 34321 - RNA, 1785 nt, Artificial Sequence
  mRNA product Design b-4 (A100) comprising derived and/or modified sequence from LASV(Lassa virus/H.sapiens-wt/NGA/2016/ISTH_0017;Clade II)__AVO03567__GPCmut8 (opt1)
aggagagucccgcagucggcguccagcggcucugcuuguucgugugugugucguugcaggccuuauucaagcuuaccaugggccagaucaucaccuucuuccaggaggugccccacgucaucgaggaggugaugaacaucgugcugaucgcccucagccugcuggccauccucaaggggaucuacaacgucgcgaccugcggccuguucgggcugguguccuuccuccugcugugcggccgcagcugcuccacgaccuacaaggggguguacgagcuccagacccuggagcuggacauggccagccucaacaugugcaugccgcuguccugcacgaagaacaacagccaccacuacaucauggucggcaacgagaccggccuggagcucacccugaccaacacguccaucaucaaccacaaguucugcaaccugagcgacgcccacaagaagaaccucuacgaccacgcccugauguccaucaucagcaccuuccaccuguccauccccaacuucaaccaguacgaggccaugagcugcgacuucaacgggggcaagaucuccgugcaguacaaccucagccacaccuacgcgaucgacgccgccaaccacugcgggaccaucgccaacggcgugcugcagacguucaugcggauggcguggggcggguccuacaucgcccuggacagcggcaagggguccugggacugcaucaugaccagcuaccaguaccucaucauccagaacaccaccugggaggaccacugccaguucucccgccccagccccaucggcuaccuggggcugcucagccagcggacgcgcgacaucuacaucucccggcgccugcugggcaccuucaccuggacccucagcgacuccgagggcaacgagacgcccgggggcuacugccugacccgguggaugcugaucgaggccgagcucaagugcuucgggaacaccgccgucgccaagugcaacgagaagcacgacgaggaguucugcgacaugcugcgccuguucgacuucugcaagcaggcgauccggcgccucaagacccccgcccagaugagcauccagcugaucaacaaggccgugaacgcccugaucaacgaccagcucaucaugaagaaccaccuccgggacaucaugggcauccccuacugcaacuacuccaaguacugcuaccugaaccacacggugaccgggaagaccagccugccccgcugcugccuggucuccaacggcagcuaccugaacgagacccacuucuccgacgacaucgagcagcaggccgacaacaugaucacggagcuccugcagaaggaguacauggaccggcagggcaagaccccgcuggggcucguggaccuguucguguucagcaccuccuucuaccugaucagcaucuuccugcaccucguccgcaucccgacccaccggcacgugaucggcaagcccugccccaagccccaccgccugaaccacauggggaucugcuccugcggccuguacaagcacccgggggugcccgucaaguggaagcggugaggacuaguaauaaggaaacuguaugaaugucugugggcaggaagugaagagauccuucuguaaagguuuuuggaauuaugucugcugaauaauaaacuuuuuugaaauaauaaaucugguagaaaaaugagaucuaaaaaaaaaaaaaaaaaaaaaaaaaaaaaaaaaaaaaaaaaaaaaaaaaaaaaaaaaaaaaaaaaaaaaaaaaaaaaaaaaaaaaaaaaaaaaaaaaaaa

SEQ ID NO: 34322 - RNA, 1785 nt, Artificial Sequence
  mRNA product Design b-4 (A100) comprising derived and/or modified sequence from LASV(Lassa virus/H.sapiens-wt/NGA/2018/ISTH_0959;Clade II)__AVV65099__GPCmut8 (opt1)
aggagagucccgcagucggcguccagcggcucugcuuguucgugugugugucguugcaggccuuauucaagcuuaccaugggccagaucaucaccuucuuccaggaggugccccacgucaucgaggaggugaugaacaucgugcugaucgcccucagccugcuggccauccucaaggggaucuacaacgucgugaccugcggccuguucgggcugguguccuuccuccugcugugcggccgcagcugcuccacgaccuacaagggggucuacgagcuccagacccuggagcuggacauggcgagccucaacaugugcaugccgcuguccugcacgaagaacaacagccaccacuacaucauggugggcaacgagaccggccuggagcucacccugaccaacacguccaucaucaaccacaaguucugcaaccugagcgacgcccacaagaagaaccucuacgaccacgcccugauguccaucaucagcaccuuccaccuguccauccccaacuucaaccaguacgaggccaugagcugcgacuucaacgggggcaagaucuccgugcaguacaaccucagccacgccuacgcgaucgacgccgccaaccacugcgggaccaucgccaacggcguccugcagaccuucaugcggauggcguggggcggguccuacaucgcccuggacagcggcaagggguccugggacugcaucaugacgagcuaccaguaccucaucauccagaacaccaccugggaggaccacugccaguucucccgccccagccccaucggcuaccuggggcugcucagccagcggacccgcgacaucuacaucucccggcgccugcugggcacguucaccuggacccucagcgacuccgagggcaacgagacccccgggggcuacugccugacgcgguggaugcugaucgaggccgagcucaagugcuucgggaacaccgccguggccaagugcaacgagaagcacgacgaggaguucugcgacaugcugcgccuguucgacuucugcaagcaggcgauccggcgccucaagacccccgcccagaugagcauccagcugaucaacaaggccgugaacgcccugaucaacgaccagcucaucaugaagaaccaccuccgggacaucaugggcaucccguacugcaacuacuccaaguacugcuaccugaaccacaccgucacggggaagaccagccugccccgcugcugccugguguccaacggcagcuaccugaacgagacccacuucuccgacgacaucgagcagcaggccgacaacaugaucaccgagcuccugcagaaggaguacaucgaccggcagggcaagacgccccuggggcucguggaccuguucgucuucagcaccuccuucuaccugaucagcaucuuccugcaccucgugaagaucccgacccaccgccacgugaucggcaagcccugccccaagccccaccggcugaaccacauggggaucugcuccugcggccuguacaagcacccggggguccccgugaaguggaagcgcugaggacuaguaauaaggaaacuguaugaaugucugugggcaggaagugaagagauccuucuguaaagguuuuuggaauuaugucugcugaauaauaaacuuuuuugaaauaauaaaucugguagaaaaaugagaucuaaaaaaaaaaaaaaaaaaaaaaaaaaaaaaaaaaaaaaaaaaaaaaaaaaaaaaaaaaaaaaaaaaaaaaaaaaaaaaaaaaaaaaaaaaaaaaaaaaaa

SEQ ID NO: 34323 - RNA, 1785 nt, Artificial Sequence
  mRNA product Design b-4 (A100) comprising derived and/or modified sequence from LASV(LASV003-NIG-2008;Clade II)__AIT17580__GPCmut8 (opt1)
aggagagucccgcagucggcguccagcggcucugcuuguucgugugugugucguugcaggccuuauucaagcuuaccaugggccagaucaucaccuucuuccaggaggugccccacgucaucgaggaggugaugaacaucgugcugaucgcccucagccugcuggccauccucaaggggaucuacaacgucgcgaccugcggccuguucgggcugguguccuuccuccugcugugcggccgcagcugcuccacgaccuacaaggggguguacgagcuccagacccuggagcuggacauggccagccucaacaugugcaugccgcuguccugcacgaagaacaacagccaccacuacaucauggucggcaacgagaccggccuggagcucacccugaccaacacguccaucaucaaccacaaguucugcaaccugagcgacgcccacaagaagaaccucuacgaccacgcccugauguccaucaucagcaccuuccaccuguccauccccaacuucaaccaguacgaggccaugagcugcgacuucaacgggggcaagaucuccgugcaguacaaccucagccacaccuacgcgguggacgccgccaaccacugcgggaccaucgccaacggcguccugcagacguucaugcggauggcguggggcggguccuacaucgcccuggacagcggcaagggguccugggacugcaucaugaccagcuaccaguaccucaucauccagaacaccaccugggaggaccacugccaguucucccgccccagccccaucggcuaccuggggcugcucagccagcggacgcgcgacaucuacaucucccggcgccugcugggcaccuucaccuggacccucagcgacuccgagagcaacgagacgccgggcggguacugccugacccgguggaugcugaucgaggccgagcucaagugcuucggcaacaccgccguggccaagugcaacgagaagcacgacgaggaguucugcgacaugcugcgccuguucgacuucugcaagcaggcgauccggcgccucaaggcccccgcccagauguccauccagcugaucaacaaggccgugaacgcccugaucaacgaccagcucaucaugaagaaccaccuccgggacaucauggggauccccuacugcaacuacagcaaguacugcuaccugaaccacaccgucacgggccgcaccucccugccccggugcugccuggugagcaacggguccuaccugaacgagacccacuucagcgacgacaucgagcagcaggcggacaacaugaucaccgagcuccugcagaaggaguacauggaccgccagggcaagacgccccugggccucguggaccuguucgucuucuccaccagcuucuaccugaucuccaucuuccugcaccucgugaagaucccgacccaccggcacgugaucgggaagcccugccccaagccccaccgccugaaccacaugggcaucugcagcugcgggcuguacaagcacccgggcguccccgugaaguggaagcggugaggacuaguaauaaggaaacuguaugaaugucugugggcaggaagugaagagauccuucuguaaagguuuuuggaauuaugucugcugaauaauaaacuuuuuugaaauaauaaaucugguagaaaaaugagaucuaaaaaaaaaaaaaaaaaaaaaaaaaaaaaaaaaaaaaaaaaaaaaaaaaaaaaaaaaaaaaaaaaaaaaaaaaaaaaaaaaaaaaaaaaaaaaaaaaaaa

SEQ ID NO: 34324 - RNA, 1785 nt, Artificial Sequence
  mRNA product Design b-4 (A100) comprising derived and/or modified sequence from LASV(LASV035-NIG-2009;Clade II)__AIT17588__GPCmut8 (opt1)
aggagagucccgcagucggcguccagcggcucugcuuguucgugugugugucguugcaggccuuauucaagcuuaccaugggccagaucaucaccuucuuccaggaggugccccacgucaucgaggaggugaugaacaucgugcugaucgcccucagccugcuggccauccucaaggggaucuacaacgucgcgaccugcggccuguucgggcugguguccuuccuccugcugugcggccgcagcugcuccacgaccuacaaggggguguacgagcuccagacccuggagcuggacauggccagccucaacaugugcaugccgcuguccugcacgaagaacaacagccaccacuacaucauggucggcaacgagaccggccuggagcucacccugaccaacacguccaucaucaaccacaaguucugcaaccugagcgacgcccacaagaagaaccucuacgaccacgcccugauguccaucaucagcaccuuccaccuguccauccccaacuucaaccaguacgaggccaugagcugcgacuucaacgggggcaagaucuccgugcaguacaaccucagccacgcguacgccguggacgccgccaaccacugcgggaccaucgcgaacggcguccugcagaccuucaugcggauggccuggggcggguccuacaucgcccuggacagcggcaagggguccugggacugcaucaugacgagcuaccaguaccucaucauccagaacaccaccugggaggaccacugccaguucucccgccccagccccaucggcuaccuggggcugcucagccagcggacccgcgacaucuacaucucccggcgccugcugggcacguucaccuggacccucagcgacuccgagggcaacgagacccccgggggcuacugccugacgcgguggaugcugaucgaggccgagcucaagugcuucgggaacaccgccguggcgaagugcaacgagaagcacgacgaggaguucugcgacaugcugcgccuguucgacuucugcaagcaggccauccggcgccucaaggcccccgcccagaugagcauccagcugaucaacaaggccgugaacgcgcugaucaacgaccagcucaucaugaagaaccaccuccgggacaucaugggcauccccuacugcaacuacuccaaguacugcuaccugaaccacaccgucaccgggaagacgagccugccccgcugcugccugguguccaacggcagcuaccugaacgagacccacuucuccgacgacaucgagcagcaggccgacaacaugaucaccgagcuccugcagaaggaguacaucgaccggcagggcaagaccccgcuggggcucguggaccuguucgucuucagcacguccuucuaccugaucagcaucuuccugcaccucgugaagaucccgacccaccgccacgugaucggcaagcccugccccaagccccaccggcugaaccacauggggaucugcuccugcggccuguacaagcacccggggguccccgugaaguggaagcgcugaggacuaguaauaaggaaacuguaugaaugucugugggcaggaagugaagagauccuucuguaaagguuuuuggaauuaugucugcugaauaauaaacuuuuuugaaauaauaaaucugguagaaaaaugagaucuaaaaaaaaaaaaaaaaaaaaaaaaaaaaaaaaaaaaaaaaaaaaaaaaaaaaaaaaaaaaaaaaaaaaaaaaaaaaaaaaaaaaaaaaaaaaaaaaaaaa

SEQ ID NO: 34325 - RNA, 1785 nt, Artificial Sequence
  mRNA product Design b-4 (A100) comprising derived and/or modified sequence from LASV(LASV1000-NIG-2009;Clade II)__AIT17782__GPCmut8 (opt1)
aggagagucccgcagucggcguccagcggcucugcuuguucgugugugugucguugcaggccuuauucaagcuuaccaugggccagaucaucaccuucuuccaggaggugccccacgucaucgaggaggugaugaacaucgugcugaucgcccucagccugcuggccauccucaaggggaucuacaacgucgcgaccugcggccuguucgggcugguguccuuccuccugcugugcggccgcagcugcuccacgaccuacaaggggguguacgagcuccagacccuggagcuggacauggccagccucaacaugugcaugccgcuguccugcacgaagaacaacagccaccacuacaucauggucggcaacgagaccggccuggagcucacccugaccaacacguccaucaucaaccacaaguucugcaaccugagcgacgcccacaagaagaaccucuacgaccacgcccugauguccaucaucagcaccuuccaccuguccauccccaacuucaaccaguacgaggccaugagcugcgacuucaacgggggcaagaucuccgugcaguacaaccucagccacaccuacgcgguggacgccgccaaccacugcgggaccaucgccaacggcguccugcagacguucaugcggauggcguggggcggguccuacaucgcccuggacagcggcaagggguccugggacugcaucaugaccagcuaccaguaccucaucauccagaacaccaccugggaggaccacugccaguucucccgccccagccccaucggcuaccuggggcugcucagccagcggacgcgcgacaucuacaucucccggcgccugcugggcaccuucaccuggacccucagcgacuccgagggcaacgagacgcccgggggcuacugccugacccgguggaugcugaucgaggccgagcucaagugcuucgggaacaccgccguggccaagugcaacgagaagcacgacgaggaguucugcgacaugcugcgccuguucgacuucugcaagcaggcgaucaagcggcucaagacccccgcccagaugagcauccagcugaucaacaaggccgugaacgcccugaucaacgaccagcucaucaugaagaaccaccuccgcgacaucaugggcauccccuacugcaacuacuccaaguacugcuaccugaaccacacggucaccgggaagaccagccugccccggugcugccugguguccaacggcagcuaccugaacgagacccacuucuccgacgacaucgagcagcaggccgacaacaugaucacggagcuccugcagaaggaguacaucgaccgccagggcaagaccccgcuggggcucguggaccuguucgucuucagcaccuccuucuaccugaucagcaucuuccugcaccucgugaagaucccgacccaccggcacguggucggcaagcccugccccaagccccaccgccugaaccacauggggaucugcuccugcggccuguacaagcacccgggggugcccgugaaguggaagcggugaggacuaguaauaaggaaacuguaugaaugucugugggcaggaagugaagagauccuucuguaaagguuuuuggaauuaugucugcugaauaauaaacuuuuuugaaauaauaaaucugguagaaaaaugagaucuaaaaaaaaaaaaaaaaaaaaaaaaaaaaaaaaaaaaaaaaaaaaaaaaaaaaaaaaaaaaaaaaaaaaaaaaaaaaaaaaaaaaaaaaaaaaaaaaaaaa

SEQ ID NO: 34326 - RNA, 1785 nt, Artificial Sequence
  mRNA product Design b-4 (A100) comprising derived and/or modified sequence from LASV(LASV221-NIG-2010;Clade II)__AIT17624__GPCmut8 (opt1)
aggagagucccgcagucggcguccagcggcucugcuuguucgugugugugucguugcaggccuuauucaagcuuaccaugggccagaucaucaccuucuuccaggaggugccccacgucaucgaggaggugaugaacaucgugcugaucgcccucagccugcuggccauccucaaggggaucuacaacgucgcgaccugcggccuguucgggcugguguccuuccuccugcugugcggccgcagcugcuccacgaccuacaaggggguguacgagcuccagacccuggagcuggacauggccagccucaacaugugcaugccgcuguccugcacgaagaacaacagccaccacuacaucauggucggcaacgagaccggccuggagcucacccugaccaacacguccaucaucaaccacaaguucugcaaccugagcgacgcccacaagaagaaccucuacgaccacgcccugauguccaucaucagcaccuuccaccuguccauccccaacuucaaccaguacgaggccaugagcugcgacuucaacgggggcaagaucuccgugcaguacaaccucagccacaccuacgcgaucgacgccgccaaccacugcgggaccaucgccaacggcgugcugcagacguucaugcggauggcguggggcggguccuacaucgcccuggacagcggcaagggguccugggacugcaucaugaccagcuaccaguaccucaucauccagaacaccaccugggaggaccacugccaguucucccgccccagccccaucggcuaccuggggcugcucagccagcggacgcgcgacaucuacaucucccggcgccugcugggcaccuucaccuggacccucagcgacuccgagggcaacgagacgcccgggggcuacugccugacccgguggaugcugaucgaggccgagcucaagugcuucgggaacaccgccgucgccaagugcaacgagaagcacgacgaggaguucugcgacaugcugcgccuguucgacuucugcaagcaggcgauccggcgccucaagacccccgcccagaugagcauccagcugaucaacaaggccgugaacgcccugaucaacgaccagcucaucaugaagaaccaccuccgggacaucaugggcauccccuacugcaacuacuccaaguacugcuaccugaaccacacggugaccgggaagaccagccugccccgcugcugccuggucuccaacggcagcuaccugaacgagacccacuucuccgacgacaucgagcagcaggccgacaacaugaucacggagaugcuccagaaggaguacauggaccggcagggcaagaccccgcuggggcugguggaccucuucguguucagcaccuccuucuaccugaucagcaucuuccugcaccuggucaagaucccgacccaccgccacgugaucggcaagcccugccccaagccccaccggcucaaccacauggggaucugcuccugcggccuguacaagcacccgggggugcccgucaaguggaagcgcugaggacuaguaauaaggaaacuguaugaaugucugugggcaggaagugaagagauccuucuguaaagguuuuuggaauuaugucugcugaauaauaaacuuuuuugaaauaauaaaucugguagaaaaaugagaucuaaaaaaaaaaaaaaaaaaaaaaaaaaaaaaaaaaaaaaaaaaaaaaaaaaaaaaaaaaaaaaaaaaaaaaaaaaaaaaaaaaaaaaaaaaaaaaaaaaaa

SEQ ID NO: 34327 - RNA, 1785 nt, Artificial Sequence
  mRNA product Design b-4 (A100) comprising derived and/or modified sequence from LASV(LASV237-NIG-2010;Clade II)__AIT17638__GPCmut8 (opt1)
aggagagucccgcagucggcguccagcggcucugcuuguucgugugugugucguugcaggccuuauucaagcuuaccaugggccagaucaucaccuucuuccaggaggugccccacgucaucgaggaggugaugaacaucgugcugaucgcccucagccugcuggccauccucaaggggaucuacaacgucgcgaccugcggccuguucgggcugguguccuuccuccugcugugcggccgcagcugcuccacgaccuacaaggggguguacgagcuccagacccuggagcuggacauggccagccucaacaugugcaugccgcuguccugcacgaagaacaacagccaccacuacaucauggucggcaacgagaccggccuggagcucacccugaccaacacguccaucaucaaccacaaguucugcaaccugagcgacgcccacaagaaggaccucuacgaccacgcccugauguccaucaucagcaccuuccaccuguccauccccaacuucaaccaguacgaggccaugagcugcgacuucaacgggggcaagaucuccgugcaguacaaccucagccacaccuacgcgguggacgccgccaaccacugcgggaccaucgccaacggcguccugcagacguucaugcggauggcguggggcggguccuacaucgcccuggacagcggcaagggguccugggacugcaucaugaccagcuaccaguaccucaucauccagaacaccaccugggaggaccacugccaguucucccgccccagccccaucggcuaccuggggcugcucagccagcggacgcgcgacaucuacaucucccggcgccugcugggcaccuucaccuggacccucagcgacuccgagggcaacgagacgcccgggggcuacugccugacccgguggaugcugaucgaggccgagcucaagugcuucgggaacaccgccguggccaagugcaacgagaagcacgacgaggaguucugcgacaugcugcgccuguucgacuucugcaagcaggcgauccggcgccucaagacccccgcccagaugagcauccagcugaucaacaaggccgugaacgcccugaucaacgaccagcucaucaugaagaaccaccuccgggacaucaugggcauccccuacugcaacuacuccaaguacugcuaccugaaccacacggucaccgggaagaccagccugccccgcugcugccugguguccaacggcagcuaccugaacgagacccacuucuccgacgacaucgagcagcaggccgacaacaugaucacggagcuccugcagaaggaguacauggaccggcagggcaagaccccgcuggggcucguggaccuguucgucuucagcaccuccuucuaccugaucagcaucuuccugcaccucaucaagaucccgacccaccgccacaucacgggcaagcccugccccaagccccaccggcugaaccacauggggaucugcuccugcggccuguacaagcacccgggggugcccgugaaguggaagcgcugaggacuaguaauaaggaaacuguaugaaugucugugggcaggaagugaagagauccuucuguaaagguuuuuggaauuaugucugcugaauaauaaacuuuuuugaaauaauaaaucugguagaaaaaugagaucuaaaaaaaaaaaaaaaaaaaaaaaaaaaaaaaaaaaaaaaaaaaaaaaaaaaaaaaaaaaaaaaaaaaaaaaaaaaaaaaaaaaaaaaaaaaaaaaaaaaa

SEQ ID NO: 34328 - RNA, 1785 nt, Artificial Sequence
  mRNA product Design b-4 (A100) comprising derived and/or modified sequence from LASV(LASV253-NIG-2011;Clade II)__AIT17670__GPCmut8 (opt1)
aggagagucccgcagucggcguccagcggcucugcuuguucgugugugugucguugcaggccuuauucaagcuuaccaugggccagaucaucaccuucuuccaggaggugccccacgucaucgaggaggugaugaacaucgugcugaucgcccucagccugcuggccauccucaaggggaucuacaacgucgcgaccugcggccuguucgggcugguguccuuccuccugcugugcggccgcagcugcuccacgaccuacaaggggguguacgagcuccagacccuggagcuggacauggccagccucaacaugugcaugccgcuguccugcacgaagaacaacagccaccacuacaucauggucggcaacgagaccggccuggagcucacccugaccaacacguccaucaucaaccacaaguucugcaaccugagcgacgcccacaagaagaaccucuacgaccacgcccugauguccaucaucagcaccuuccaccuguccauccccaacuucaaccaguacgaggccaugagcugcgacuucaacgggggcaagaucuccgugcaguacaaccucagccacaccuacgcgguggacgccgccaaccacugcgggaccaucgccaacggcguccugcagacguucaugcggauggcguggggcggguccuacaucgcccuggacagcggcaagggguccugggacugcaucaugaccagcuaccaguaccucaucauccagaacaccaccugggaggaccacugccaguucucccgccccagccccaucggcuaccuggggcugcucagccagcggacgcgcgacaucuacaucucccggcgccugcugggcaccuucaccuggacccucagcgacuccgagggcaacgagacgcccgggggcuacugccugacccgguggaugcugaucgaggccgagcucaagugcuucgggaacaccgccguggccaagugcaacgagaagcacgacgaggaguucugcgacaugcugcgccuguucgacuucugcaagcaggcgauccggcgccucaaggcccccgcccagaugagcauccagcugaucaacaaggccgugaacgcccugaucaacgaccagcucaucaugaagaaccaccuccgggacaucaugggcaucccguacugcaacuacuccaaguacugcuaccugaaccacaccgucacggggcgcaccagccugccccggugcugccugguguccaacggcagcuaccugaacgagacccacuucuccgacgacaucgagcagcaggcggacaacaugaucaccgagcuccugcagaaggaguacaucgaccgccagggcaagacgccccuggggcucguggaccuguucgucuucagcaccuccuucuaccugaucagcaucuuccugcaccucgugaagaucccgacccaccggcacaucaucggcaagcccugccccaagccccaccgccugaaccacauggggaucugcuccugcggccuguacaagcacccgggggugcccgucaaguggaagcggugaggacuaguaauaaggaaacuguaugaaugucugugggcaggaagugaagagauccuucuguaaagguuuuuggaauuaugucugcugaauaauaaacuuuuuugaaauaauaaaucugguagaaaaaugagaucuaaaaaaaaaaaaaaaaaaaaaaaaaaaaaaaaaaaaaaaaaaaaaaaaaaaaaaaaaaaaaaaaaaaaaaaaaaaaaaaaaaaaaaaaaaaaaaaaaaaa

SEQ ID NO: 34329 - RNA, 1785 nt, Artificial Sequence
  mRNA product Design b-4 (A100) comprising derived and/or modified sequence from LASV(LASV254-NIG-2011;Clade II)__AIT17674__GPCmut8 (opt1)
aggagagucccgcagucggcguccagcggcucugcuuguucgugugugugucguugcaggccuuauucaagcuuaccaugggccagaucaucaccuucuuccaggaggugccccacgucaucgaggaggugaugaacaucgugcugaucgcccucagccugcuggccauccucaaggggaucuacaacgucgcgaccugcggccuguucgggcugguguccuuccuccugcugugcggccgcagcugcuccacgaccuacaaggggguguacgagcuccagacccuggagcuggacaugaccaaccucaacaugugcaugccgcugagcugcaccaagaacaacucccaccacuacaucauggucggcaacgagaccggccuggagcucacccugacgaacaccagcaucaucaaccacaaguucugcaaccuguccgacgcccacaagaagaaccucuacaaccacgcccugaugagcaucaucuccaccuuccaccugagcauccccaacuucaaccaguacgaggccauguccugcgacuucaacgggggcaagaucagcgugcaguacaaccucucccacagcuacgccguggacgcggccaaccacugcgggaccaucgccaacggcguccugcagacguucaugcggauggccuggggcggguccuacaucgcgcuggacagcggcaaggggaacugggacugcaucaugaccuccuaccaguaccucaucauccagaacaccaccugggaggaccacugccaguucagccgccccucccccaucggcuaccuggggcugcucagccagcggacgcgcgacaucuacaucagccggcgccugcugggcaccuucaccuggacccucuccgacagcgagggcaacgagacgcccgggggcuacugccugacccgguggaugcugaucgaggccgagcucaagugcuucgggaacaccgccguggccaagugcaacgagaagcacgacgaggaguucugcgacaugcugcgccuguucgacuucugcaagcaggccauccggcgccucaagacccccgcgcaggccaacauccagcugaucaacaaggccgugaacgcccugaucaacgaccagcucaucaugaagaaccaccuccgggacaucaugggcauccccuacugcaacuacuccaaguacugcuaccugaaccacacggucaccgggaagaccagccugccccgcugcugccugguguccaacggcagcuaccugaacgagacccacuucuccgacgacaucgagcagcaggccgacaacaugaucacggagcuccugcagaaggaguacauggaccggcagggcaagaccccgcuggggcucguggaccuguucgucuucagcaccuccuucuaccugaucagcaucuuccugcaccucgugaagaucccgacccaccgccacgugaucggcaagcccugccccaagccccaccggcugaaccacauggggaucugcuccugcggccuguacaagcacccggggguccccgugaaguggaagcgcugaggacuaguaauaaggaaacuguaugaaugucugugggcaggaagugaagagauccuucuguaaagguuuuuggaauuaugucugcugaauaauaaacuuuuuugaaauaauaaaucugguagaaaaaugagaucuaaaaaaaaaaaaaaaaaaaaaaaaaaaaaaaaaaaaaaaaaaaaaaaaaaaaaaaaaaaaaaaaaaaaaaaaaaaaaaaaaaaaaaaaaaaaaaaaaaaa

SEQ ID NO: 34330 - RNA, 1785 nt, Artificial Sequence
  mRNA product Design b-4 (A100) comprising derived and/or modified sequence from LASV(Nig08-A19;Clade III)__ADU56618__GPCmut8 (opt1)
aggagagucccgcagucggcguccagcggcucugcuuguucgugugugugucguugcaggccuuauucaagcuuaccaugggccagaucgugaccuucuuccaggaggucccccacgugaucgaggaggugaugaacaucguccugaucgcccucagcauccuggccauccugaaggggcucuacaacaucgcgaccugcggccugaucgggcuggugacguuccuccugcuguccggccgcagcugcuccaugaccuacaaggggguguacgagcuccagacccuggagcugaacaugaacacccucaacaugugcaugccgcugagcugcaccaagaacaacucccaccacuacaucauggucggcaacgagaccggccuggagcucacccugacgaacaccagccugcuccaccacaaguucugcaaccuguccgacgcccacaagaagaaccuguacgaccacacccucaugagcaucaucuccaccuuccaccugagcauccccaacuucaaccaguacgaggccauguccugcgacuucaacgggggcaagaucacggugcaguacaaccugagccacuccuacgccaucgacgccgcgaaccacugcgggaccguggccaacggcguccuccagaccuucaugcggauggccuggggcgggagcuacaucgcccuggacuccggccgcgggaagugggacugcaucaugaccagcuaccaguaccugaucauccagaacacgaccugggaggaccacugccaguucucccggcccagccccaucggcuaccucgggcugcugucccagcgcacccgggacaucuacaucagccgccggcuccugggcaccuucacguggacccugagcgacuccgagggcaacgagacccccgggggcuacugccucacccgcuggaugcugaucgaggcggagcugaagugcuucgggaacacggccguggccaagugcaacgagaagcacgacgaggaguucugcgacaugcuccggcuguucgacuucugcaagcaggccauccgccggcugaaggcccccgcgcagaugagcauccagcucaucaacaaggccgugaacgcccugaucaacgaccagcugaucaugaagaaccaccuccgcgacaucaugggcauccccuacugcaacuacuccaaguacugcuaccugaaccacaccagcaccgggcggaccucccugccccgcugcugccucgucagcaacggcuccuaccugaacgagacgcacuucagcgacgacaucgagcagcaggccgacaacaugaucaccgagaugcugcagaaggaguaccucgaccggcagggcaagaccccgcuggggcugguggaccuguucguguucuccaccagcuucuaccucaucuccaucuuccugcaccuggucaagaucccgacgcaccgccacaucgugggcaagcccugccccaagccccaccggcucaaccacauggggaucugcagcugcggccuguacaagcagccgggggugcccguccgcuggaagcggugaggacuaguaauaaggaaacuguaugaaugucugugggcaggaagugaagagauccuucuguaaagguuuuuggaauuaugucugcugaauaauaaacuuuuuugaaauaauaaaucugguagaaaaaugagaucuaaaaaaaaaaaaaaaaaaaaaaaaaaaaaaaaaaaaaaaaaaaaaaaaaaaaaaaaaaaaaaaaaaaaaaaaaaaaaaaaaaaaaaaaaaaaaaaaaaaa

SEQ ID NO: 34331 - RNA, 1788 nt, Artificial Sequence
  mRNA product Design b-4 (A100) comprising derived and/or modified sequence from LASV(G1180-SLE-2010;Clade IV)__AIT17168__GPCmut8 (opt1)
aggagagucccgcagucggcguccagcggcucugcuuguucgugugugugucguugcaggccuuauucaagcuuaccaugggccagaucgugaccuucuuccaggaggucccccacgugaucgaggaggugaugaacaucguccugaucgcccucagcauccuggccgugcugaaggggcucuacaacuucgcgaccugcggccugguggggcugcucaccuuccugcugcucugcggccgcuccugcaccgccagccgguacaagggggucuacgagcugcagacccuggagcucaacauggagacccugaacaugugcaugccgcuguccugcaccaagaacaacagccaccacuacaucauggugggcaacgagaccggccucgagcugacccugacgaacaccuccaucaucaaccacaaguucugcaaccucagcgacgcccacaagaagaaccuguacgaccacgcccugauguccaucaucagcaccuuccaccucuccauccccaacuucaaccaguacgaggccaugagcugcgacuucaacgggggcaagaucuccgugcaguacaaccugagccacuccuacgcgggggacgccgccaaccacugcggcaccgucgccaacggggugcugcagacguucaugcgcauggcguggggcggcagcuacaucgcccucgacuccgggcacggcagcugggacugcaucaugaccuccuaccaguaccugaucauccagaacaccaccugggaggaccacugccaguucagccggcccucccccaucggguaccugggccuccugagccagcgcacgcgggacaucuacaucagccgccggcugcucggcaccuucaccuggacccuguccgacagcgaggggaaggacacgccgggcggguacugccugacccgcuggaugcucaucgaggccgagcugaagugcuucggcaacaccgccguggccaagugcaacgagaagcacgacgaggaguucugcgacaugcugcggcuguucgacuucugcaagcaggcgauccagcgccugaaggcccccgcccagauguccauccagcugaucaacaaggccgucaacgcccucaucaacgaccagcugaucaugaagaaccaccuccgggacaucauggggauccccuacugcaacuacagcaaguacugcuaccucaaccacaccacgaccggcaagaccucccugcccaagugcugccuggugagcaacggcuccuaccucaacgagacccacuucagcgacgacaucgagcagcaggcggacaacaugaucacggagaugcugcagaaggaguacauggagcgccaggggaagacgccccugggccucguggaccuguucgucuucuccaccagcuucuaccugaucuccaucuuccugcaccucgugaagaucccgacccaccggcacaucgugggcaagagcugccccaagccccaccgccugaaccacauggggaucugcuccugcgggcuguacaagcagcccggcgucccggugaaguggaagcggugaggacuaguaauaaggaaacuguaugaaugucugugggcaggaagugaagagauccuucuguaaagguuuuuggaauuaugucugcugaauaauaaacuuuuuugaaauaauaaaucugguagaaaaaugagaucuaaaaaaaaaaaaaaaaaaaaaaaaaaaaaaaaaaaaaaaaaaaaaaaaaaaaaaaaaaaaaaaaaaaaaaaaaaaaaaaaaaaaaaaaaaaaaaaaaaaa

SEQ ID NO: 34332 - RNA, 1788 nt, Artificial Sequence
  mRNA product Design b-4 (A100) comprising derived and/or modified sequence from LASV(G1442-SLE-2011;Clade IV)__AIT17180__GPCmut8 (opt1)
aggagagucccgcagucggcguccagcggcucugcuuguucgugugugugucguugcaggccuuauucaagcuuaccaugggccagaucgugaccuucuuccaggaggucccccacgugaucgaggaggugaugaacaucguccugaucgcccucagcauccuggccgugcugaaggggcucuacaacguggcgaccugcggccugaucgggcuggucacguuccuccugcugugcggccgcuccugcaccaccacccucuacaaggggguguacgagcugcagacgcuggagcucaacauggagacccugaacaugugcaugccgcugagcugcaccaagaacaacucccaccacuacauccgggugggcaacgagacgggccucgagcugacccugaccaacaccagcaucaucaaccacaaguucugcaaccucuccgacgcccacaagaagaaccuguacgaccacgcccugaugagcaucaucuccacguuccaccucagcauccccaacuucaaccaguacgaggccauguccugcgacuucaacgggggcaagaucagcguccaguacaaccugucccacagcuacgccggggacgcggccaaccacugcggcaccguggccaacggggugcugcagaccuucaugcgcauggccuggggcggcuccuacaucgcgcucgacagcgggcggggcaacugggacugcaucaugaccuccuaccaguaccugaucauccagaacacgaccugggacgaccacugccaguucagccgccccucccccaucggguaccugggccuccugagccagcggacccgcgacgucuacaucucccggcgccugcucggcaccuucacguggacccugagcgacagcgaggggaaggacaccccgggcggguacugccugacccgguggaugcucaucgaggccgagcugaagugcuucggcaacacggccguggccaagugcaacgagaagcacgacgaggaguucugcgacaugcugcgccucuucgacuucugcaagcaggccauccagcggcugaaggcgcccgcccagauguccauccagcugaucaacaaggccgugaacgcccucaucaacgaccagcugaucaugaagaaccaccuccgcgacaucauggggauccccuacugcaacuacagcaaguacugcuaccugaacaacaccgccaccggcaagaccucccugcccaagugcugccugaucagcaacggcuccuaccucaacgagacgcacuucagcgacgacaucgagcaggaggcggacaacaugaucaccgagaugcugcagaaggaguacauggagcggcaggggaagacgccccugggccucgucgaccuguucguguucuccaccagcuucuaccugaucuccaucuuccugcaccucgugaagaucccgacccaccgccacaucgucggcaagagcugccccaagccccaccggcugaaccacauggggaucugcuccugcgggcuguacaagcagcccggcgugccggugcgcuggaagcggugaggacuaguaauaaggaaacuguaugaaugucugugggcaggaagugaagagauccuucuguaaagguuuuuggaauuaugucugcugaauaauaaacuuuuuugaaauaauaaaucugguagaaaaaugagaucuaaaaaaaaaaaaaaaaaaaaaaaaaaaaaaaaaaaaaaaaaaaaaaaaaaaaaaaaaaaaaaaaaaaaaaaaaaaaaaaaaaaaaaaaaaaaaaaaaaaa

SEQ ID NO: 34333 - RNA, 1788 nt, Artificial Sequence
  mRNA product Design b-4 (A100) comprising derived and/or modified sequence from LASV(G3010-SLE-2013;Clade IV)__AIT17344__GPCmut8 (opt1)
aggagagucccgcagucggcguccagcggcucugcuuguucgugugugugucguugcaggccuuauucaagcuuaccaugggccagaucgugaccuucuuccaggaggucccccacgugaucgaggaggugaugaacaucguccugaucgcccucagcauccuggccgugcugaaggggcucuacaacuucgcgaccugcggccugguggggcuggucacguuccuccugcugugcggccgcuccugcaccaccagccucuacaaggggguguacgagcugcagacccuggagcucaacauggagacgcugaacaugugcaugccgcuguccugcaccaagaacaacagccaccacuacaucauggugggcaacgagaccggccucgagcugacgcugaccaacaccuccaucaucaaccacaaguucugcaaccucagcgacgcccacaagaagaaccuguacaaccacgcccugauguccaucaucagcaccuuccaccucuccauccccaacuucaaccaguacgaggccaugagcugcgacuucaacgggggcaagaucuccguccaguacaaccugagccacuccuacgccggggacgcggccagccacugcggcacgguggccaacggggugcugcagaccuucaugcggauggccuggggcggcuccuacaucgcgcucgacagcggguacggcaagugggacugcaucaugaccuccuaccaguaccugaucauccagaacaccacgugggaggaccacugccaguucagccgccccucccccaucggguaccugggccuccugagccagcggacccgcgacaucuacaucagccggcgccugcucggcaccuucaccuggacgcuguccgacagcgaggggaaggacaccccgggcggguacugccugacccgguggaugcucaucgaggccgagcugaagugcuucggcaacaccgccgucgccaagugcaacgagaagcacgacgaggaguucugcgacaugcugcgccucuucgacuucugcaagcaggccauccagcggcugaagacgcccgcgcagauguccauccagcugaucaacaaggccgugaacgcccucaucaacgaccagcugaucaugaagaaccaccuccgcgacaucauggggauccccuacugcaacuacagcaaguacugcuaccugaaccacaccaccaccggcaagacgucccugcccaagugcugccuggugagcaacggcuccuaccucaacgagacccacuucagcgacgacaucgagcagcaggccgacaacaugaucaccgagaugcugcagaaggaguacauggagcggcaggggaagacgccccugggccucgucgaccuguucguguucuccaccagcuucuaccugaucuccaucuuccugcaccucgugaagaucccgacccaccgccacaucgucggcaagagcugccccaagccccaccggcugaaccacauggggaucugcuccugcgggcuguacaagcagcccggcgugccggugcgcuggaagcggugaggacuaguaauaaggaaacuguaugaaugucugugggcaggaagugaagagauccuucuguaaagguuuuuggaauuaugucugcugaauaauaaacuuuuuugaaauaauaaaucugguagaaaaaugagaucuaaaaaaaaaaaaaaaaaaaaaaaaaaaaaaaaaaaaaaaaaaaaaaaaaaaaaaaaaaaaaaaaaaaaaaaaaaaaaaaaaaaaaaaaaaaaaaaaaaaa

SEQ ID NO: 34334 - RNA, 1788 nt, Artificial Sequence
  mRNA product Design b-4 (A100) comprising derived and/or modified sequence from LASV(G502-SLE-2009;Clade IV)__AIT17126__GPCmut8 (opt1)
aggagagucccgcagucggcguccagcggcucugcuuguucgugugugugucguugcaggccuuauucaagcuuaccaugggccagaucgugaccuucuuccaggaggucccccacgugaucgaggaggugaugaacaucguccugaucgcccucagcauccuggccgugcugaaggggcucuacaacuucgcgaccugcggccugguggggcugcucacguuccugcugcucugcggccgcuccugcaccaccgggcuguacaagggcgucuacgagcugcagacccucgagcugaacauggagacgcugaacaugugcaugccgcucagcugcaccaagaacaacucccaccacuacaucauggugggcaacgagaccgggcuggagcugacgcucaccaacaccagcaucaucaaccacaaguucugcaaccuguccgacgcccacaagaagaaccuguacgaccacgcccucaugagcaucaucuccaccuuccaccugagcauccccaacuucaaccaguacgaggccauguccugcgacuucaacggcgggaagaucagcgugcaguacaaccugucccacagcuacgccggcgacgcggccgaccacugcgggacggucgccaacggcgugcuccagaccuucaugcggauggccuggggcggguccuacaucgcgcuggacagcggccgcgggcggugggacugcaucaugaccuccuaccaguaccugaucauccagaacaccacgugggaggaccacugccaguucagccgccccucccccaucggcuaccucggccugcugagccagcggacccgcgacaucuacaucucccggcgccuccuggggaccuucaccuggacgcugagcgacagcgagggcaaggacacccccgggggcuacugccucacccgguggaugcugaucgaggccgagcugaagugcuucgggaacaccgccguggccaagugcaacgagaagcacgacgaggaguucugcgacaugcuccgccuguucgacuucugcaagcaggccauccagcggcugaaggcgcccgcccagauguccauccagcucaucaacaaggccgucaacgcccugaucaacgaccagcuggugaugaagaaccaccuccgcgacaucaugggcauccccuacugcaacuacagccgguacugcuaccugaaccacacgaccaccggccgcaccucccugcccaagugcugccucgugagcaacggguccuaccugaacgagacgcacuucagcgacgacaucgagcagcaggccgacaacaugaucaccgagaugcugcagaaggaguacauggagcggcagggcaagaccccgcucgggcuggucgaccuguucguguucuccaccagcuucuaccugaucuccaucuuccuccaccuggugaagaucccgacgcaccgccacaucgucggcaagagcugccccaagccccaccggcugaaccacauggggaucugcuccugcggccucuacaagcagcccggcgugccggugaaguggaagcgcugaggacuaguaauaaggaaacuguaugaaugucugugggcaggaagugaagagauccuucuguaaagguuuuuggaauuaugucugcugaauaauaaacuuuuuugaaauaauaaaucugguagaaaaaugagaucuaaaaaaaaaaaaaaaaaaaaaaaaaaaaaaaaaaaaaaaaaaaaaaaaaaaaaaaaaaaaaaaaaaaaaaaaaaaaaaaaaaaaaaaaaaaaaaaaaaaa

SEQ ID NO: 34335 - RNA, 1788 nt, Artificial Sequence
  mRNA product Design b-4 (A100) comprising derived and/or modified sequence from LASV(G733-SLE-2010;Clade IV)__AIT17154__GPCmut8 (opt1)
aggagagucccgcagucggcguccagcggcucugcuuguucgugugugugucguugcaggccuuauucaagcuuaccaugggccagaucgugaccuucuuccaggaggucccccacgugaucgaggaggugaugaacaucguccugaucgcccucagcauccuggccgugcugaaggggcucuacaacuucgcgaccugcggcaucguggggcuggucuccuuccugcuccugugcggccgcagcugcacgaccucccuguacaaggggguguacgagcuccagacccuggagcugaacauggagacccucaacaugugcaugccgcugagcugcaccaagaacaacucccaccacuacaucauggugggcaacgagaccggccuggagcucacccugacgaacaccagcaucaucaaccacaaguucugcaaccuguccgacgcccacaagaagaaccucuacgaccacgcccugaugagcaucaucuccaccuuccaccugagcauccccaacuucaaccaguacgaggccauguccugcgacuucaacgggggcaagaucagcguccaguacaaccucucccacagcuacgccggggacgcggccaaccacugcggcaccaucgccaacggggugcugcagacguucaugcggauggccuggggcggcuccuacaucgcgcuggacagcgggcgcgaccggugggacugcaucaugaccuccuaccaguaccucaucauccagaacaccaccugggaggaccacugccaguucagccgccccucccccaucggcuaccuggggcugcucagccagcggacgcgcgacaucuacaucagccggcgccugcugggcaccuucaccuggacccucuccgacagcgagggcaaggacacgcccgggggcuacugccugacccgguggaugcugaucgaggccgagcucaagugcuucgggaacaccgccguggccaagugcaacgagaagcacgacgaggaguucugcgacaugcugcgccuguucgacuucugcaagcaggccauccagcggcucaaggcgcccgcccagauguccauccagcugaucaacaaggccgucaacgcccugaucaacgaccagcucaucaugaagaaccaccuccgcgacaucaugggcauccccuacugcaacuacagcaaguacugcuaccugaaccacaccacgaccgggaagaccucccugcccaagugcugccuggugagcaacggcuccuaccugaacgagacccacuucagcgacgacaucgagcagcaggccgacaacaugaucacggagaugcuccagaaggaguacauggagcggcagggcaagaccccgcuggggcugguggaccucuucgucuucuccaccagcuucuaccugaucuccaucuuccugcaccuggugaagaucccgacccaccgccacguggucggcaagagcugccccaagccccaccggcucaaccacauggggaucugcuccugcggccuguacgggcagcccggcgugccggugaaguggaagcgcugaggacuaguaauaaggaaacuguaugaaugucugugggcaggaagugaagagauccuucuguaaagguuuuuggaauuaugucugcugaauaauaaacuuuuuugaaauaauaaaucugguagaaaaaugagaucuaaaaaaaaaaaaaaaaaaaaaaaaaaaaaaaaaaaaaaaaaaaaaaaaaaaaaaaaaaaaaaaaaaaaaaaaaaaaaaaaaaaaaaaaaaaaaaaaaaaa

SEQ ID NO: 34336 - RNA, 1788 nt, Artificial Sequence
  mRNA product Design b-4 (A100) comprising derived and/or modified sequence from MOPV/LASV reassortant(IGS-1;Clade IV)__AFY05576__GPCmut8 (opt1)
aggagagucccgcagucggcguccagcggcucugcuuguucgugugugugucguugcaggccuuauucaagcuuaccaugggccagaucgugaccuucuuccaggaggucccccacgugaucgaggaggugaugaacaucguccugaucgcccucagcgugcuggccgugcugaaggggcucuacaacuucgcgaccugcggccuggucgggcuggugacguuccuccugcugugcggccgcuccugcaccaccagccucuacaaggggguguacgagcugcagacccuggagcucaacauggagacgcugaacaugugcaugccgcuguccugcaccaagaacaacagccaccacuacaucauggucggcaacgagaccggccucgagcugacgcugaccaacaccuccaucaucaaccacaaguucugcaaccucagcgacgcccacaagaagaaccuguacgaccacgcccugauguccaucaucagcaccuuccaccucuccauccccaacuucaaccaguacgaggccaugagcugcgacuucaacgggggcaagaucuccgugcaguacaaccugagccacuccuacgccggggacgcggccaaccacugcggcacgguggccaacgggguccugcagaccuucaugcggauggccuggggcggcagcuacaucgcgcucgacuccgggcgcggcaacugggacugcaucaugaccagcuaccaguaccugaucauccagaacaccacgugggaggaccacugccaguucucccggcccagccccaucggguaccugggccuccugucccagcgcacccgggacaucuacaucagccgccggcugcucggcaccuucaccuggacgcugagcgacuccgagggggaggacaccccgggcggguacugccugacccgcuggaugcucaucgaggccgagcugaagugcuucggcaacaccgccguggccaagugcaacgagaagcacgacgaggaguucugcgacaugcugcggcuguucgacuucugcaagcaggccauccagcgccugaaggcgcccgcccagaugagcauccagcugaucaacaaggccgugaacgcccucaucaacgaccagcugaucaugaagaaccaccuccgggacaucauggggauccccuacugcaacuacuccaaguacugcuaccucaaccacacgaccaccggccgcaccagccugcccaagugcugccuggucuccaacggcagcuaccucaacgagacgcacuucuccgacgacaucgagcagcaggccgacaacaugaucaccgagaugcugcagaaggaguacauggagcggcaggggaagacgccccugggccucguggaccuguucguguucagcaccuccuucuaccugaucagcaucuuccugcaccucgucaagaucccgacccaccgccacaucguggggaaguccugccccaagccccaccggcugaaccacaugggcaucugcagcugcgggcuguacaagcagcccggcgugccggucaaguggaagcgcugaggacuaguaauaaggaaacuguaugaaugucugugggcaggaagugaagagauccuucuguaaagguuuuuggaauuaugucugcugaauaauaaacuuuuuugaaauaauaaaucugguagaaaaaugagaucuaaaaaaaaaaaaaaaaaaaaaaaaaaaaaaaaaaaaaaaaaaaaaaaaaaaaaaaaaaaaaaaaaaaaaaaaaaaaaaaaaaaaaaaaaaaaaaaaaaaa

SEQ ID NO: 34337 - RNA, 1788 nt, Artificial Sequence
  mRNA product Design b-4 (A100) comprising derived and/or modified sequence from LASV(LM765-SLE-2012;Clade IV)__AIT17814__GPCmut8 (opt1)
aggagagucccgcagucggcguccagcggcucugcuuguucgugugugugucguugcaggccuuauucaagcuuaccaugggccagaucgugaccuucuuccaggaggucccccacgugaucgaggaggugaugaacaucguccugaucgcccucagcauccuggccgugcugaaggggcucuacaacuucgcgaccugcggccugguggggcuggucacguuccuccugcugugcggccgcuccugcaccaccagccucuacaaggggguguacgagcugcagacccuggagcucaacauggagacgcugaacaugugcaugccgcuguccugcaccaagaacaacagccaccacuacaucauggugggcaacgagaccggccucgagcugacgcugaccaacaccuccaucaucgaccacaaguucugcaaccucagcgacgcccaccggaagaaccuguacgaccacgcccugauguccaucaucagcaccuuccaccucuccauccccaacuucaaccaguacgaggccaugagcugcgacuucaacgggggcaagaucuccguccaguacaaccugagccacuccuacgccaaggacgcggccgaccacugcgggacgguggccaacggcgugcugcagaccuucaugcgcauggccuggggcgggagcuacaucgcgcucgacuccggccgggggcgcugggacugcaucaugaccagcuaccaguaccugaucauccagaacaccacgugggaggaccacugccaguucucccggcccagccccaucggcuaccuggggcuccugucccagcgcacccgggacaucuacaucagccgccggcugcucggcaccuucaccuggacgcugagcgacuccgagggcaaggacacccccgggggcuacugccugacccgcuggaugcucaucgaggccgagcugaagugcuucgggaacaccgccgucgccaagugcaacgagaagcacgacgaggaguucugcgacaugcugcggcuguucgacuucugcaagcaggccauccagcgccugaaggcgcccgcccagaugagcauccagcugaucaacaaggccgugaacgcccucaucaacgaccagcugaucaugaagaaccaccuccgggacaucaugggcauccccuacugcaacuacuccaaguacugcuaccucaaccacacgaccaccgggaagaccagccugcccaagugcugccugguguccaacggcagcuaccucaacgagacgcacuucuccgacgacaucgagcagcaggccgacaacaugaucaccgagaugcugcagaaggaguacauggagcgccagggcaagaccccgcuggggcucgucgaccuguucguguucagcaccuccuucuaccugaucagcaucuuccugcaccucgugaagaucccgacgcaccggcacaucgucggcaagcccugccccaagccccaccgccugaaccacauggggaucugcuccugcggccuguacaagcagccgggggugcccgugaaguggaagcggugaggacuaguaauaaggaaacuguaugaaugucugugggcaggaagugaagagauccuucuguaaagguuuuuggaauuaugucugcugaauaauaaacuuuuuugaaauaauaaaucugguagaaaaaugagaucuaaaaaaaaaaaaaaaaaaaaaaaaaaaaaaaaaaaaaaaaaaaaaaaaaaaaaaaaaaaaaaaaaaaaaaaaaaaaaaaaaaaaaaaaaaaaaaaaaaaa

SEQ ID NO: 34338 - RNA, 1788 nt, Artificial Sequence
  mRNA product Design b-4 (A100) comprising derived and/or modified sequence from LASV(LM776-SLE-2012;Clade IV)__AIT17824__GPCmut8 (opt1)
aggagagucccgcagucggcguccagcggcucugcuuguucgugugugugucguugcaggccuuauucaagcuuaccaugggccagaucgugaccuucuuccaggaggucccccacgugaucgaggaggugaugaacaucguccugaucgcccucagcauccuggccgugcugaaggggcucuacaacuucgcgaccugcggccugguggggcuggucacguuccuccugcugugcggccgcuccugcaccaccagcguguacaaggggguguacgagcuccagacccuggagcugaacauggagacgcucaacaugugcaugccgcuguccugcaccaagaacaacagccaccacuacaucauggucggcaacgagaccggccuggagcucacgcugaccaacaccuccaucaucaaccacaaguucugcaaccugagcgacgcccacaagaagaaccucuacgaccacgcccugauguccaucaucagcaccuuccaccuguccauccccaacuucaaccaguacgaggccaugagcugcgacuucaacgggggcaagaucuccgugcaguacaaccucagccacuccuacgccggggacgcggccaaccacugcggcacgguggccaacgggguccugcagaccuucaugcggauggccuggggcggcagcuacaucgcgcuggacuccgggcacggcaagugggacugcaucaugaccagcuaccaguaccucaucauccagaacaccacgugggaggaccacugccaguucucccgccccagccccaucggguaccugggccugcucucccagcggacccgcgacaucuacaucagccggcgccugcugggcaccuucaccuggacgcucagcgacuccgaggggaaggacaccccgggcggguacugccugacccgguggaugcugaucgaggccgagcucaagugcuucggcaacaccgccguggccaagugcaacgagaagcacgacgaggaguucugcgacaugcugcgccuguucgacuucugcaagcaggccauccagcggcucaaggcgcccgcccagaugagcauccagcugaucaacaaggccgugaacgcccugaucaacgaccagcucaucaugaagaaccaccuccgcgacaucauggggauccccuacugcaacuacuccaaguacugcuaccugaaccacacgaccaccggcaagaccagccugcccaagugcugccuggucuccaacggcagcuaccugaacgagacgcacuucuccgacgacaucgagcagcaggccgacaacaugaucaccgagaugcuccagaaggaguacauggagcggcaggggaagacgccccugggccugguggaccucuucguguucagcaccuccuucuaccugaucagcaucuuccugcaccuggucaagaucccgacccaccgccacaucguggggaaguccugccccaagccccaccggcucaaccacaugggcaucugcagcugcgggcuguacaagcagcccggcgugccgguccgcuggaagcggugaggacuaguaauaaggaaacuguaugaaugucugugggcaggaagugaagagauccuucuguaaagguuuuuggaauuaugucugcugaauaauaaacuuuuuugaaauaauaaaucugguagaaaaaugagaucuaaaaaaaaaaaaaaaaaaaaaaaaaaaaaaaaaaaaaaaaaaaaaaaaaaaaaaaaaaaaaaaaaaaaaaaaaaaaaaaaaaaaaaaaaaaaaaaaaaaa

SEQ ID NO: 34339 - RNA, 1788 nt, Artificial Sequence
  mRNA product Design b-4 (A100) comprising derived and/or modified sequence from LASV(Mad39;Clade IV)__ANH09722__GPCmut8 (opt1)
aggagagucccgcagucggcguccagcggcucugcuuguucgugugugugucguugcaggccuuauucaagcuuaccaugggccagaucgugaccuucuuccaggaggucccccacgugaucgaggaggugaugaacaucguccugaucgcccucagcauccuggccgugcugaaggggcucuacaacguggcgaccugcggccugaucgggcuggucacguuccuccugcugugcggccgcuccugcaccaccacccucuacaaggggguguacgagcugcaggcccuggagcucaacauggagacgcugaacaugugcaugccgcugagcugcaccaagaacaacucccaccacuacauccgggugggcaacgagaccggccucgagcugacgcugaccaacaccagccucaucaaccacaaguucugcaaccuguccgacgcccacaagaagaaccuguacgaccacgcccucaugagcaucaucuccaccuuccaccugagcauccccaacuucaaccaguacgaggccauguccugcgacuucaacgacgggaagaucagcguccaguacaaccugucccacacguacgcgggcgacaccgccaaccacugcgggaccguggccaacggcgugcuccagaccuucaugcgcauggccuggggcgggagcuacaucgcgcuggacuccggccgcgggggcugggacugcaucaugacgagcuaccaguaccugaucauccagaacaccaccugggaggaccacugccaguucucccggcccagccccaucggguaccucggccugcugucccagcggacccgcgacaucuacaucagccggcgccuccugggcacguucaccuggacccuguccgacagcgaggggaaggacaccccgggcggguacugccucacgcgguggaugcugaucgaggccgagcugaagugcuucggcaacaccgccgucgccaagugcaacgagaagcacgacgaggaguucugcgacaugcuccgccuguucgacuucugcaagcaggccauccagcggcugaaggcgcccgcccagaugagcauccagcucaucaacaaggccgugaacgcccugaucaacgaccagcugaucaugaagaaccaccuccgcgacaucauggggauccccuacugcaacuacuccaaguacugcuaccugaaccacaccgugaccggcaagacgagccugcccaagugcugccucgucuccaacggcagcuaccugaacgagacccacuucuccgacgacaucgagcagcaggccgacaacaugaucaccgagaugcugcagaaggaguacauggagcggcaggggaagacgccccucggccugguggaccuguucguguucagcaccuccuucuaccugaucagcaucuuccuccaccuggucaagaucccgacccaccgccacgugguggggaagcccugccccaagccccaccggcugaaccacaugggcaucugcuccugcggguucuacaagcagccgggcguccccgugcgcuggaagcggugaggacuaguaauaaggaaacuguaugaaugucugugggcaggaagugaagagauccuucuguaaagguuuuuggaauuaugucugcugaauaauaaacuuuuuugaaauaauaaaucugguagaaaaaugagaucuaaaaaaaaaaaaaaaaaaaaaaaaaaaaaaaaaaaaaaaaaaaaaaaaaaaaaaaaaaaaaaaaaaaaaaaaaaaaaaaaaaaaaaaaaaaaaaaaaaaa

SEQ ID NO: 34340 - RNA, 1788 nt, Artificial Sequence
  mRNA product Design b-4 (A100) comprising derived and/or modified sequence from LASV(Z0947-SLE-2011;Clade IV)__AIT17840__GPCmut8 (opt1)
aggagagucccgcagucggcguccagcggcucugcuuguucgugugugugucguugcaggccuuauucaagcuuaccaugggccagaucgugaccuucuuccaggaggucccccacgugaucgaggaggugaugaacaucguccugaucgcccucagcauccuggccgugcugaaggggcucuacaacuucgcgaccugcggccugguggggcuggucacguuccuccugcugugcggccgcuccugcaccaucagccucuacaaggggguguacgagcugcagacccuggagcucaacauggagacccugaacaugugcaugccgcuguccugcaccaagaacaacagccaccacuacaucauggugggcaacgagaccggccucgagcugacccugacgaacaccuccaucaucaaccacaaguucugcaaccucagcgacgcccacaagaagaaccuguacgaccacgcccugauguccaucaucagcaccuuccaccucuccauccccaacuucaaccaguacgaggccaugagcugcgacuucaacgggggcaagaucuccguccaguacaaccugagccacuccuacgccggggacgcggccaaccacugcggcaccguggccaacggggugcugcagacguucaugcggauggccuggggcggcagcuacaucgcgcucgacuccgggcgcgaccggugggacugcaucaugaccagcuaccaguaccugaucauccagaacaccaccugggaggaccacugccaguucucccgccccagccccaucggcuaccuggggcuccugucccagcggacgcgcgacaucuacaucagccggcgccugcucggcaccuucaccuggacccugagcgacuccgagggcaaggacacgcccgggggcuacugccugacccgguggaugcucaucgaggccgagcugaagugcuucgggaacaccgccgucgccaagugcaacgagaagcacgacgaggaguucugcgacaugcugcgccucuucgacuucugcaagcaggccauccagcggcugaaggcgcccgcccagaugagcauccagcugaucaacaaggccgugaacgcccucaucaacgaccagcugaucaugaagaaccaccuccgcgacaucaugggcauccccuacugcaacuacuccaaguacugcuaccugaaccacaccacgaccgggaagaccagccugcccaagugcugccugguguccaacggcagcuaccucaacgagacccacuucuccgacgacaucgagcagcaggccgacaacaugaucacggagaugcugcagaaggaguacauggagcggcagggcaagaccccgcuggggcucgucgaccuguucguguucagcaccuccuucuaccugaucagcaucuuccugcaccucgugaagaucccgacccaccgccacaucgucggcaagcccugccccaagccccaccggcugaaccacauggggaucugcuccugcggccuguacaagcagccgggggugcccgugaaguggaagcgcugaggacuaguaauaaggaaacuguaugaaugucugugggcaggaagugaagagauccuucuguaaagguuuuuggaauuaugucugcugaauaauaaacuuuuuugaaauaauaaaucugguagaaaaaugagaucuaaaaaaaaaaaaaaaaaaaaaaaaaaaaaaaaaaaaaaaaaaaaaaaaaaaaaaaaaaaaaaaaaaaaaaaaaaaaaaaaaaaaaaaaaaaaaaaaaaaa

SEQ ID NO: 34341 - RNA, 1788 nt, Artificial Sequence
  mRNA product Design b-4 (A100) comprising derived and/or modified sequence from LASV(Josiah;Clade IV)__NP_694870__GPCmut8 (opt1)
aggagagucccgcagucggcguccagcggcucugcuuguucgugugugugucguugcaggccuuauucaagcuuaccaugggccagaucgugaccuucuuccaggaggucccccacgugaucgaggaggugaugaacaucguccugaucgcccucagcgugcuggccgugcugaaggggcucuacaacuucgcgaccugcggccuggucgggcuggugacguuccuccugcugugcggccgcuccugcaccaccagccucuacaaggggguguacgagcugcagacccuggagcucaacauggagacgcugaacaugugcaugccgcuguccugcaccaagaacaacagccaccacuacaucauggucggcaacgagaccggccucgagcugacccugacgaacaccuccaucaucaaccacaaguucugcaaccucagcgacgcccacaagaagaaccuguacgaccacgcccugauguccaucaucagcaccuuccaccucuccauccccaacuucaaccaguacgaggccaugagcugcgacuucaacgggggcaagaucuccgugcaguacaaccugagccacuccuacgccggggacgcggccaaccacugcggcaccguggccaacgggguccugcagacguucaugcggauggccuggggcggcagcuacaucgcgcucgacuccgggcgcggcaacugggacugcaucaugaccagcuaccaguaccugaucauccagaacaccaccugggaggaccacugccaguucucccggcccagccccaucggguaccugggccuccugucccagcgcacgcgggacaucuacaucagccgccggcugcucggcaccuucaccuggacccugagcgacuccgaggggaaggacacgccgggcggguacugccugacccgcuggaugcucaucgaggccgagcugaagugcuucggcaacaccgccguggccaagugcaacgagaagcacgacgaggaguucugcgacaugcugcggcuguucgacuucugcaagcaggccauccagcgccugaaggcgcccgcccagaugagcauccagcugaucaacaaggccgugaacgcccucaucaacgaccagcugaucaugaagaaccaccuccgggacaucauggggauccccuacugcaacuacuccaaguacugcuaccucaaccacaccacgaccggccgcaccagccugcccaagugcugccuggucuccaacggcagcuaccucaacgagacccacuucuccgacgacaucgagcagcaggccgacaacaugaucacggagaugcugcagaaggaguacauggagcggcaggggaagaccccgcugggccugguggaccucuucguguucagcaccuccuucuaccugaucagcaucuuccugcaccucgucaagauccccacccaccgccacaucguggggaaguccugccccaagccccaccggcugaaccacaugggcaucugcagcugcgggcuguacaagcagccgggcgugcccgucaaguggaagcgcugaggacuaguaauaaggaaacuguaugaaugucugugggcaggaagugaagagauccuucuguaaagguuuuuggaauuaugucugcugaauaauaaacuuuuuugaaauaauaaaucugguagaaaaaugagaucuaaaaaaaaaaaaaaaaaaaaaaaaaaaaaaaaaaaaaaaaaaaaaaaaaaaaaaaaaaaaaaaaaaaaaaaaaaaaaaaaaaaaaaaaaaaaaaaaaaaa

SEQ ID NO: 34342 - RNA, 1785 nt, Artificial Sequence
  mRNA product Design b-4 (A100) comprising derived and/or modified sequence from LASV(LP;Clade I)__AAF86701__GPCmut8 (opt1)
aggagagucccgcagucggcguccagcggcucugcuuguucgugugugugucguugcaggccuuauucaagcuuaccaugggccagaucaucaccuucuuccaggaggugccccacgucaucgaggaggugaugaacaucgugcugaucgcccucagccugcuggccauccucaaggggcuguacaacaucgcgaccugcggcaucaucgggcuggucgccuuccucuuccugugcggcaaguccugcagccugacgcucaagggcggguacgagcugcagacccuggagcucaacauggagacccugaacaugugcaugccgcuguccugcaccaagaacagcucccaccacuacauccgcgugggcaacgagacggggcucgagcugacccugaccaacaccagcaucaucaaccacaaguucugcaaccucuccgacgcccacaagaagaaccuguacgaccacgcccugaugagcaucaucuccacguuccaccucagcauccccaacuucaaccaguacgaggccauguccugcgacuucaacggcgggaagaucagcgugcaguacaaccugucccacagcuacgcgggcgacgccgccgagcacugcgggaccgucgccaacggcgugcugcagaccuucaugcggauggcguggggcgggcgcuacaucgcccucgacuccggcaaggggaacugggacugcaucaugaccagcuaccaguaccugaucauccagaacacgaccugggaggaccacugccaguucucccggcccagccccaucggcuaccugggccuccugucccagcgcacccgggacaucuacaucagccgccggcugcucgggaccuucacguggacccugagcgacuccgagggcaacgagacccccgggggcuacugccugacccgcuggaugcucaucgaggccgagcugaagugcuucgggaacacggccguggccaagugcaacgagaagcacgacgaggaguucugcgacaugcugcggcuguucgacuucugcaagcaggcgauccgccggcugaaggccccggcccagaugagcauccagcugaucaacaaggccgucaacgcccucaucaacgaccagcugaucaugaagaaccaccuccgcgacaucaugggcauccccuacugcaacuacuccaaguacugcuaccucaaccacaccagcuccggccggaccagccugcccaagugcugccugaucuccaacgggagcuaccucaacgagacccaguucuccgacgacaucgagcagcaggcggacaacaugaucacggagaugcugcagaaggaguacaucgagcgccagggcaagaccccgcuggggcugguggacaucuucaucuucagcaccuccuucuaccucaucagcaucuuccugcaccugaucaagauccccacccaccggcacaucgugggcaagcccugccccaagccgcaccgccucaaccacaugggggucugcuccugcggccuguacaagcaccccggcgugcccacgaaguggaagcggugaggacuaguaauaaggaaacuguaugaaugucugugggcaggaagugaagagauccuucuguaaagguuuuuggaauuaugucugcugaauaauaaacuuuuuugaaauaauaaaucugguagaaaaaugagaucuaaaaaaaaaaaaaaaaaaaaaaaaaaaaaaaaaaaaaaaaaaaaaaaaaaaaaaaaaaaaaaaaaaaaaaaaaaaaaaaaaaaaaaaaaaaaaaaaaaaa

SEQ ID NO: 34343 - RNA, 1785 nt, Artificial Sequence
  mRNA product Design b-4 (A100) comprising derived and/or modified sequence from LASV(803213;Clade II)__AAF86703__GPCmut8 (opt1)
aggagagucccgcagucggcguccagcggcucugcuuguucgugugugugucguugcaggccuuauucaagcuuaccaugggccagaucaucaccuucuuccaggaggugccccacgucaucgaggaggugaugaacaucgugcugaucgcccucagccugcuggccauccucaaggggaucuacaacgucgcgaccugcggccuguucgggcugaucuccuuccuccugcugugcggccgcagcugcuccgugacguacaaggggguguacgagcuccagacccuggagcugaacauggccaaccucaacaugugcaugccgcugagcugcaccaagaacaacucccaccacuacaucauggucggcaacgagaccggccuggagcucacgcugaccaacaccagcaucaucaaccacaaguucugcaaccuguccgacgcccacaagaagaaccucuacgaccacgcccugaugagcaucaucuccaccuuccaccugagcauccccaacuucaaccaguacgaggccauguccugcgacuucaacgggggcaagaucagcgugcaguacaaccucucccacagcuucgcgguggacgccgccaaccacugcgggacgaucgccaacggcguccugcagaccuucaugcggauggcguggggcggguccuacaucgcccuggacagcggcaaggggaacugggacugcaucaugaccuccuaccaguaccucaucauccagaacaccacgugggaggaccacugccaguucagccgccccucccccaucggcuaccuggggcugcucagccagcggacccgcgacaucuacaucagccggcgccugcugggcaccuucaccuggacgcucuccgacagcgagggcaacgaggcccccgggggcuacugccugacccgguggaugcugaucgaggccgagcucaagugcuucgggaacaccgccguggcgaagugcaacgagaagcacgacgaggaguucugcgacaugcugcgccuguucgacuucugcaagcaggccaucaagcggcucaagaccccggcccagauguccauccagcugaucaacaaggccgugaacgcccugaucaacgaccagcucaucaugaagaaccaccuccgcgacaucaugggcauccccuacugcaacuacagccgguacugcuaccugaaccacacggucaccgggaagaccucccugccccgcugcugccuggugagcaacggcuccuaccugaacgagacccacuucagcgacgacaucgagcagcaggcggacaacaugaucacggagaugcuccagaaggaguacauggaccggcagggcaagaccccgcuggggcugguggaccuguucgucuucuccaccagcuucuaccucaucuccaucuuccugcaccuggugaagauccccacccaccgccacaucgugggcaagcccugccccaagccgcaccggcucaaccacauggggaucugcagcugcggccuguacaagcaccccgggguccccgugaaguggaagcgcugaggacuaguaauaaggaaacuguaugaaugucugugggcaggaagugaagagauccuucuguaaagguuuuuggaauuaugucugcugaauaauaaacuuuuuugaaauaauaaaucugguagaaaaaugagaucuaaaaaaaaaaaaaaaaaaaaaaaaaaaaaaaaaaaaaaaaaaaaaaaaaaaaaaaaaaaaaaaaaaaaaaaaaaaaaaaaaaaaaaaaaaaaaaaaaaaa

SEQ ID NO: 34344 - RNA, 1785 nt, Artificial Sequence
  mRNA product Design b-4 (A100) comprising derived and/or modified sequence from LASV(GA391;Clade III)__CAA36645__GPCmut8 (opt1)
aggagagucccgcagucggcguccagcggcucugcuuguucgugugugugucguugcaggccuuauucaagcuuaccaugggccagaucgugaccuucuuccaggaggucccccacgugaucgaggaggugaugaacaucguccugaucgcccucagcauccuggccauccugaaggggcucuacaacguggcgaccugcggccugaucgggcuggugacguuccuccugcuguccggccgcagcugcucccucaucuacaaggggaccuacgagcugcagacccuggagcucaacauggagacccugaacaugugcaugccgcugagcugcacgaagaacaacucccaccacuacauccgggucggcaacgagaccggccucgagcugacccugaccaacacgagcauccucaaccacaaguucugcaaccuguccgacgcccacaagcgcaaccuguacgaccacagccucauguccaucaucagcaccuuccaccuguccauccccaacuucaaccaguacgaggccaugagcugcgacuucaacgggggcaagaucaccgugcaguacaaccugucccacagcuucgccguggacgccgcggggcacugcggcacccucgccaacgggguccugcagacguucaugcggauggccuggggcggcuccuacaucgcccuggacagcgggcgcggcaacugggacugcaucaugaccuccuaccaguaccucaucauccagaacaccaccugggacgaccacugccaguucagccggcccucccccaucggguaccugggccugcucagccagcgcacgcgggacaucuacaucagccgccggcugcugggcaccuucaccuggacccucuccgacagcgaggggaacgagacgccgggcggguacugccugacccgcuggaugcugaucgaggcggagcucaagugcuucggcaacaccgccguggccaagugcaacgagaagcacgacgaggaguucugcgacaugcugcggcuguucgacuucugcaagcaggccauccgccggcucaagacccccgcccagauguccauccagcugaucaacaaggcggugaacgcccugaucaacgaccagcucaucaugaagaaccaccuccgcgacaucauggggauccccuacugcaacuacagccgguacugcuaccugaaccacacguccaccggcaagaccagccugccccgcugcugccugaucuccaacggcagcuaccugaacgagaccaaguucuccgacgacaucgagcagcaggccgacaacaugaucacggagaugcugcagaaggaguacaucgaccggcaggggaagaccccgcucggccuggucgaccuguucguguucagcaccuccuucuaccucaucagcaucuuccugcaccuggugaagauccccacccaccgccacaucgucgggaagcccugccccaagccgcaccggcucaaccacaugggcaucugcuccugcgggcuguacaagcagcccggcgugcccgugcgcuggaagcggugaggacuaguaauaaggaaacuguaugaaugucugugggcaggaagugaagagauccuucuguaaagguuuuuggaauuaugucugcugaauaauaaacuuuuuugaaauaauaaaucugguagaaaaaugagaucuaaaaaaaaaaaaaaaaaaaaaaaaaaaaaaaaaaaaaaaaaaaaaaaaaaaaaaaaaaaaaaaaaaaaaaaaaaaaaaaaaaaaaaaaaaaaaaaaaaaa

SEQ ID NO: 34345 - RNA, 1788 nt, Artificial Sequence
  mRNA product Design b-4 (A100) comprising derived and/or modified sequence from LASV(AV;Clade V)__CCA30314__GPCmut8 (opt1)
aggagagucccgcagucggcguccagcggcucugcuuguucgugugugugucguugcaggccuuauucaagcuuaccaugggccagaucgugaccuucuuccaggaggucccccacgugaucgaggaggugaugaacaucguccugaucgcccucagcauccuggccgugcugaaggggcucuacaacaucgcgaccugcggccugaucgggcugaucacguuccuccugcugugcggccgcuccugcagcuccaaccucuacaaggggguguacgagcugcagagccuggaccucaacauggagacccugaacaugugcaugccgcuguccugcaccaagaacaacagccaccacuacauccgggucggcaacgacaccggccucgagcugacgcugaccaacaccuccauccucaaccacaaguucugcaaccugagcgacgcccacaagaaggaccuguacgaccacgcccucauguccaucaucagcaccuuccaccuguccauccccaacuucaaccaguacgaggccaugagcugcgacuucaacgggggcaagaucuccgugcaguacaaccugagccacuccuacgccaucgacgcggccaaccacugcgggacgguggccaacggcauccuccagaccuucaugcgcauggccuggggcgggagcuacaucgcgcuggacuccggccgggggaacugggacugcaucaugaccagcuaccaguaccugaucauccagaacaccacgugggagaaccacugccaguucucccgccccagccccaucggcuaccucgggcugcugagccagcggacccgcgacaucuacaucucccggcgccuccugggcaccuucaccuggacgcugagcgacuccgagggcaacgccacccccgggggcuacugccucacccgguggaugcugaucgaggccgagcugaagugcuucgggaacaccgccgucgccaagugcaacgagaagcacgacgaggaguucugcgacaugcuccgccuguucgacuucugcaagcaggcgaucagccggcugaaguccccggcccagaugagcauccagcucaucaacaaggccgugaacgcccugaucaacgaccagcugaucaugaagaaccaccuccgcgacaucaugggcauccccuacugcaacuacuccaaguacugcuaccugaaccacacgaucaccgggaagaccagccugcccaagugcugccucguguccaacggcagcuaccugaacgagacccacuucuccgacgacaucgagcagcaggccgacaacaugaucacggagaugcugcagaaggaguacauggagcggcagggcaagaccccgcuggggcucgucgaccuguucguguucagcaccuccuucuaccugaucagcaucuuccuccgccuggugaagauccccacccaccggcacaucgucggcaagcccugccccaagccgcaccgccugaaccacauggggaucugcuccugcggccucuacaagcagcccggggugcccgugcgguggaagcgcugaggacuaguaauaaggaaacuguaugaaugucugugggcaggaagugaagagauccuucuguaaagguuuuuggaauuaugucugcugaauaauaaacuuuuuugaaauaauaaaucugguagaaaaaugagaucuaaaaaaaaaaaaaaaaaaaaaaaaaaaaaaaaaaaaaaaaaaaaaaaaaaaaaaaaaaaaaaaaaaaaaaaaaaaaaaaaaaaaaaaaaaaaaaaaaaaa

SEQ ID NO: 34346 - RNA, 1785 nt, Artificial Sequence
  mRNA product Design b-4 (A100) comprising derived and/or modified sequence from LASV(Togo/2016/7082;Clade VI)__AMR44577__GPCmut8 (opt1)
aggagagucccgcagucggcguccagcggcucugcuuguucgugugugugucguugcaggccuuauucaagcuuaccaugggccagaucaucaccuucuuccaggaggugccccacgucaucgaggaggugaugaacaucgugcugaucgcccucagccugcuggccauccucaagggggucuacaacguggcgaccugcggcaucaucgggcuggugacguuccuguuccucugcggccgcuccugcagccugaucuacaagggguccuacgagcugcagacccucgagcugaacauggagacccugaacaugugcaugccgcucagcugcaccaagaacuccagccaccacuacauccgggucggcaacgagacgggccuggagcugacccucaccaacaccuccaucaucaaccacaaguucugcaaccugagcgacgcccacaagcgcaaccuguacgaccacgcccucauguccauccugagcacguuccaccuguccauccccaacuucaaccaguacgaggccaugagcugcgacuucaacgggggcaagaucuccgugcaguacaaccucagccacgccuacgcgguggacgccgccgagcacugcgggaccgucgccaacggcgugcugcagaccuucaugcggauggcguggggcggguccuacaucgcccuggacagcggccgcgggaacugggacugcaucaugaccuccuaccaguaccucaucauccagaacacgaccugggaggaccacugccaguucagccggcccucccccaucggcuaccuggggcugcucagccagcgcacccgggacaucuacaucagccgccggcugcugggcaccuucacguggacccucuccgacagcgagggcaacgagacccccgggggcuacugccugacccgcuggaugcugaucgaggccgagcucaagugcuucgggaacacggccguggccaagugcaacgagaagcacgacgaggaguucugcgacaugcugcggcuguucgacuucugcaagcaggcgauccagcgccucaaguccccggcccagaugagcauccagcugaucaacaaggccgucaacgcccugaucaacgaccagcucaucaugaagaaccaccuccgggacaugaugggcauccccuacugcaacuacuccaaguacugcuaccugaaccacaccagcuccgggcgcaccagccugcccaagugcugccugguguccaacggcagcuaccugaacgagacccacuucuccgacgacaucgagcagcaggccgacaacaugaucacggagaugcuccagaaggaguacaucgaccggcagggcaagaccccgcuggggcugguggaccuguucgucuucagcaccuccuucuaccucaucagcaucuuccugcaccugaucaagauccccacccaccgccacaucgugggcaagcccugccccaagccgcaccggcucaaccacauggggaucugcuccugcggccuguacaagcagcccggggugcccacgcgcuggaagcggugaggacuaguaauaaggaaacuguaugaaugucugugggcaggaagugaagagauccuucuguaaagguuuuuggaauuaugucugcugaauaauaaacuuuuuugaaauaauaaaucugguagaaaaaugagaucuaaaaaaaaaaaaaaaaaaaaaaaaaaaaaaaaaaaaaaaaaaaaaaaaaaaaaaaaaaaaaaaaaaaaaaaaaaaaaaaaaaaaaaaaaaaaaaaaaaaa

SEQ ID NO: 34347 - RNA, 1785 nt, Artificial Sequence
  mRNA product Design b-4 (A100) comprising derived and/or modified sequence from LASV(KAK-428;Clade n.d. (VII))__ANH09740__GPCmut8 (opt1)
aggagagucccgcagucggcguccagcggcucugcuuguucgugugugugucguugcaggccuuauucaagcuuaccaugggccagaucgugaccuucuuccaggaggucccccacgugaucgaggaggugaugaacaucguccugaucgcccucagccugcuggccauccucaaggggcuguacaacuucgcgaccugcggcgugaucgggcugaucacguuccuccugcugugcggccgcuccugcagcgccaccuacaaggggcaguacgagcuccagacccuggagcugaacauggagucccucaacaugugcaugccgcugagcugcaccaagaacaacucccaccacuacauccgggccggcaacaacacgggccuggagcucacccugaccaacaccagcaucaucucccacaaguucugcaaccugagcgacgcccacaagaagaaccucuacgaccacacgcugauguccaucaucaccaccuuccaccugagcauccccaacuucaaccaguacgaggccauguccugcgacuucaacgggggcaagaucagcauccaguacaaccucucccacagcuacgcgggggacgccgcccagcacugcggcaccguggccaacgggguccugcagacguucaugcgcauggcguggggcggcuccuaccuggcccucgacagcgggcggcgcggcugggacugcaucaucuccagcuaccaguaccugaucauccagaacaccaccugggacgaccacugccaguucucccggcccagccccaucggguaccugggcuucgugagccagaagacccgcgacaucuacaucucccggcgccuccugggcacguucaccuggacccugagcgacuccgaggggcacgacaugccgggcggguacugccucacccgguggaugcugaucgaggccgaccugaagugcuucggcaacacggccguggccaagugcaacgagaagcacgacgaggaguucugcgacauguggcgccucuucgacuucugcaagcaggcgauccagcggcugaaggcccccgcccagaugaacauccagcugaucaacaaggccgucaacgcccucaucaacgaccagcugaugaugaagaaccaccuccgcgacaucauggggauccccuacugcaacuacagcaaguucugcuaccugaacaacaccaccaccggccggacgucccugccccgcugcugccugaucagcaacggcuccuaccucaacgagacccacuucagcgacgacaucgagcagcaggcggacaacaugaucaccgagaugcugcagaaggaguacauggaccggcaggggaagaccccgcugggccucguggaccuguucguguucuccacgagcuucuaccugaucaccaucuuccugcaccucgucaagauccccacccaccgccacaucguggggaagcccugccccaagccgcaccggcugaaccacaugggcaucugcuccugcgggcuguacaagcagcccggcgugcccguccgcuggaagcggugaggacuaguaauaaggaaacuguaugaaugucugugggcaggaagugaagagauccuucuguaaagguuuuuggaauuaugucugcugaauaauaaacuuuuuugaaauaauaaaucugguagaaaaaugagaucuaaaaaaaaaaaaaaaaaaaaaaaaaaaaaaaaaaaaaaaaaaaaaaaaaaaaaaaaaaaaaaaaaaaaaaaaaaaaaaaaaaaaaaaaaaaaaaaaaaaa

SEQ ID NO: 34348 - RNA, 1785 nt, Artificial Sequence; identical to SEQ ID NO: 34342
  mRNA product Design b-4 (A100) comprising derived and/or modified sequence from LASV(Pinneo-NIG-1969;Clade I)__AIT17836__GPCmut8 (opt1)

SEQ ID NO: 34349 - RNA, 1785 nt, Artificial Sequence
  mRNA product Design b-4 (A100) comprising derived and/or modified sequence from LASV(ISTH0009-NIG-2011;Clade II)__AIT17404__GPCmut8 (opt1)
aggagagucccgcagucggcguccagcggcucugcuuguucgugugugugucguugcaggccuuauucaagcuuaccaugggccagaucaucaccuucuuccaggaggugccccacgucaucgaggaggugaugaacaucgugcugaucgcccucagccugcuggccauccucaaggggaucuacaacgucgcgaccugcggccuguucgggcugguguccuuccuccugcugugcggccgcagcugcuccacgaccuacaaggggguguacgagcuccagacccuggagcuggacauggccagccucaacaugugcaugccgcuguccugcaccaagaacaacagccaccacuacaucauggucggcaacgagacgggccuggagcucacccugaccaacaccuccaucaucaaccacaaguucugcaaccugagcgacgcccacaagaagaaccucuacgaccacgcccugauguccaucaucagcacguuccaccuguccauccccaacuucaaccaguacgaggccaugagcugcgacuucaacgggggcaagaucuccgugcaguacaaccucagccacgcguacgccguggacgccgccaaccacugcgggaccaucgcgaacggcguccugcagaccuucaugcggauggccuggggcggguccuacaucgcccuggacagcggcaagggguccugggacugcaucaugaccagcuaccaguaccucaucauccagaacacgaccugggaggaccacugccaguucucccgccccagccccaucggcuaccuggggcugcucagccagcggacccgcgacaucuacaucucccggcgccugcugggcaccuucacguggacccucagcgacuccgagggcaacgagacccccgggggcuacugccugacccgguggaugcugaucgaggccgagcucaagugcuucgggaacacggccguggcgaagugcaacgagaagcacgacgaggaguucugcgacaugcugcgccuguucgacuucugcaagcaggccauccggcgccucaagaccccggcccagaugagcauccagcugaucaacaaggccgugaacgcccugaucaacgaccagcucaucaugaagaaccaccuccgggacaucaugggcauccccuacugcaacuacuccaaguacugcuaccugaaccacaccgucaccgggaagacgagccugccccgcugcugccugguguccaacggcagcuaccugaacgagacccacuucuccgacgacaucgagcagcaggcggacaacaugaucaccgagcuccugcagaaggaguacauggaccggcagggcaagaccccgcuggggcugguggaccucuucgucuucagcacguccuucuaccugaucagcaucuuccugcaccucaucaagauccccacccaccgccacaucaccggcaagcccugccccaagccgcaccggcugaaccacauggggaucugcuccugcggccuguacaagcaccccggggugcccgugaaguggaagcgcugaggacuaguaauaaggaaacuguaugaaugucugugggcaggaagugaagagauccuucuguaaagguuuuuggaauuaugucugcugaauaauaaacuuuuuugaaauaauaaaucugguagaaaaaugagaucuaaaaaaaaaaaaaaaaaaaaaaaaaaaaaaaaaaaaaaaaaaaaaaaaaaaaaaaaaaaaaaaaaaaaaaaaaaaaaaaaaaaaaaaaaaaaaaaaaaaa

SEQ ID NO: 34350 - RNA, 1785 nt, Artificial Sequence
  mRNA product Design b-4 (A100) comprising derived and/or modified sequence from LASV(ISTH2010-NIG-2012;Clade II)__AIT17482__GPCmut8 (opt1)
aggagagucccgcagucggcguccagcggcucugcuuguucgugugugugucguugcaggccuuauucaagcuuaccaugggccagaucaucaccuucuuccaggaggugccccacgucaucgaggaggugaugaacaucgugcugaucgcccucagccugcuggccauccucaaggggaucuacaacgucgcgaccugcggccuguucgggcugguguccuuccuccugcugugcggccgcagcugcuccacgaccuacaaggggguguacgagcuccagacccuggagcuggacauggccagccucaacaugugcaugccgcuguccugcaccaagaacaacagccaccacuacaucauggucggcaacgagacgggccuggagcucacccugaccaacaccuccaucaucaaccacaaguucugcaaccugagcgacgcccacaagaagaaccucuacgaccacgcccugauguccaucaucagcacguuccaccuguccauccccaacuucaaccaguacgaggccaugagcugcgacuucaacgggggcaagaucuccgugcaguacaaccucagccacgcguacgccguggacgccgccaaccacugcgggaccaucgcgaacggcguccugcagaccuucaugcggauggccuggggcggguccuacaucgcccuggacagcggcaagggguccugggacugcaucaugaccagcuaccaguaccucaucauccagaacaucacgugggaggaccacugccaguucucccgccccagccccaucggcuaccuggggcugcucagccagcggacccgcgacaucuacaucucccggcgccugcugggcaccuucaccuggacgcucagcgacuccgagggcaacgagacccccgggggcuacugccugacccgguggaugcugaucgaggccgagcucaagugcuucgggaacaccgccguggcgaagugcaacgagaagcacgacgaggaguucugcgacaugcugcgccuguucgacuucugcaagcaggccauccggcgccucaagacgccggcccagaugagcauccagcugaucaacaaggccgugaacgcccugaucaacgaccagcucaucaugaagaaccaccuccgggacaucaugggcauccccuacugcaacuacuccaaguacugcuaccugaaccacaccgucaccgggaagaccagccugccccgcugcugccugguguccaacggcagcuaccugaacgagacgcacuucuccgacgacaucgagcagcaggcggacaacaugaucaccgagcuccugcagaaggaguacaucgaccggcagggcaagaccccgcuggggcugguggaccucuucgucuucagcaccuccuucuaccugaucagcaucuuccugcaccucgugaagauccccacgcaccgccacguggucggcaagcccugccccaagccgcaccggcugaaccacauggggaucugcuccugcggccuguacaagcaccccggggugcccgugaaguggaagcgcugaggacuaguaauaaggaaacuguaugaaugucugugggcaggaagugaagagauccuucuguaaagguuuuuggaauuaugucugcugaauaauaaacuuuuuugaaauaauaaaucugguagaaaaaugagaucuaaaaaaaaaaaaaaaaaaaaaaaaaaaaaaaaaaaaaaaaaaaaaaaaaaaaaaaaaaaaaaaaaaaaaaaaaaaaaaaaaaaaaaaaaaaaaaaaaaaa

SEQ ID NO: 34351 - RNA, 1785 nt, Artificial Sequence
  mRNA product Design b-4 (A100) comprising derived and/or modified sequence from LASV(Lassa virus/H.sapiens-wt/NGA/2015/ISTH_0543;Clade II)__AVO03639__GPCmut8 (opt1)
aggagagucccgcagucggcguccagcggcucugcuuguucgugugugugucguugcaggccuuauucaagcuuaccaugggccagaucaucaccuucuuccaggaggugccccacgucaucgaggaggugaugaacaucgugcugaucgcccucagccugcuggccauccucaaggggaucuacaacgucgcgaccugcggccuguucgggcugguguccuuccuccugcugugcggccgcagcugcuccacgaccuacaaggggguguacgagcuccagacccuggagcuggacauggccaaccucaacaugugcaugccgcugagcugcaccaagaacaacucccaccacuacaucauggucggcaacgagacgggccuggagcucacccugaccaacaccagcaucaucaaccacaaguucugcaaccuguccgacgcccacaagaagaaccucuacgaccacgcccugaugagcaucaucuccacguuccaccugagcauccccaacuucaaccaguacgaggccauguccugcgacuucaacgggggcaagaucagcgugcaguacaaccucucccacaccuacgcgguggacgccgccaaccacugcgggaccaucgccaacggcguccugcagaccuucaugcggauggcguggggcgggagcuacaucgcccuggacuccggcaaggggagcugggacugcaucaugacguccuaccaguaccucgugauccagaacaccaccugggaggaccacugccaguucagccgccccucccccaucggcuaccuggggcugcucagccagcggacccgcgacaucuacaucagccggcgccugcugggcacguucaccuggacccucuccgacagcgagggcaacgagacccccgggggcuacugccugacgcgguggaugcugaucgaggccgagcucaagugcuucgggaacaccgccguggccaagugcaacgagaagcacgacgaggaguucugcgacaugcugcgccuguucgacuucugcaagcaggcgauccggcgccucaagaccccggcccagauguccauccagcugaucaacaaggccgucaacgcccugaucaacgaccagcucaucaugaagaaccaccuccgggacaucaugggcauccccuacugcaacuacagcaaguacugcuaccugaaccacaccgugacggggaagaccucccugccccgcugcugccuggugagcaacggcuccuaccugaacgagacccacuucagcgacgacaucgagcagcaggccgacaacaugaucaccgagcuccugcagaaggaguacaucgaccggcagggcaagacgccgcuggggcuggucgaccucuucguguucuccaccagcuucuaccugaucuccaucuuccugcaccucgugaagauccccacccaccgccacaucaccggcaagcccugccccaagccgcaccggcugaaccacauggggaucugcagcugcggccuguacaagcaccccgggguccccgugaaguggaagcgcugaggacuaguaauaaggaaacuguaugaaugucugugggcaggaagugaagagauccuucuguaaagguuuuuggaauuaugucugcugaauaauaaacuuuuuugaaauaauaaaucugguagaaaaaugagaucuaaaaaaaaaaaaaaaaaaaaaaaaaaaaaaaaaaaaaaaaaaaaaaaaaaaaaaaaaaaaaaaaaaaaaaaaaaaaaaaaaaaaaaaaaaaaaaaaaaaa

SEQ ID NO: 34352 - RNA, 1785 nt, Artificial Sequence
  mRNA product Design b-4 (A100) comprising derived and/or modified sequence from LASV(Lassa virus/H.sapiens-wt/NGA/2016/ISTH_0009;Clade II)__AVO03571__GPCmut8 (opt1)
aggagagucccgcagucggcguccagcggcucugcuuguucgugugugugucguugcaggccuuauucaagcuuaccaugggccagaucaucaccuucuuccaggaggugccccacgucaucgaggaggugaugaacaucgugcugaucgcccucagccugcuggccauccucaaggggaucuacaacgucgcgaccugcggccugcuggggcucguguccuuccugcugcucugcggccgcagcugcuccacgaccuacaaggggguguacgagcugcagacccuggagcucgacauggccagccugaacaugugcaugccgcuguccugcaccaagaacaacagccaccacuacaucauggucggcaacgagacgggccucgagcugacccugaccaacaccuccaucaucaaccacaaguucugcaaccucagcgacgcccacaagaagaaccuguacgaccacgcccugauguccaucaucagcacguuccaccucuccauccccaacuucaaccaguacgaggccaugagcugcgacuucaacgggggccggaucuccgugcaguacaaccugagccacuccuacgcgguggacgccgccaaccacugcgggaccaucgccaacggcguccugcagaccuucaugcgcauggcguggggcgggagcuacaucgcccucgacuccggcaaggggagcugggacugcaucaugaccuccuaccaguaccugaucauccagaacacgaccugggaggaccacugccaguucagccggcccagccccaucggcuaccuggggcuccugucccagcgcacccgggacaucuacaucagccgccggcugcucggcaccuucacguggacccuguccgacagcgagggcaacgagacccccgggggcuacugccugacccgcuggaugcucaucgaggccgagcugaagugcuucgggaacacggccguggccaagugcaacgagaagcacgacgaggaguucugcgacaugcugcggcuguucgacuucugcaagcaggcgauccgccggcugaagaccccggcccagauguccauccagcugaucaacaaggccgugaacgcccucaucaacgaccagcugaucaugaagaaccaccuccgcgacaucaugggcauccccuacugcaacuacagcaaguacugcuaccucaaccacaccgucaccgggaagacgucccugccccggugcugccuggugagcaacggcuccuaccucaacgagacccacuucagcgacgacaucgagcagcaggccgacaacaugaucaccgagcugcugcagaaggaguacaucgaccgccagggcaagaccccgcuggggcucguggaccuguucgucuucuccacgagcuucuaccugaucuccaucuuccuccaccuggugaagauccccacccaccggcacaucaccggcaagcccugccccaagccgcaccgccugaaccacauggggaucugcagcugcggccucuacaaccaccccggggugcccgucaaguggaagcggugaggacuaguaauaaggaaacuguaugaaugucugugggcaggaagugaagagauccuucuguaaagguuuuuggaauuaugucugcugaauaauaaacuuuuuugaaauaauaaaucugguagaaaaaugagaucuaaaaaaaaaaaaaaaaaaaaaaaaaaaaaaaaaaaaaaaaaaaaaaaaaaaaaaaaaaaaaaaaaaaaaaaaaaaaaaaaaaaaaaaaaaaaaaaaaaaa

SEQ ID NO: 34353 - RNA, 1785 nt, Artificial Sequence
  mRNA product Design b-4 (A100) comprising derived and/or modified sequence from LASV(Lassa virus/H.sapiens-wt/NGA/2016/ISTH_0017;Clade II)__AVO03567__GPCmut8 (opt1)
aggagagucccgcagucggcguccagcggcucugcuuguucgugugugugucguugcaggccuuauucaagcuuaccaugggccagaucaucaccuucuuccaggaggugccccacgucaucgaggaggugaugaacaucgugcugaucgcccucagccugcuggccauccucaaggggaucuacaacgucgcgaccugcggccuguucgggcugguguccuuccuccugcugugcggccgcagcugcuccacgaccuacaaggggguguacgagcuccagacccuggagcuggacauggccagccucaacaugugcaugccgcuguccugcaccaagaacaacagccaccacuacaucauggucggcaacgagacgggccuggagcucacccugaccaacaccuccaucaucaaccacaaguucugcaaccugagcgacgcccacaagaagaaccucuacgaccacgcccugauguccaucaucagcacguuccaccuguccauccccaacuucaaccaguacgaggccaugagcugcgacuucaacgggggcaagaucuccgugcaguacaaccucagccacaccuacgcgaucgacgccgccaaccacugcgggaccaucgccaacggcgugcugcagaccuucaugcggauggcguggggcggguccuacaucgcccuggacagcggcaagggguccugggacugcaucaugacgagcuaccaguaccucaucauccagaacaccaccugggaggaccacugccaguucucccgccccagccccaucggcuaccuggggcugcucagccagcggacccgcgacaucuacaucucccggcgccugcugggcacguucaccuggacccucagcgacuccgagggcaacgagacccccgggggcuacugccugacgcgguggaugcugaucgaggccgagcucaagugcuucgggaacaccgccgucgccaagugcaacgagaagcacgacgaggaguucugcgacaugcugcgccuguucgacuucugcaagcaggcgauccggcgccucaagaccccggcccagaugagcauccagcugaucaacaaggccgugaacgcccugaucaacgaccagcucaucaugaagaaccaccuccgggacaucaugggcauccccuacugcaacuacuccaaguacugcuaccugaaccacaccgugacggggaagaccagccugccccgcugcugccuggucuccaacggcagcuaccugaacgagacccacuucuccgacgacaucgagcagcaggccgacaacaugaucaccgagcuccugcagaaggaguacauggaccggcagggcaagacgccgcuggggcugguggaccucuucguguucagcaccuccuucuaccugaucagcaucuuccugcaccucguccgcauccccacccaccggcacgugaucggcaagcccugccccaagccgcaccgccugaaccacauggggaucugcuccugcggccuguacaagcaccccggggugcccgucaaguggaagcggugaggacuaguaauaaggaaacuguaugaaugucugugggcaggaagugaagagauccuucuguaaagguuuuuggaauuaugucugcugaauaauaaacuuuuuugaaauaauaaaucugguagaaaaaugagaucuaaaaaaaaaaaaaaaaaaaaaaaaaaaaaaaaaaaaaaaaaaaaaaaaaaaaaaaaaaaaaaaaaaaaaaaaaaaaaaaaaaaaaaaaaaaaaaaaaaaa

SEQ ID NO: 34354 - RNA, 1785 nt, Artificial Sequence
  mRNA product Design b-4 (A100) comprising derived and/or modified sequence from LASV(Lassa virus/H.sapiens-wt/NGA/2018/ISTH_0959;Clade II)__AVV65099__GPCmut8 (opt1)
aggagagucccgcagucggcguccagcggcucugcuuguucgugugugugucguugcaggccuuauucaagcuuaccaugggccagaucaucaccuucuuccaggaggugccccacgucaucgaggaggugaugaacaucgugcugaucgcccucagccugcuggccauccucaaggggaucuacaacgucgugaccugcggccuguucgggcugguguccuuccuccugcugugcggccgcagcugcuccacgaccuacaagggggucuacgagcuccagacccuggagcuggacauggcgagccucaacaugugcaugccgcuguccugcaccaagaacaacagccaccacuacaucauggugggcaacgagacgggccuggagcucacccugaccaacaccuccaucaucaaccacaaguucugcaaccugagcgacgcccacaagaagaaccucuacgaccacgcccugauguccaucaucagcacguuccaccuguccauccccaacuucaaccaguacgaggccaugagcugcgacuucaacgggggcaagaucuccgugcaguacaaccucagccacgccuacgcgaucgacgccgccaaccacugcgggaccaucgccaacggcguccugcagaccuucaugcggauggcguggggcggguccuacaucgcccuggacagcggcaagggguccugggacugcaucaugaccagcuaccaguaccucaucauccagaacacgaccugggaggaccacugccaguucucccgccccagccccaucggcuaccuggggcugcucagccagcggacccgcgacaucuacaucucccggcgccugcugggcaccuucacguggacccucagcgacuccgagggcaacgagacccccgggggcuacugccugacccgguggaugcugaucgaggccgagcucaagugcuucgggaacacggccguggccaagugcaacgagaagcacgacgaggaguucugcgacaugcugcgccuguucgacuucugcaagcaggcgauccggcgccucaagaccccggcccagaugagcauccagcugaucaacaaggccgugaacgcccugaucaacgaccagcucaucaugaagaaccaccuccgggacaucaugggcauccccuacugcaacuacuccaaguacugcuaccugaaccacaccgucaccgggaagacgagccugccccgcugcugccugguguccaacggcagcuaccugaacgagacccacuucuccgacgacaucgagcagcaggccgacaacaugaucaccgagcuccugcagaaggaguacaucgaccggcagggcaagaccccgcuggggcugguggaccucuucgucuucagcacguccuucuaccugaucagcaucuuccugcaccucgugaagauccccacccaccgccacgugaucggcaagcccugccccaagccgcaccggcugaaccacauggggaucugcuccugcggccuguacaagcaccccgggguccccgugaaguggaagcgcugaggacuaguaauaaggaaacuguaugaaugucugugggcaggaagugaagagauccuucuguaaagguuuuuggaauuaugucugcugaauaauaaacuuuuuugaaauaauaaaucugguagaaaaaugagaucuaaaaaaaaaaaaaaaaaaaaaaaaaaaaaaaaaaaaaaaaaaaaaaaaaaaaaaaaaaaaaaaaaaaaaaaaaaaaaaaaaaaaaaaaaaaaaaaaaaaa

SEQ ID NO: 34355 - RNA, 1785 nt, Artificial Sequence
  mRNA product Design b-4 (A100) comprising derived and/or modified sequence from LASV(LASV003-NIG-2008;Clade II)__AIT17580__GPCmut8 (opt1)
aggagagucccgcagucggcguccagcggcucugcuuguucgugugugugucguugcaggccuuauucaagcuuaccaugggccagaucaucaccuucuuccaggaggugccccacgucaucgaggaggugaugaacaucgugcugaucgcccucagccugcuggccauccucaaggggaucuacaacgucgcgaccugcggccuguucgggcugguguccuuccuccugcugugcggccgcagcugcuccacgaccuacaaggggguguacgagcuccagacccuggagcuggacauggccagccucaacaugugcaugccgcuguccugcaccaagaacaacagccaccacuacaucauggucggcaacgagacgggccuggagcucacccugaccaacaccuccaucaucaaccacaaguucugcaaccugagcgacgcccacaagaagaaccucuacgaccacgcccugauguccaucaucagcacguuccaccuguccauccccaacuucaaccaguacgaggccaugagcugcgacuucaacgggggcaagaucuccgugcaguacaaccucagccacaccuacgcgguggacgccgccaaccacugcgggaccaucgccaacggcguccugcagaccuucaugcggauggcguggggcggguccuacaucgcccuggacagcggcaagggguccugggacugcaucaugacgagcuaccaguaccucaucauccagaacaccaccugggaggaccacugccaguucucccgccccagccccaucggcuaccuggggcugcucagccagcggacccgcgacaucuacaucucccggcgccugcugggcacguucaccuggacccucagcgacuccgagagcaacgagaccccgggcggguacugccugacgcgguggaugcugaucgaggccgagcucaagugcuucggcaacaccgccguggccaagugcaacgagaagcacgacgaggaguucugcgacaugcugcgccuguucgacuucugcaagcaggcgauccggcgccucaaggcccccgcccagauguccauccagcugaucaacaaggccgugaacgcccugaucaacgaccagcucaucaugaagaaccaccuccgggacaucauggggauccccuacugcaacuacagcaaguacugcuaccugaaccacaccgucaccggccgcacgucccugccccggugcugccuggugagcaacggguccuaccugaacgagacccacuucagcgacgacaucgagcagcaggcggacaacaugaucaccgagcuccugcagaaggaguacauggaccgccagggcaagaccccgcugggccugguggaccucuucgucuucuccacgagcuucuaccugaucuccaucuuccugcaccucgugaagauccccacccaccggcacgugaucgggaagcccugccccaagccgcaccgccugaaccacaugggcaucugcagcugcgggcuguacaagcaccccggcguccccgugaaguggaagcggugaggacuaguaauaaggaaacuguaugaaugucugugggcaggaagugaagagauccuucuguaaagguuuuuggaauuaugucugcugaauaauaaacuuuuuugaaauaauaaaucugguagaaaaaugagaucuaaaaaaaaaaaaaaaaaaaaaaaaaaaaaaaaaaaaaaaaaaaaaaaaaaaaaaaaaaaaaaaaaaaaaaaaaaaaaaaaaaaaaaaaaaaaaaaaaaaa

SEQ ID NO: 34356 - RNA, 1785 nt, Artificial Sequence
  mRNA product Design b-4 (A100) comprising derived and/or modified sequence from LASV(LASV035-NIG-2009;Clade II)__AIT17588__GPCmut8 (opt1)
aggagagucccgcagucggcguccagcggcucugcuuguucgugugugugucguugcaggccuuauucaagcuuaccaugggccagaucaucaccuucuuccaggaggugccccacgucaucgaggaggugaugaacaucgugcugaucgcccucagccugcuggccauccucaaggggaucuacaacgucgcgaccugcggccuguucgggcugguguccuuccuccugcugugcggccgcagcugcuccacgaccuacaaggggguguacgagcuccagacccuggagcuggacauggccagccucaacaugugcaugccgcuguccugcaccaagaacaacagccaccacuacaucauggucggcaacgagacgggccuggagcucacccugaccaacaccuccaucaucaaccacaaguucugcaaccugagcgacgcccacaagaagaaccucuacgaccacgcccugauguccaucaucagcacguuccaccuguccauccccaacuucaaccaguacgaggccaugagcugcgacuucaacgggggcaagaucuccgugcaguacaaccucagccacgcguacgccguggacgccgccaaccacugcgggaccaucgcgaacggcguccugcagaccuucaugcggauggccuggggcggguccuacaucgcccuggacagcggcaagggguccugggacugcaucaugaccagcuaccaguaccucaucauccagaacacgaccugggaggaccacugccaguucucccgccccagccccaucggcuaccuggggcugcucagccagcggacccgcgacaucuacaucucccggcgccugcugggcaccuucacguggacccucagcgacuccgagggcaacgagacccccgggggcuacugccugacccgguggaugcugaucgaggccgagcucaagugcuucgggaacacggccguggcgaagugcaacgagaagcacgacgaggaguucugcgacaugcugcgccuguucgacuucugcaagcaggccauccggcgccucaaggccccggcccagaugagcauccagcugaucaacaaggccgugaacgcgcugaucaacgaccagcucaucaugaagaaccaccuccgggacaucaugggcauccccuacugcaacuacuccaaguacugcuaccugaaccacaccgucaccgggaagaccagccugccccgcugcugccugguguccaacggcagcuaccugaacgagacgcacuucuccgacgacaucgagcagcaggccgacaacaugaucaccgagcuccugcagaaggaguacaucgaccggcagggcaagaccccgcuggggcugguggaccucuucgucuucagcaccuccuucuaccugaucagcaucuuccugcaccucgugaagauccccacgcaccgccacgugaucggcaagcccugccccaagccgcaccggcugaaccacauggggaucugcuccugcggccuguacaagcaccccgggguccccgugaaguggaagcgcugaggacuaguaauaaggaaacuguaugaaugucugugggcaggaagugaagagauccuucuguaaagguuuuuggaauuaugucugcugaauaauaaacuuuuuugaaauaauaaaucugguagaaaaaugagaucuaaaaaaaaaaaaaaaaaaaaaaaaaaaaaaaaaaaaaaaaaaaaaaaaaaaaaaaaaaaaaaaaaaaaaaaaaaaaaaaaaaaaaaaaaaaaaaaaaaaa

SEQ ID NO: 34357 - RNA, 1785 nt, Artificial Sequence
  mRNA product Design b-4 (A100) comprising derived and/or modified sequence from LASV(LASV1000-NIG-2009;Clade II)__AIT17782__GPCmut8 (opt1)
aggagagucccgcagucggcguccagcggcucugcuuguucgugugugugucguugcaggccuuauucaagcuuaccaugggccagaucaucaccuucuuccaggaggugccccacgucaucgaggaggugaugaacaucgugcugaucgcccucagccugcuggccauccucaaggggaucuacaacgucgcgaccugcggccuguucgggcugguguccuuccuccugcugugcggccgcagcugcuccacgaccuacaaggggguguacgagcuccagacccuggagcuggacauggccagccucaacaugugcaugccgcuguccugcaccaagaacaacagccaccacuacaucauggucggcaacgagacgggccuggagcucacccugaccaacaccuccaucaucaaccacaaguucugcaaccugagcgacgcccacaagaagaaccucuacgaccacgcccugauguccaucaucagcacguuccaccuguccauccccaacuucaaccaguacgaggccaugagcugcgacuucaacgggggcaagaucuccgugcaguacaaccucagccacaccuacgcgguggacgccgccaaccacugcgggaccaucgccaacggcguccugcagaccuucaugcggauggcguggggcggguccuacaucgcccuggacagcggcaagggguccugggacugcaucaugacgagcuaccaguaccucaucauccagaacaccaccugggaggaccacugccaguucucccgccccagccccaucggcuaccuggggcugcucagccagcggacccgcgacaucuacaucucccggcgccugcugggcacguucaccuggacccucagcgacuccgagggcaacgagacccccgggggcuacugccugacgcgguggaugcugaucgaggccgagcucaagugcuucgggaacaccgccguggccaagugcaacgagaagcacgacgaggaguucugcgacaugcugcgccuguucgacuucugcaagcaggcgaucaagcggcucaagaccccggcccagaugagcauccagcugaucaacaaggccgugaacgcccugaucaacgaccagcucaucaugaagaaccaccuccgcgacaucaugggcauccccuacugcaacuacuccaaguacugcuaccugaaccacaccgucacggggaagaccagccugccccggugcugccugguguccaacggcagcuaccugaacgagacccacuucuccgacgacaucgagcagcaggccgacaacaugaucaccgagcuccugcagaaggaguacaucgaccgccagggcaagacgccgcuggggcugguggaccucuucgucuucagcaccuccuucuaccugaucagcaucuuccugcaccucgugaagauccccacccaccggcacguggucggcaagcccugccccaagccgcaccgccugaaccacauggggaucugcuccugcggccuguacaagcaccccggggugcccgugaaguggaagcggugaggacuaguaauaaggaaacuguaugaaugucugugggcaggaagugaagagauccuucuguaaagguuuuuggaauuaugucugcugaauaauaaacuuuuuugaaauaauaaaucugguagaaaaaugagaucuaaaaaaaaaaaaaaaaaaaaaaaaaaaaaaaaaaaaaaaaaaaaaaaaaaaaaaaaaaaaaaaaaaaaaaaaaaaaaaaaaaaaaaaaaaaaaaaaaaaa

SEQ ID NO: 34358 - RNA, 1785 nt, Artificial Sequence
  mRNA product Design b-4 (A100) comprising derived and/or modified sequence from LASV(LASV221-NIG-2010;Clade II)__AIT17624__GPCmut8 (opt1)
aggagagucccgcagucggcguccagcggcucugcuuguucgugugugugucguugcaggccuuauucaagcuuaccaugggccagaucaucaccuucuuccaggaggugccccacgucaucgaggaggugaugaacaucgugcugaucgcccucagccugcuggccauccucaaggggaucuacaacgucgcgaccugcggccuguucgggcugguguccuuccuccugcugugcggccgcagcugcuccacgaccuacaaggggguguacgagcuccagacccuggagcuggacauggccagccucaacaugugcaugccgcuguccugcaccaagaacaacagccaccacuacaucauggucggcaacgagacgggccuggagcucacccugaccaacaccuccaucaucaaccacaaguucugcaaccugagcgacgcccacaagaagaaccucuacgaccacgcccugauguccaucaucagcacguuccaccuguccauccccaacuucaaccaguacgaggccaugagcugcgacuucaacgggggcaagaucuccgugcaguacaaccucagccacaccuacgcgaucgacgccgccaaccacugcgggaccaucgccaacggcgugcugcagaccuucaugcggauggcguggggcggguccuacaucgcccuggacagcggcaagggguccugggacugcaucaugacgagcuaccaguaccucaucauccagaacaccaccugggaggaccacugccaguucucccgccccagccccaucggcuaccuggggcugcucagccagcggacccgcgacaucuacaucucccggcgccugcugggcacguucaccuggacccucagcgacuccgagggcaacgagacccccgggggcuacugccugacgcgguggaugcugaucgaggccgagcucaagugcuucgggaacaccgccgucgccaagugcaacgagaagcacgacgaggaguucugcgacaugcugcgccuguucgacuucugcaagcaggcgauccggcgccucaagaccccggcccagaugagcauccagcugaucaacaaggccgugaacgcccugaucaacgaccagcucaucaugaagaaccaccuccgggacaucaugggcauccccuacugcaacuacuccaaguacugcuaccugaaccacaccgugacggggaagaccagccugccccgcugcugccuggucuccaacggcagcuaccugaacgagacccacuucuccgacgacaucgagcagcaggccgacaacaugaucaccgagaugcuccagaaggaguacauggaccggcagggcaagacgccgcuggggcugguggaccuguucguguucagcaccuccuucuaccucaucagcaucuuccugcaccuggucaagauccccacccaccgccacgugaucggcaagcccugccccaagccgcaccggcucaaccacauggggaucugcuccugcggccuguacaagcaccccggggugcccgucaaguggaagcgcugaggacuaguaauaaggaaacuguaugaaugucugugggcaggaagugaagagauccuucuguaaagguuuuuggaauuaugucugcugaauaauaaacuuuuuugaaauaauaaaucugguagaaaaaugagaucuaaaaaaaaaaaaaaaaaaaaaaaaaaaaaaaaaaaaaaaaaaaaaaaaaaaaaaaaaaaaaaaaaaaaaaaaaaaaaaaaaaaaaaaaaaaaaaaaaaaa

SEQ ID NO: 34359 - RNA, 1785 nt, Artificial Sequence
  mRNA product Design b-4 (A100) comprising derived and/or modified sequence from LASV(LASV237-NIG-2010;Clade II)__AIT17638__GPCmut8 (opt1)
aggagagucccgcagucggcguccagcggcucugcuuguucgugugugugucguugcaggccuuauucaagcuuaccaugggccagaucaucaccuucuuccaggaggugccccacgucaucgaggaggugaugaacaucgugcugaucgcccucagccugcuggccauccucaaggggaucuacaacgucgcgaccugcggccuguucgggcugguguccuuccuccugcugugcggccgcagcugcuccacgaccuacaaggggguguacgagcuccagacccuggagcuggacauggccagccucaacaugugcaugccgcuguccugcaccaagaacaacagccaccacuacaucauggucggcaacgagacgggccuggagcucacccugaccaacaccuccaucaucaaccacaaguucugcaaccugagcgacgcccacaagaaggaccucuacgaccacgcccugauguccaucaucagcacguuccaccuguccauccccaacuucaaccaguacgaggccaugagcugcgacuucaacgggggcaagaucuccgugcaguacaaccucagccacaccuacgcgguggacgccgccaaccacugcgggaccaucgccaacggcguccugcagaccuucaugcggauggcguggggcggguccuacaucgcccuggacagcggcaagggguccugggacugcaucaugacgagcuaccaguaccucaucauccagaacaccaccugggaggaccacugccaguucucccgccccagccccaucggcuaccuggggcugcucagccagcggacccgcgacaucuacaucucccggcgccugcugggcacguucaccuggacccucagcgacuccgagggcaacgagacccccgggggcuacugccugacgcgguggaugcugaucgaggccgagcucaagugcuucgggaacaccgccguggccaagugcaacgagaagcacgacgaggaguucugcgacaugcugcgccuguucgacuucugcaagcaggcgauccggcgccucaagaccccggcccagaugagcauccagcugaucaacaaggccgugaacgcccugaucaacgaccagcucaucaugaagaaccaccuccgggacaucaugggcauccccuacugcaacuacuccaaguacugcuaccugaaccacaccgucacggggaagaccagccugccccgcugcugccugguguccaacggcagcuaccugaacgagacccacuucuccgacgacaucgagcagcaggccgacaacaugaucaccgagcuccugcagaaggaguacauggaccggcagggcaagacgccgcuggggcugguggaccucuucgucuucagcaccuccuucuaccugaucagcaucuuccugcaccucaucaagauccccacccaccgccacaucaccggcaagcccugccccaagccgcaccggcugaaccacauggggaucugcuccugcggccuguacaagcaccccggggugcccgugaaguggaagcgcugaggacuaguaauaaggaaacuguaugaaugucugugggcaggaagugaagagauccuucuguaaagguuuuuggaauuaugucugcugaauaauaaacuuuuuugaaauaauaaaucugguagaaaaaugagaucuaaaaaaaaaaaaaaaaaaaaaaaaaaaaaaaaaaaaaaaaaaaaaaaaaaaaaaaaaaaaaaaaaaaaaaaaaaaaaaaaaaaaaaaaaaaaaaaaaaaa

SEQ ID NO: 34360 - RNA, 1785 nt, Artificial Sequence
  mRNA product Design b-4 (A100) comprising derived and/or modified sequence from LASV(LASV253-NIG-2011;Clade II)__AIT17670__GPCmut8 (opt1)
aggagagucccgcagucggcguccagcggcucugcuuguucgugugugugucguugcaggccuuauucaagcuuaccaugggccagaucaucaccuucuuccaggaggugccccacgucaucgaggaggugaugaacaucgugcugaucgcccucagccugcuggccauccucaaggggaucuacaacgucgcgaccugcggccuguucgggcugguguccuuccuccugcugugcggccgcagcugcuccacgaccuacaaggggguguacgagcuccagacccuggagcuggacauggccagccucaacaugugcaugccgcuguccugcaccaagaacaacagccaccacuacaucauggucggcaacgagacgggccuggagcucacccugaccaacaccuccaucaucaaccacaaguucugcaaccugagcgacgcccacaagaagaaccucuacgaccacgcccugauguccaucaucagcacguuccaccuguccauccccaacuucaaccaguacgaggccaugagcugcgacuucaacgggggcaagaucuccgugcaguacaaccucagccacaccuacgcgguggacgccgccaaccacugcgggaccaucgccaacggcguccugcagaccuucaugcggauggcguggggcggguccuacaucgcccuggacagcggcaagggguccugggacugcaucaugacgagcuaccaguaccucaucauccagaacaccaccugggaggaccacugccaguucucccgccccagccccaucggcuaccuggggcugcucagccagcggacccgcgacaucuacaucucccggcgccugcugggcacguucaccuggacccucagcgacuccgagggcaacgagacccccgggggcuacugccugacgcgguggaugcugaucgaggccgagcucaagugcuucgggaacaccgccguggccaagugcaacgagaagcacgacgaggaguucugcgacaugcugcgccuguucgacuucugcaagcaggcgauccggcgccucaaggccccggcccagaugagcauccagcugaucaacaaggccgugaacgcccugaucaacgaccagcucaucaugaagaaccaccuccgggacaucaugggcauccccuacugcaacuacuccaaguacugcuaccugaaccacaccgucaccgggcgcacgagccugccccggugcugccugguguccaacggcagcuaccugaacgagacccacuucuccgacgacaucgagcagcaggcggacaacaugaucaccgagcuccugcagaaggaguacaucgaccgccagggcaagaccccgcuggggcugguggaccucuucgucuucagcacguccuucuaccugaucagcaucuuccugcaccucgugaagauccccacccaccggcacaucaucggcaagcccugccccaagccgcaccgccugaaccacauggggaucugcuccugcggccuguacaagcaccccggggugcccgucaaguggaagcggugaggacuaguaauaaggaaacuguaugaaugucugugggcaggaagugaagagauccuucuguaaagguuuuuggaauuaugucugcugaauaauaaacuuuuuugaaauaauaaaucugguagaaaaaugagaucuaaaaaaaaaaaaaaaaaaaaaaaaaaaaaaaaaaaaaaaaaaaaaaaaaaaaaaaaaaaaaaaaaaaaaaaaaaaaaaaaaaaaaaaaaaaaaaaaaaaa

SEQ ID NO: 34361 - RNA, 1785 nt, Artificial Sequence
  mRNA product Design b-4 (A100) comprising derived and/or modified sequence from LASV(LASV254-NIG-2011;Clade II)__AIT17674__GPCmut8 (opt1)
aggagagucccgcagucggcguccagcggcucugcuuguucgugugugugucguugcaggccuuauucaagcuuaccaugggccagaucaucaccuucuuccaggaggugccccacgucaucgaggaggugaugaacaucgugcugaucgcccucagccugcuggccauccucaaggggaucuacaacgucgcgaccugcggccuguucgggcugguguccuuccuccugcugugcggccgcagcugcuccacgaccuacaaggggguguacgagcuccagacccuggagcuggacaugaccaaccucaacaugugcaugccgcugagcugcacgaagaacaacucccaccacuacaucauggucggcaacgagaccggccuggagcucacccugaccaacacgagcaucaucaaccacaaguucugcaaccuguccgacgcccacaagaagaaccucuacaaccacgcccugaugagcaucaucuccaccuuccaccugagcauccccaacuucaaccaguacgaggccauguccugcgacuucaacgggggcaagaucagcgugcaguacaaccucucccacagcuacgccguggacgcggccaaccacugcgggaccaucgccaacggcguccugcagaccuucaugcggauggccuggggcggguccuacaucgcgcuggacagcggcaaggggaacugggacugcaucaugacguccuaccaguaccucaucauccagaacaccaccugggaggaccacugccaguucagccgccccucccccaucggcuaccuggggcugcucagccagcggacccgcgacaucuacaucagccggcgccugcugggcacguucaccuggacccucuccgacagcgagggcaacgagacccccgggggcuacugccugacgcgguggaugcugaucgaggccgagcucaagugcuucgggaacaccgccguggccaagugcaacgagaagcacgacgaggaguucugcgacaugcugcgccuguucgacuucugcaagcaggccauccggcgccucaagaccccggcgcaggccaacauccagcugaucaacaaggccgugaacgcccugaucaacgaccagcucaucaugaagaaccaccuccgggacaucaugggcauccccuacugcaacuacuccaaguacugcuaccugaaccacaccgucacggggaagaccagccugccccgcugcugccugguguccaacggcagcuaccugaacgagacccacuucuccgacgacaucgagcagcaggccgacaacaugaucaccgagcuccugcagaaggaguacauggaccggcagggcaagacgccgcuggggcugguggaccucuucgucuucagcaccuccuucuaccugaucagcaucuuccugcaccucgugaagauccccacccaccgccacgugaucggcaagcccugccccaagccgcaccggcugaaccacauggggaucugcuccugcggccuguacaagcaccccgggguccccgugaaguggaagcgcugaggacuaguaauaaggaaacuguaugaaugucugugggcaggaagugaagagauccuucuguaaagguuuuuggaauuaugucugcugaauaauaaacuuuuuugaaauaauaaaucugguagaaaaaugagaucuaaaaaaaaaaaaaaaaaaaaaaaaaaaaaaaaaaaaaaaaaaaaaaaaaaaaaaaaaaaaaaaaaaaaaaaaaaaaaaaaaaaaaaaaaaaaaaaaaaaa

SEQ ID NO: 34362 - RNA, 1785 nt, Artificial Sequence
  mRNA product Design b-4 (A100) comprising derived and/or modified sequence from LASV(Nig08-A19;Clade III)__ADU56618__GPCmut8 (opt1)
aggagagucccgcagucggcguccagcggcucugcuuguucgugugugugucguugcaggccuuauucaagcuuaccaugggccagaucgugaccuucuuccaggaggucccccacgugaucgaggaggugaugaacaucguccugaucgcccucagcauccuggccauccugaaggggcucuacaacaucgcgaccugcggccugaucgggcuggugacguuccuccugcuguccggccgcagcugcuccaugaccuacaaggggguguacgagcuccagacccuggagcugaacaugaacacccucaacaugugcaugccgcugagcugcacgaagaacaacucccaccacuacaucauggucggcaacgagaccggccuggagcucacccugaccaacacgagccugcuccaccacaaguucugcaaccuguccgacgcccacaagaagaaccuguacgaccacacccucaugagcaucaucuccaccuuccaccugagcauccccaacuucaaccaguacgaggccauguccugcgacuucaacgggggcaagaucaccgugcaguacaaccugagccacuccuacgccaucgacgccgcgaaccacugcgggacgguggccaacggcguccuccagaccuucaugcggauggccuggggcgggagcuacaucgcccuggacuccggccgcgggaagugggacugcaucaugaccagcuaccaguaccugaucauccagaacaccacgugggaggaccacugccaguucucccggcccagccccaucggcuaccucgggcugcugucccagcgcacccgggacaucuacaucagccgccggcuccugggcaccuucaccuggacgcugagcgacuccgagggcaacgagacccccgggggcuacugccucacccgcuggaugcugaucgaggcggagcugaagugcuucgggaacaccgccguggccaagugcaacgagaagcacgacgaggaguucugcgacaugcuccggcuguucgacuucugcaagcaggccauccgccggcugaaggccccggcgcagaugagcauccagcucaucaacaaggccgugaacgcccugaucaacgaccagcugaucaugaagaaccaccuccgcgacaucaugggcauccccuacugcaacuacuccaaguacugcuaccugaaccacacgagcaccgggcggaccucccugccccgcugcugccucgucagcaacggcuccuaccugaacgagacccacuucagcgacgacaucgagcagcaggccgacaacaugaucacggagaugcugcagaaggaguaccuggaccggcagggcaagaccccgcucgggcugguggaccuguucguguucuccaccagcuucuaccucaucuccaucuuccugcaccuggucaagauccccacccaccgccacaucgugggcaagcccugccccaagccgcaccggcucaaccacauggggaucugcagcugcggccuguacaagcagcccggggugcccguccgcuggaagcggugaggacuaguaauaaggaaacuguaugaaugucugugggcaggaagugaagagauccuucuguaaagguuuuuggaauuaugucugcugaauaauaaacuuuuuugaaauaauaaaucugguagaaaaaugagaucuaaaaaaaaaaaaaaaaaaaaaaaaaaaaaaaaaaaaaaaaaaaaaaaaaaaaaaaaaaaaaaaaaaaaaaaaaaaaaaaaaaaaaaaaaaaaaaaaaaaa

SEQ ID NO: 34363 - RNA, 1788 nt, Artificial Sequence
  mRNA product Design b-4 (A100) comprising derived and/or modified sequence from LASV(G1180-SLE-2010;Clade IV)__AIT17168__GPCmut8 (opt1)
aggagagucccgcagucggcguccagcggcucugcuuguucgugugugugucguugcaggccuuauucaagcuuaccaugggccagaucgugaccuucuuccaggaggucccccacgugaucgaggaggugaugaacaucguccugaucgcccucagcauccuggccgugcugaaggggcucuacaacuucgcgaccugcggccugguggggcugcucacguuccugcugcucugcggccgcuccugcaccgccagccgguacaagggggucuacgagcugcagacccuggagcucaacauggagacccugaacaugugcaugccgcuguccugcacgaagaacaacagccaccacuacaucauggugggcaacgagaccggccucgagcugacccugaccaacacguccaucaucaaccacaaguucugcaaccucagcgacgcccacaagaagaaccuguacgaccacgcccugauguccaucaucagcaccuuccaccucuccauccccaacuucaaccaguacgaggccaugagcugcgacuucaacgggggcaagaucuccgugcaguacaaccugagccacuccuacgcgggggacgccgccaaccacugcggcaccgucgccaacggggugcugcagaccuucaugcgcauggcguggggcggcagcuacaucgcccucgacuccgggcacggcagcugggacugcaucaugacguccuaccaguaccugaucauccagaacaccaccugggaggaccacugccaguucagccggcccucccccaucggguaccugggccuccugagccagcgcacccgggacaucuacaucagccgccggcugcucggcacguucaccuggacccuguccgacagcgaggggaaggacaccccgggcggguacugccugacgcgcuggaugcucaucgaggccgagcugaagugcuucggcaacaccgccguggccaagugcaacgagaagcacgacgaggaguucugcgacaugcugcggcuguucgacuucugcaagcaggcgauccagcgccugaaggcccccgcccagauguccauccagcugaucaacaaggccgucaacgcccucaucaacgaccagcugaucaugaagaaccaccuccgggacaucauggggauccccuacugcaacuacagcaaguacugcuaccucaaccacaccaccacgggcaagaccucccugcccaagugcugccuggugagcaacggcuccuaccucaacgagacccacuucagcgacgacaucgagcagcaggcggacaacaugaucaccgagaugcugcagaaggaguacauggagcgccaggggaagacgccgcugggccugguggaccucuucgucuucuccaccagcuucuaccugaucuccaucuuccugcaccucgugaagauccccacccaccggcacaucgugggcaagagcugccccaagccccaccgccugaaccacauggggaucugcuccugcgggcuguacaagcagccgggcguccccgugaaguggaagcggugaggacuaguaauaaggaaacuguaugaaugucugugggcaggaagugaagagauccuucuguaaagguuuuuggaauuaugucugcugaauaauaaacuuuuuugaaauaauaaaucugguagaaaaaugagaucuaaaaaaaaaaaaaaaaaaaaaaaaaaaaaaaaaaaaaaaaaaaaaaaaaaaaaaaaaaaaaaaaaaaaaaaaaaaaaaaaaaaaaaaaaaaaaaaaaaaa

SEQ ID NO: 34364 - RNA, 1788 nt, Artificial Sequence
  mRNA product Design b-4 (A100) comprising derived and/or modified sequence from LASV(G1442-SLE-2011;Clade IV)__AIT17180__GPCmut8 (opt1)
aggagagucccgcagucggcguccagcggcucugcuuguucgugugugugucguugcaggccuuauucaagcuuaccaugggccagaucgugaccuucuuccaggaggucccccacgugaucgaggaggugaugaacaucguccugaucgcccucagcauccuggccgugcugaaggggcucuacaacguggcgaccugcggccugaucgggcuggucacguuccuccugcugugcggccgcuccugcaccaccacccucuacaaggggguguacgagcugcagacgcuggagcucaacauggagacccugaacaugugcaugccgcugagcugcaccaagaacaacucccaccacuacauccgggugggcaacgagaccggccucgagcugacgcugaccaacaccagcaucaucaaccacaaguucugcaaccucuccgacgcccacaagaagaaccuguacgaccacgcccugaugagcaucaucuccaccuuccaccucagcauccccaacuucaaccaguacgaggccauguccugcgacuucaacgggggcaagaucagcguccaguacaaccugucccacagcuacgccggggacgcggccaaccacugcggcacgguggccaacggggugcugcagaccuucaugcgcauggccuggggcggcuccuacaucgcgcucgacagcgggcggggcaacugggacugcaucaugaccuccuaccaguaccugaucauccagaacaccacgugggacgaccacugccaguucagccgccccucccccaucggguaccugggccuccugagccagcggacccgcgacgucuacaucucccggcgccugcucggcaccuucaccuggacgcugagcgacagcgaggggaaggacaccccgggcggguacugccugacccgguggaugcucaucgaggccgagcugaagugcuucggcaacaccgccguggccaagugcaacgagaagcacgacgaggaguucugcgacaugcugcgccucuucgacuucugcaagcaggccauccagcggcugaaggcgcccgcccagauguccauccagcugaucaacaaggccgugaacgcccucaucaacgaccagcugaucaugaagaaccaccuccgcgacaucauggggauccccuacugcaacuacagcaaguacugcuaccugaacaacacggccaccggcaagaccucccugcccaagugcugccugaucagcaacggcuccuaccucaacgagacccacuucagcgacgacaucgagcaggaggcggacaacaugaucacggagaugcugcagaaggaguacauggagcggcaggggaagaccccgcugggccuggucgaccucuucguguucuccaccagcuucuaccugaucuccaucuuccugcaccucgugaagauccccacccaccgccacaucgucggcaagagcugccccaagccccaccggcugaaccacauggggaucugcuccugcgggcuguacaagcagccgggcgugcccgugcgcuggaagcggugaggacuaguaauaaggaaacuguaugaaugucugugggcaggaagugaagagauccuucuguaaagguuuuuggaauuaugucugcugaauaauaaacuuuuuugaaauaauaaaucugguagaaaaaugagaucuaaaaaaaaaaaaaaaaaaaaaaaaaaaaaaaaaaaaaaaaaaaaaaaaaaaaaaaaaaaaaaaaaaaaaaaaaaaaaaaaaaaaaaaaaaaaaaaaaaaa

SEQ ID NO: 34365 - RNA, 1788 nt, Artificial Sequence
  mRNA product Design b-4 (A100) comprising derived and/or modified sequence from LASV(G3010-SLE-2013;Clade IV)__AIT17344__GPCmut8 (opt1)
aggagagucccgcagucggcguccagcggcucugcuuguucgugugugugucguugcaggccuuauucaagcuuaccaugggccagaucgugaccuucuuccaggaggucccccacgugaucgaggaggugaugaacaucguccugaucgcccucagcauccuggccgugcugaaggggcucuacaacuucgcgaccugcggccugguggggcuggucacguuccuccugcugugcggccgcuccugcaccaccagccucuacaaggggguguacgagcugcagacccuggagcucaacauggagacgcugaacaugugcaugccgcuguccugcaccaagaacaacagccaccacuacaucauggugggcaacgagaccggccucgagcugacccugacgaacaccuccaucaucaaccacaaguucugcaaccucagcgacgcccacaagaagaaccuguacaaccacgcccugauguccaucaucagcaccuuccaccucuccauccccaacuucaaccaguacgaggccaugagcugcgacuucaacgggggcaagaucuccguccaguacaaccugagccacuccuacgccggggacgcggccagccacugcggcaccguggccaacggggugcugcagacguucaugcggauggccuggggcggcuccuacaucgcgcucgacagcggguacggcaagugggacugcaucaugaccuccuaccaguaccugaucauccagaacaccaccugggaggaccacugccaguucagccgccccucccccaucggguaccugggccuccugagccagcggacgcgcgacaucuacaucagccggcgccugcucggcaccuucaccuggacccuguccgacagcgaggggaaggacacgccgggcggguacugccugacccgguggaugcucaucgaggccgagcugaagugcuucggcaacaccgccgucgccaagugcaacgagaagcacgacgaggaguucugcgacaugcugcgccucuucgacuucugcaagcaggccauccagcggcugaagacccccgcgcagauguccauccagcugaucaacaaggccgugaacgcccucaucaacgaccagcugaucaugaagaaccaccuccgcgacaucauggggauccccuacugcaacuacagcaaguacugcuaccugaaccacacgaccaccggcaagaccucccugcccaagugcugccuggugagcaacggcuccuaccucaacgagacgcacuucagcgacgacaucgagcagcaggccgacaacaugaucaccgagaugcugcagaaggaguacauggagcggcaggggaagaccccgcugggccuggucgaccucuucguguucuccaccagcuucuaccugaucuccaucuuccugcaccucgugaagauccccacgcaccgccacaucgucggcaagagcugccccaagccccaccggcugaaccacauggggaucugcuccugcgggcuguacaagcagccgggcgugcccgugcgcuggaagcggugaggacuaguaauaaggaaacuguaugaaugucugugggcaggaagugaagagauccuucuguaaagguuuuuggaauuaugucugcugaauaauaaacuuuuuugaaauaauaaaucugguagaaaaaugagaucuaaaaaaaaaaaaaaaaaaaaaaaaaaaaaaaaaaaaaaaaaaaaaaaaaaaaaaaaaaaaaaaaaaaaaaaaaaaaaaaaaaaaaaaaaaaaaaaaaaaa

SEQ ID NO: 34366 - RNA, 1788 nt, Artificial Sequence
  mRNA product Design b-4 (A100) comprising derived and/or modified sequence from LASV(G502-SLE-2009;Clade IV)__AIT17126__GPCmut8 (opt1)
aggagagucccgcagucggcguccagcggcucugcuuguucgugugugugucguugcaggccuuauucaagcuuaccaugggccagaucgugaccuucuuccaggaggucccccacgugaucgaggaggugaugaacaucguccugaucgcccucagcauccuggccgugcugaaggggcucuacaacuucgcgaccugcggccugguggggcugcucacguuccugcugcucugcggccgcuccugcaccaccgggcuguacaagggcgucuacgagcugcagacccucgagcugaacauggagacgcugaacaugugcaugccgcucagcugcaccaagaacaacucccaccacuacaucauggugggcaacgagaccgggcuggagcugacccucacgaacaccagcaucaucaaccacaaguucugcaaccuguccgacgcccacaagaagaaccuguacgaccacgcccucaugagcaucaucuccaccuuccaccugagcauccccaacuucaaccaguacgaggccauguccugcgacuucaacggcgggaagaucagcgugcaguacaaccugucccacagcuacgccggcgacgcggccgaccacugcgggaccgucgccaacggcgugcuccagacguucaugcggauggccuggggcggguccuacaucgcgcuggacagcggccgcgggcggugggacugcaucaugaccuccuaccaguaccugaucauccagaacaccaccugggaggaccacugccaguucagccgccccucccccaucggcuaccucggccugcugagccagcggacgcgcgacaucuacaucucccggcgccuccuggggaccuucaccuggacccugagcgacagcgagggcaaggacacgcccgggggcuacugccucacccgguggaugcugaucgaggccgagcugaagugcuucgggaacaccgccguggccaagugcaacgagaagcacgacgaggaguucugcgacaugcuccgccuguucgacuucugcaagcaggccauccagcggcugaaggcgccggcccagauguccauccagcucaucaacaaggccgucaacgcccugaucaacgaccagcuggugaugaagaaccaccuccgcgacaucaugggcauccccuacugcaacuacagccgguacugcuaccugaaccacaccacgaccggccgcaccucccugcccaagugcugccucgugagcaacggguccuaccugaacgagacccacuucagcgacgacaucgagcagcaggccgacaacaugaucacggagaugcugcagaaggaguacauggagcggcagggcaagaccccgcuggggcucgucgaccuguucguguucuccaccagcuucuaccugaucuccaucuuccuccaccuggugaagauccccacccaccgccacaucgucggcaagagcugccccaagccccaccggcugaaccacauggggaucugcuccugcggccucuacaagcagccgggcgugcccgugaaguggaagcgcugaggacuaguaauaaggaaacuguaugaaugucugugggcaggaagugaagagauccuucuguaaagguuuuuggaauuaugucugcugaauaauaaacuuuuuugaaauaauaaaucugguagaaaaaugagaucuaaaaaaaaaaaaaaaaaaaaaaaaaaaaaaaaaaaaaaaaaaaaaaaaaaaaaaaaaaaaaaaaaaaaaaaaaaaaaaaaaaaaaaaaaaaaaaaaaaaa

SEQ ID NO: 34367 - RNA, 1788 nt, Artificial Sequence
  mRNA product Design b-4 (A100) comprising derived and/or modified sequence from LASV(G733-SLE-2010;Clade IV)__AIT17154__GPCmut8 (opt1)
aggagagucccgcagucggcguccagcggcucugcuuguucgugugugugucguugcaggccuuauucaagcuuaccaugggccagaucgugaccuucuuccaggaggucccccacgugaucgaggaggugaugaacaucguccugaucgcccucagcauccuggccgugcugaaggggcucuacaacuucgcgaccugcggcaucguggggcuggucuccuuccugcuccugugcggccgcagcugcacgaccucccuguacaaggggguguacgagcuccagacccuggagcugaacauggagacccucaacaugugcaugccgcugagcugcacgaagaacaacucccaccacuacaucauggugggcaacgagaccggccuggagcucacccugaccaacacgagcaucaucaaccacaaguucugcaaccuguccgacgcccacaagaagaaccucuacgaccacgcccugaugagcaucaucuccaccuuccaccugagcauccccaacuucaaccaguacgaggccauguccugcgacuucaacgggggcaagaucagcguccaguacaaccucucccacagcuacgccggggacgcggccaaccacugcggcaccaucgccaacggggugcugcagaccuucaugcggauggccuggggcggcuccuacaucgcgcuggacagcgggcgcgaccggugggacugcaucaugacguccuaccaguaccucaucauccagaacaccaccugggaggaccacugccaguucagccgccccucccccaucggcuaccuggggcugcucagccagcggacccgcgacaucuacaucagccggcgccugcugggcacguucaccuggacccucuccgacagcgagggcaaggacacccccgggggcuacugccugacgcgguggaugcugaucgaggccgagcucaagugcuucgggaacaccgccguggccaagugcaacgagaagcacgacgaggaguucugcgacaugcugcgccuguucgacuucugcaagcaggccauccagcggcucaaggcgccggcccagauguccauccagcugaucaacaaggccgucaacgcccugaucaacgaccagcucaucaugaagaaccaccuccgcgacaucaugggcauccccuacugcaacuacagcaaguacugcuaccugaaccacaccaccacggggaagaccucccugcccaagugcugccuggugagcaacggcuccuaccugaacgagacccacuucagcgacgacaucgagcagcaggccgacaacaugaucaccgagaugcuccagaaggaguacauggagcggcagggcaagacgccgcuggggcugguggaccuguucgucuucuccaccagcuucuaccucaucuccaucuuccugcaccuggugaagauccccacccaccgccacguggucggcaagagcugccccaagccccaccggcucaaccacauggggaucugcuccugcggccuguacgggcagccgggcgugcccgugaaguggaagcgcugaggacuaguaauaaggaaacuguaugaaugucugugggcaggaagugaagagauccuucuguaaagguuuuuggaauuaugucugcugaauaauaaacuuuuuugaaauaauaaaucugguagaaaaaugagaucuaaaaaaaaaaaaaaaaaaaaaaaaaaaaaaaaaaaaaaaaaaaaaaaaaaaaaaaaaaaaaaaaaaaaaaaaaaaaaaaaaaaaaaaaaaaaaaaaaaaa

SEQ ID NO: 34368 - RNA, 1788 nt, Artificial Sequence
  mRNA product Design b-4 (A100) comprising derived and/or modified sequence from MOPV/LASV reassortant(IGS-1;Clade IV)__AFY05576__GPCmut8 (opt1)
aggagagucccgcagucggcguccagcggcucugcuuguucgugugugugucguugcaggccuuauucaagcuuaccaugggccagaucgugaccuucuuccaggaggucccccacgugaucgaggaggugaugaacaucguccugaucgcccucagcgugcuggccgugcugaaggggcucuacaacuucgcgaccugcggccuggucgggcuggugacguuccuccugcugugcggccgcuccugcaccaccagccucuacaaggggguguacgagcugcagacccuggagcucaacauggagacgcugaacaugugcaugccgcuguccugcaccaagaacaacagccaccacuacaucauggucggcaacgagaccggccucgagcugacccugacgaacaccuccaucaucaaccacaaguucugcaaccucagcgacgcccacaagaagaaccuguacgaccacgcccugauguccaucaucagcaccuuccaccucuccauccccaacuucaaccaguacgaggccaugagcugcgacuucaacgggggcaagaucuccgugcaguacaaccugagccacuccuacgccggggacgcggccaaccacugcggcaccguggccaacgggguccugcagacguucaugcggauggccuggggcggcagcuacaucgcgcucgacuccgggcgcggcaacugggacugcaucaugaccagcuaccaguaccugaucauccagaacaccaccugggaggaccacugccaguucucccggcccagccccaucggguaccugggccuccugucccagcgcacgcgggacaucuacaucagccgccggcugcucggcaccuucaccuggacccugagcgacuccgagggggaggacacgccgggcggguacugccugacccgcuggaugcucaucgaggccgagcugaagugcuucggcaacaccgccguggccaagugcaacgagaagcacgacgaggaguucugcgacaugcugcggcuguucgacuucugcaagcaggccauccagcgccugaaggcgcccgcccagaugagcauccagcugaucaacaaggccgugaacgcccucaucaacgaccagcugaucaugaagaaccaccuccgggacaucauggggauccccuacugcaacuacuccaaguacugcuaccucaaccacaccacgaccggccgcaccagccugcccaagugcugccuggucuccaacggcagcuaccucaacgagacccacuucuccgacgacaucgagcagcaggccgacaacaugaucacggagaugcugcagaaggaguacauggagcggcaggggaagaccccgcugggccugguggaccucuucguguucagcaccuccuucuaccugaucagcaucuuccugcaccucgucaagauccccacccaccgccacaucguggggaaguccugccccaagccccaccggcugaaccacaugggcaucugcagcugcgggcuguacaagcagccgggcgugcccgucaaguggaagcgcugaggacuaguaauaaggaaacuguaugaaugucugugggcaggaagugaagagauccuucuguaaagguuuuuggaauuaugucugcugaauaauaaacuuuuuugaaauaauaaaucugguagaaaaaugagaucuaaaaaaaaaaaaaaaaaaaaaaaaaaaaaaaaaaaaaaaaaaaaaaaaaaaaaaaaaaaaaaaaaaaaaaaaaaaaaaaaaaaaaaaaaaaaaaaaaaaa

SEQ ID NO: 34369 - RNA, 1788 nt, Artificial Sequence
  mRNA product Design b-4 (A100) comprising derived and/or modified sequence from LASV(LM765-SLE-2012;Clade IV)__AIT17814__GPCmut8 (opt1)
aggagagucccgcagucggcguccagcggcucugcuuguucgugugugugucguugcaggccuuauucaagcuuaccaugggccagaucgugaccuucuuccaggaggucccccacgugaucgaggaggugaugaacaucguccugaucgcccucagcauccuggccgugcugaaggggcucuacaacuucgcgaccugcggccugguggggcuggucacguuccuccugcugugcggccgcuccugcaccaccagccucuacaaggggguguacgagcugcagacccuggagcucaacauggagacgcugaacaugugcaugccgcuguccugcaccaagaacaacagccaccacuacaucauggugggcaacgagaccggccucgagcugacccugacgaacaccuccaucaucgaccacaaguucugcaaccucagcgacgcccaccggaagaaccuguacgaccacgcccugauguccaucaucagcaccuuccaccucuccauccccaacuucaaccaguacgaggccaugagcugcgacuucaacgggggcaagaucuccguccaguacaaccugagccacuccuacgccaaggacgcggccgaccacugcgggaccguggccaacggcgugcugcagacguucaugcgcauggccuggggcgggagcuacaucgcgcucgacuccggccgggggcgcugggacugcaucaugaccagcuaccaguaccugaucauccagaacaccaccugggaggaccacugccaguucucccggcccagccccaucggcuaccuggggcuccugucccagcgcacgcgggacaucuacaucagccgccggcugcucggcaccuucaccuggacccugagcgacuccgagggcaaggacacgcccgggggcuacugccugacccgcuggaugcucaucgaggccgagcugaagugcuucgggaacaccgccgucgccaagugcaacgagaagcacgacgaggaguucugcgacaugcugcggcuguucgacuucugcaagcaggccauccagcgccugaaggcgccggcccagaugagcauccagcugaucaacaaggccgugaacgcccucaucaacgaccagcugaucaugaagaaccaccuccgggacaucaugggcauccccuacugcaacuacuccaaguacugcuaccucaaccacaccacgaccgggaagaccagccugcccaagugcugccugguguccaacggcagcuaccucaacgagacccacuucuccgacgacaucgagcagcaggccgacaacaugaucacggagaugcugcagaaggaguacauggagcgccagggcaagaccccgcuggggcuggucgaccucuucguguucagcaccuccuucuaccugaucagcaucuuccugcaccucgugaagauccccacccaccggcacaucgucggcaagcccugccccaagccgcaccgccugaaccacauggggaucugcuccugcggccuguacaagcagcccggggugcccgugaaguggaagcggugaggacuaguaauaaggaaacuguaugaaugucugugggcaggaagugaagagauccuucuguaaagguuuuuggaauuaugucugcugaauaauaaacuuuuuugaaauaauaaaucugguagaaaaaugagaucuaaaaaaaaaaaaaaaaaaaaaaaaaaaaaaaaaaaaaaaaaaaaaaaaaaaaaaaaaaaaaaaaaaaaaaaaaaaaaaaaaaaaaaaaaaaaaaaaaaaa

SEQ ID NO: 34370 - RNA, 1788 nt, Artificial Sequence
  mRNA product Design b-4 (A100) comprising derived and/or modified sequence from LASV(LM776-SLE-2012;Clade IV)__AIT17824__GPCmut8 (opt1)
aggagagucccgcagucggcguccagcggcucugcuuguucgugugugugucguugcaggccuuauucaagcuuaccaugggccagaucgugaccuucuuccaggaggucccccacgugaucgaggaggugaugaacaucguccugaucgcccucagcauccuggccgugcugaaggggcucuacaacuucgcgaccugcggccugguggggcuggucacguuccuccugcugugcggccgcuccugcaccaccagcguguacaaggggguguacgagcuccagacccuggagcugaacauggagacgcucaacaugugcaugccgcuguccugcaccaagaacaacagccaccacuacaucauggucggcaacgagaccggccuggagcucacccugacgaacaccuccaucaucaaccacaaguucugcaaccugagcgacgcccacaagaagaaccucuacgaccacgcccugauguccaucaucagcaccuuccaccuguccauccccaacuucaaccaguacgaggccaugagcugcgacuucaacgggggcaagaucuccgugcaguacaaccucagccacuccuacgccggggacgcggccaaccacugcggcaccguggccaacgggguccugcagacguucaugcggauggccuggggcggcagcuacaucgcgcuggacuccgggcacggcaagugggacugcaucaugaccagcuaccaguaccucaucauccagaacaccaccugggaggaccacugccaguucucccgccccagccccaucggguaccugggccugcucucccagcggacgcgcgacaucuacaucagccggcgccugcugggcaccuucaccuggacccucagcgacuccgaggggaaggacacgccgggcggguacugccugacccgguggaugcugaucgaggccgagcucaagugcuucggcaacaccgccguggccaagugcaacgagaagcacgacgaggaguucugcgacaugcugcgccuguucgacuucugcaagcaggccauccagcggcucaaggcgcccgcccagaugagcauccagcugaucaacaaggccgugaacgcccugaucaacgaccagcucaucaugaagaaccaccuccgcgacaucauggggauccccuacugcaacuacuccaaguacugcuaccugaaccacaccacgaccggcaagaccagccugcccaagugcugccuggucuccaacggcagcuaccugaacgagacccacuucuccgacgacaucgagcagcaggccgacaacaugaucacggagaugcuccagaaggaguacauggagcggcaggggaagaccccgcugggccugguggaccuguucguguucagcaccuccuucuaccucaucagcaucuuccugcaccuggucaagauccccacccaccgccacaucguggggaaguccugccccaagccccaccggcucaaccacaugggcaucugcagcugcgggcuguacaagcagccgggcgugcccguccgcuggaagcggugaggacuaguaauaaggaaacuguaugaaugucugugggcaggaagugaagagauccuucuguaaagguuuuuggaauuaugucugcugaauaauaaacuuuuuugaaauaauaaaucugguagaaaaaugagaucuaaaaaaaaaaaaaaaaaaaaaaaaaaaaaaaaaaaaaaaaaaaaaaaaaaaaaaaaaaaaaaaaaaaaaaaaaaaaaaaaaaaaaaaaaaaaaaaaaaaa

SEQ ID NO: 34371 - RNA, 1788 nt, Artificial Sequence
  mRNA product Design b-4 (A100) comprising derived and/or modified sequence from LASV(Mad39;Clade IV)__ANH09722__GPCmut8 (opt1)
aggagagucccgcagucggcguccagcggcucugcuuguucgugugugugucguugcaggccuuauucaagcuuaccaugggccagaucgugaccuucuuccaggaggucccccacgugaucgaggaggugaugaacaucguccugaucgcccucagcauccuggccgugcugaaggggcucuacaacguggcgaccugcggccugaucgggcuggucacguuccuccugcugugcggccgcuccugcaccaccacccucuacaaggggguguacgagcugcaggcccuggagcucaacauggagacgcugaacaugugcaugccgcugagcugcaccaagaacaacucccaccacuacauccgggugggcaacgagaccggccucgagcugacccugacgaacaccagccucaucaaccacaaguucugcaaccuguccgacgcccacaagaagaaccuguacgaccacgcccucaugagcaucaucuccaccuuccaccugagcauccccaacuucaaccaguacgaggccauguccugcgacuucaacgacgggaagaucagcguccaguacaaccugucccacaccuacgcgggcgacacggccaaccacugcgggaccguggccaacggcgugcuccagaccuucaugcgcauggccuggggcgggagcuacaucgcgcuggacuccggccgcgggggcugggacugcaucaugaccagcuaccaguaccugaucauccagaacacgaccugggaggaccacugccaguucucccggcccagccccaucggguaccucggccugcugucccagcggacccgcgacaucuacaucagccggcgccuccugggcaccuucacguggacccuguccgacagcgaggggaaggacaccccgggcggguacugccucacccgguggaugcugaucgaggccgagcugaagugcuucggcaacacggccgucgccaagugcaacgagaagcacgacgaggaguucugcgacaugcuccgccuguucgacuucugcaagcaggccauccagcggcugaaggcgcccgcccagaugagcauccagcucaucaacaaggccgugaacgcccugaucaacgaccagcugaucaugaagaaccaccuccgcgacaucauggggauccccuacugcaacuacuccaaguacugcuaccugaaccacaccgugaccggcaagaccagccugcccaagugcugccucgucuccaacggcagcuaccugaacgagacgcacuucuccgacgacaucgagcagcaggccgacaacaugaucaccgagaugcugcagaaggaguacauggagcggcaggggaagaccccgcugggccucguggaccuguucguguucagcaccuccuucuaccugaucagcaucuuccuccaccuggucaagauccccacgcaccgccacgugguggggaagcccugccccaagccgcaccggcugaaccacaugggcaucugcuccugcggguucuacaagcagcccggcguccccgugcgcuggaagcggugaggacuaguaauaaggaaacuguaugaaugucugugggcaggaagugaagagauccuucuguaaagguuuuuggaauuaugucugcugaauaauaaacuuuuuugaaauaauaaaucugguagaaaaaugagaucuaaaaaaaaaaaaaaaaaaaaaaaaaaaaaaaaaaaaaaaaaaaaaaaaaaaaaaaaaaaaaaaaaaaaaaaaaaaaaaaaaaaaaaaaaaaaaaaaaaaa

SEQ ID NO: 34372 - RNA, 1788 nt, Artificial Sequence
  mRNA product Design b-4 (A100) comprising derived and/or modified sequence from LASV(Z0947-SLE-2011;Clade IV)__AIT17840__GPCmut8 (opt1)
aggagagucccgcagucggcguccagcggcucugcuuguucgugugugugucguugcaggccuuauucaagcuuaccaugggccagaucgugaccuucuuccaggaggucccccacgugaucgaggaggugaugaacaucguccugaucgcccucagcauccuggccgugcugaaggggcucuacaacuucgcgaccugcggccugguggggcuggucacguuccuccugcugugcggccgcuccugcaccaucagccucuacaaggggguguacgagcugcagacccuggagcucaacauggagacccugaacaugugcaugccgcuguccugcacgaagaacaacagccaccacuacaucauggugggcaacgagaccggccucgagcugacccugaccaacacguccaucaucaaccacaaguucugcaaccucagcgacgcccacaagaagaaccuguacgaccacgcccugauguccaucaucagcaccuuccaccucuccauccccaacuucaaccaguacgaggccaugagcugcgacuucaacgggggcaagaucuccguccaguacaaccugagccacuccuacgccggggacgcggccaaccacugcggcaccguggccaacggggugcugcagaccuucaugcggauggccuggggcggcagcuacaucgcgcucgacuccgggcgcgaccggugggacugcaucaugacgagcuaccaguaccugaucauccagaacaccaccugggaggaccacugccaguucucccgccccagccccaucggcuaccuggggcuccugucccagcggacccgcgacaucuacaucagccggcgccugcucggcacguucaccuggacccugagcgacuccgagggcaaggacacccccgggggcuacugccugacgcgguggaugcucaucgaggccgagcugaagugcuucgggaacaccgccgucgccaagugcaacgagaagcacgacgaggaguucugcgacaugcugcgccucuucgacuucugcaagcaggccauccagcggcugaaggcgccggcccagaugagcauccagcugaucaacaaggccgugaacgcccucaucaacgaccagcugaucaugaagaaccaccuccgcgacaucaugggcauccccuacugcaacuacuccaaguacugcuaccugaaccacaccaccacggggaagaccagccugcccaagugcugccugguguccaacggcagcuaccucaacgagacccacuucuccgacgacaucgagcagcaggccgacaacaugaucaccgagaugcugcagaaggaguacauggagcggcagggcaagacgccgcuggggcuggucgaccucuucguguucagcaccuccuucuaccugaucagcaucuuccugcaccucgugaagauccccacccaccgccacaucgucggcaagcccugccccaagccgcaccggcugaaccacauggggaucugcuccugcggccuguacaagcagcccggggugcccgugaaguggaagcgcugaggacuaguaauaaggaaacuguaugaaugucugugggcaggaagugaagagauccuucuguaaagguuuuuggaauuaugucugcugaauaauaaacuuuuuugaaauaauaaaucugguagaaaaaugagaucuaaaaaaaaaaaaaaaaaaaaaaaaaaaaaaaaaaaaaaaaaaaaaaaaaaaaaaaaaaaaaaaaaaaaaaaaaaaaaaaaaaaaaaaaaaaaaaaaaaaa

SEQ ID NO: 34373 - RNA, 1788 nt, Artificial Sequence
  mRNA product Design b-4 (A100) comprising derived and/or modified sequence from LASV(Josiah;Clade IV)__NP_694870__GPCmut8 (opt4)
aggagagucccgcagucggcguccagcggcucugcuuguucgugugugugucguugcaggccuuauucaagcuuaccaugggccagaucgugaccuucuuccaggaggugccccacgugaucgaggaggugaugaacaucgugcugaucgcccugagcgugcuggccgugcugaagggccuguacaacuucgccaccugcggccuggugggccuggugaccuuccugcugcugugcggcagaagcugcaccaccagccuguacaagggcguguacgagcugcagacccuggagcugaacauggagacccugaacaugugcaugccccugagcugcaccaagaacaacagccaccacuacaucauggugggcaacgagaccggccuggagcugacccugaccaacaccagcaucaucaaccacaaguucugcaaccugagcgacgcccacaagaagaaccuguacgaccacgcccugaugagcaucaucagcaccuuccaccugagcauccccaacuucaaccaguacgaggccaugagcugcgacuucaacggcggcaagaucagcgugcaguacaaccugagccacagcuacgccggcgacgccgccaaccacugcggcaccguggccaacggcgugcugcagaccuucaugagaauggccuggggcggcagcuacaucgcccuggacagcggcagaggcaacugggacugcaucaugaccagcuaccaguaccugaucauccagaacaccaccugggaggaccacugccaguucagcagacccagccccaucggcuaccugggccugcugagccagagaaccagagacaucuacaucagcagaagacugcugggcaccuucaccuggacccugagcgacagcgagggcaaggacacccccggcggcuacugccugaccagauggaugcugaucgaggccgagcugaagugcuucggcaacaccgccguggccaagugcaacgagaagcacgacgaggaguucugcgacaugcugagacuguucgacuucugcaagcaggccauccagagacugaaggcccccgcccagaugagcauccagcugaucaacaaggccgugaacgcccugaucaacgaccagcugaucaugaagaaccaccugagagacaucaugggcauccccuacugcaacuacagcaaguacugcuaccugaaccacaccaccaccggcagaaccagccugcccaagugcugccuggugagcaacggcagcuaccugaacgagacccacuucagcgacgacaucgagcagcaggccgacaacaugaucaccgagaugcugcagaaggaguacauggagagacagggcaagaccccccugggccugguggaccuguucguguucagcaccagcuucuaccugaucagcaucuuccugcaccuggugaagauccccacccacagacacaucgugggcaagagcugccccaagccccacagacugaaccacaugggcaucugcagcugcggccuguacaagcagcccggcgugcccgugaaguggaagagaugaggacuaguaauaaggaaacuguaugaaugucugugggcaggaagugaagagauccuucuguaaagguuuuuggaauuaugucugcugaauaauaaacuuuuuugaaauaauaaaucugguagaaaaaugagaucuaaaaaaaaaaaaaaaaaaaaaaaaaaaaaaaaaaaaaaaaaaaaaaaaaaaaaaaaaaaaaaaaaaaaaaaaaaaaaaaaaaaaaaaaaaaaaaaaaaaa

SEQ ID NO: 34374 - RNA, 1785 nt, Artificial Sequence
  mRNA product Design b-4 (A100) comprising derived and/or modified sequence from LASV(LP;Clade I)__AAF86701__GPCmut8 (opt4)
aggagagucccgcagucggcguccagcggcucugcuuguucgugugugugucguugcaggccuuauucaagcuuaccaugggccagaucaucaccuucuuccaggaggugccccacgugaucgaggaggugaugaacaucgugcugaucgcccugagccugcuggccauccugaagggccuguacaacaucgccaccugcggcaucaucggccugguggccuuccuguuccugugcggcaagagcugcagccugacccugaagggcggcuacgagcugcagacccuggagcugaacauggagacccugaacaugugcaugccccugagcugcaccaagaacagcagccaccacuacaucagagugggcaacgagaccggccuggagcugacccugaccaacaccagcaucaucaaccacaaguucugcaaccugagcgacgcccacaagaagaaccuguacgaccacgcccugaugagcaucaucagcaccuuccaccugagcauccccaacuucaaccaguacgaggccaugagcugcgacuucaacggcggcaagaucagcgugcaguacaaccugagccacagcuacgccggcgacgccgccgagcacugcggcaccguggccaacggcgugcugcagaccuucaugagaauggccuggggcggcagauacaucgcccuggacagcggcaagggcaacugggacugcaucaugaccagcuaccaguaccugaucauccagaacaccaccugggaggaccacugccaguucagcagacccagccccaucggcuaccugggccugcugagccagagaaccagagacaucuacaucagcagaagacugcugggcaccuucaccuggacccugagcgacagcgagggcaacgagacccccggcggcuacugccugaccagauggaugcugaucgaggccgagcugaagugcuucggcaacaccgccguggccaagugcaacgagaagcacgacgaggaguucugcgacaugcugagacuguucgacuucugcaagcaggccaucagaagacugaaggcccccgcccagaugagcauccagcugaucaacaaggccgugaacgcccugaucaacgaccagcugaucaugaagaaccaccugagagacaucaugggcauccccuacugcaacuacagcaaguacugcuaccugaaccacaccagcagcggcagaaccagccugcccaagugcugccugaucagcaacggcagcuaccugaacgagacccaguucagcgacgacaucgagcagcaggccgacaacaugaucaccgagaugcugcagaaggaguacaucgagagacagggcaagaccccccugggccugguggacaucuucaucuucagcaccagcuucuaccugaucagcaucuuccugcaccugaucaagauccccacccacagacacaucgugggcaagcccugccccaagccccacagacugaaccacaugggcgugugcagcugcggccuguacaagcaccccggcgugcccaccaaguggaagagaugaggacuaguaauaaggaaacuguaugaaugucugugggcaggaagugaagagauccuucuguaaagguuuuuggaauuaugucugcugaauaauaaacuuuuuugaaauaauaaaucugguagaaaaaugagaucuaaaaaaaaaaaaaaaaaaaaaaaaaaaaaaaaaaaaaaaaaaaaaaaaaaaaaaaaaaaaaaaaaaaaaaaaaaaaaaaaaaaaaaaaaaaaaaaaaaaa

SEQ ID NO: 34375 - RNA, 1785 nt, Artificial Sequence
  mRNA product Design b-4 (A100) comprising derived and/or modified sequence from LASV(803213;Clade II)__AAF86703__GPCmut8 (opt4)
aggagagucccgcagucggcguccagcggcucugcuuguucgugugugugucguugcaggccuuauucaagcuuaccaugggccagaucaucaccuucuuccaggaggugccccacgugaucgaggaggugaugaacaucgugcugaucgcccugagccugcuggccauccugaagggcaucuacaacguggccaccugcggccuguucggccugaucagcuuccugcugcugugcggcagaagcugcagcgugaccuacaagggcguguacgagcugcagacccuggagcugaacauggccaaccugaacaugugcaugccccugagcugcaccaagaacaacagccaccacuacaucauggugggcaacgagaccggccuggagcugacccugaccaacaccagcaucaucaaccacaaguucugcaaccugagcgacgcccacaagaagaaccuguacgaccacgcccugaugagcaucaucagcaccuuccaccugagcauccccaacuucaaccaguacgaggccaugagcugcgacuucaacggcggcaagaucagcgugcaguacaaccugagccacagcuucgccguggacgccgccaaccacugcggcaccaucgccaacggcgugcugcagaccuucaugagaauggccuggggcggcagcuacaucgcccuggacagcggcaagggcaacugggacugcaucaugaccagcuaccaguaccugaucauccagaacaccaccugggaggaccacugccaguucagcagacccagccccaucggcuaccugggccugcugagccagagaaccagagacaucuacaucagcagaagacugcugggcaccuucaccuggacccugagcgacagcgagggcaacgaggcccccggcggcuacugccugaccagauggaugcugaucgaggccgagcugaagugcuucggcaacaccgccguggccaagugcaacgagaagcacgacgaggaguucugcgacaugcugagacuguucgacuucugcaagcaggccaucaagagacugaagacccccgcccagaugagcauccagcugaucaacaaggccgugaacgcccugaucaacgaccagcugaucaugaagaaccaccugagagacaucaugggcauccccuacugcaacuacagcagauacugcuaccugaaccacaccgugaccggcaagaccagccugcccagaugcugccuggugagcaacggcagcuaccugaacgagacccacuucagcgacgacaucgagcagcaggccgacaacaugaucaccgagaugcugcagaaggaguacauggacagacagggcaagaccccccugggccugguggaccuguucguguucagcaccagcuucuaccugaucagcaucuuccugcaccuggugaagauccccacccacagacacaucgugggcaagcccugccccaagccccacagacugaaccacaugggcaucugcagcugcggccuguacaagcaccccggcgugcccgugaaguggaagagaugaggacuaguaauaaggaaacuguaugaaugucugugggcaggaagugaagagauccuucuguaaagguuuuuggaauuaugucugcugaauaauaaacuuuuuugaaauaauaaaucugguagaaaaaugagaucuaaaaaaaaaaaaaaaaaaaaaaaaaaaaaaaaaaaaaaaaaaaaaaaaaaaaaaaaaaaaaaaaaaaaaaaaaaaaaaaaaaaaaaaaaaaaaaaaaaaa

SEQ ID NO: 34376 - RNA, 1785 nt, Artificial Sequence
  mRNA product Design b-4 (A100) comprising derived and/or modified sequence from LASV(GA391;Clade III)__CAA36645__GPCmut8 (opt4)
aggagagucccgcagucggcguccagcggcucugcuuguucgugugugugucguugcaggccuuauucaagcuuaccaugggccagaucgugaccuucuuccaggaggugccccacgugaucgaggaggugaugaacaucgugcugaucgcccugagcauccuggccauccugaagggccuguacaacguggccaccugcggccugaucggccuggugaccuuccugcugcugagcggcagaagcugcagccugaucuacaagggcaccuacgagcugcagacccuggagcugaacauggagacccugaacaugugcaugccccugagcugcaccaagaacaacagccaccacuacaucagagugggcaacgagaccggccuggagcugacccugaccaacaccagcauccugaaccacaaguucugcaaccugagcgacgcccacaagagaaaccuguacgaccacagccugaugagcaucaucagcaccuuccaccugagcauccccaacuucaaccaguacgaggccaugagcugcgacuucaacggcggcaagaucaccgugcaguacaaccugagccacagcuucgccguggacgccgccggccacugcggcacccuggccaacggcgugcugcagaccuucaugagaauggccuggggcggcagcuacaucgcccuggacagcggcagaggcaacugggacugcaucaugaccagcuaccaguaccugaucauccagaacaccaccugggacgaccacugccaguucagcagacccagccccaucggcuaccugggccugcugagccagagaaccagagacaucuacaucagcagaagacugcugggcaccuucaccuggacccugagcgacagcgagggcaacgagacccccggcggcuacugccugaccagauggaugcugaucgaggccgagcugaagugcuucggcaacaccgccguggccaagugcaacgagaagcacgacgaggaguucugcgacaugcugagacuguucgacuucugcaagcaggccaucagaagacugaagacccccgcccagaugagcauccagcugaucaacaaggccgugaacgcccugaucaacgaccagcugaucaugaagaaccaccugagagacaucaugggcauccccuacugcaacuacagcagauacugcuaccugaaccacaccagcaccggcaagaccagccugcccagaugcugccugaucagcaacggcagcuaccugaacgagaccaaguucagcgacgacaucgagcagcaggccgacaacaugaucaccgagaugcugcagaaggaguacaucgacagacagggcaagaccccccugggccugguggaccuguucguguucagcaccagcuucuaccugaucagcaucuuccugcaccuggugaagauccccacccacagacacaucgugggcaagcccugccccaagccccacagacugaaccacaugggcaucugcagcugcggccuguacaagcagcccggcgugcccgugagauggaagagaugaggacuaguaauaaggaaacuguaugaaugucugugggcaggaagugaagagauccuucuguaaagguuuuuggaauuaugucugcugaauaauaaacuuuuuugaaauaauaaaucugguagaaaaaugagaucuaaaaaaaaaaaaaaaaaaaaaaaaaaaaaaaaaaaaaaaaaaaaaaaaaaaaaaaaaaaaaaaaaaaaaaaaaaaaaaaaaaaaaaaaaaaaaaaaaaaa

SEQ ID NO: 34377 - RNA, 1788 nt, Artificial Sequence
  mRNA product Design b-4 (A100) comprising derived and/or modified sequence from LASV(AV;Clade V)__CCA30314__GPCmut8 (opt4)
aggagagucccgcagucggcguccagcggcucugcuuguucgugugugugucguugcaggccuuauucaagcuuaccaugggccagaucgugaccuucuuccaggaggugccccacgugaucgaggaggugaugaacaucgugcugaucgcccugagcauccuggccgugcugaagggccuguacaacaucgccaccugcggccugaucggccugaucaccuuccugcugcugugcggcagaagcugcagcagcaaccuguacaagggcguguacgagcugcagagccuggaccugaacauggagacccugaacaugugcaugccccugagcugcaccaagaacaacagccaccacuacaucagagugggcaacgacaccggccuggagcugacccugaccaacaccagcauccugaaccacaaguucugcaaccugagcgacgcccacaagaaggaccuguacgaccacgcccugaugagcaucaucagcaccuuccaccugagcauccccaacuucaaccaguacgaggccaugagcugcgacuucaacggcggcaagaucagcgugcaguacaaccugagccacagcuacgccaucgacgccgccaaccacugcggcaccguggccaacggcauccugcagaccuucaugagaauggccuggggcggcagcuacaucgcccuggacagcggcagaggcaacugggacugcaucaugaccagcuaccaguaccugaucauccagaacaccaccugggagaaccacugccaguucagcagacccagccccaucggcuaccugggccugcugagccagagaaccagagacaucuacaucagcagaagacugcugggcaccuucaccuggacccugagcgacagcgagggcaacgccacccccggcggcuacugccugaccagauggaugcugaucgaggccgagcugaagugcuucggcaacaccgccguggccaagugcaacgagaagcacgacgaggaguucugcgacaugcugagacuguucgacuucugcaagcaggccaucagcagacugaagagccccgcccagaugagcauccagcugaucaacaaggccgugaacgcccugaucaacgaccagcugaucaugaagaaccaccugagagacaucaugggcauccccuacugcaacuacagcaaguacugcuaccugaaccacaccaucaccggcaagaccagccugcccaagugcugccuggugagcaacggcagcuaccugaacgagacccacuucagcgacgacaucgagcagcaggccgacaacaugaucaccgagaugcugcagaaggaguacauggagagacagggcaagaccccccugggccugguggaccuguucguguucagcaccagcuucuaccugaucagcaucuuccugagacuggugaagauccccacccacagacacaucgugggcaagcccugccccaagccccacagacugaaccacaugggcaucugcagcugcggccuguacaagcagcccggcgugcccgugagauggaagagaugaggacuaguaauaaggaaacuguaugaaugucugugggcaggaagugaagagauccuucuguaaagguuuuuggaauuaugucugcugaauaauaaacuuuuuugaaauaauaaaucugguagaaaaaugagaucuaaaaaaaaaaaaaaaaaaaaaaaaaaaaaaaaaaaaaaaaaaaaaaaaaaaaaaaaaaaaaaaaaaaaaaaaaaaaaaaaaaaaaaaaaaaaaaaaaaaa

SEQ ID NO: 34378 - RNA, 1785 nt, Artificial Sequence
  mRNA product Design b-4 (A100) comprising derived and/or modified sequence from LASV(Togo/2016/7082;Clade VI)__AMR44577__GPCmut8 (opt4)
aggagagucccgcagucggcguccagcggcucugcuuguucgugugugugucguugcaggccuuauucaagcuuaccaugggccagaucaucaccuucuuccaggaggugccccacgugaucgaggaggugaugaacaucgugcugaucgcccugagccugcuggccauccugaagggcguguacaacguggccaccugcggcaucaucggccuggugaccuuccuguuccugugcggcagaagcugcagccugaucuacaagggcagcuacgagcugcagacccuggagcugaacauggagacccugaacaugugcaugccccugagcugcaccaagaacagcagccaccacuacaucagagugggcaacgagaccggccuggagcugacccugaccaacaccagcaucaucaaccacaaguucugcaaccugagcgacgcccacaagagaaaccuguacgaccacgcccugaugagcauccugagcaccuuccaccugagcauccccaacuucaaccaguacgaggccaugagcugcgacuucaacggcggcaagaucagcgugcaguacaaccugagccacgccuacgccguggacgccgccgagcacugcggcaccguggccaacggcgugcugcagaccuucaugagaauggccuggggcggcagcuacaucgcccuggacagcggcagaggcaacugggacugcaucaugaccagcuaccaguaccugaucauccagaacaccaccugggaggaccacugccaguucagcagacccagccccaucggcuaccugggccugcugagccagagaaccagagacaucuacaucagcagaagacugcugggcaccuucaccuggacccugagcgacagcgagggcaacgagacccccggcggcuacugccugaccagauggaugcugaucgaggccgagcugaagugcuucggcaacaccgccguggccaagugcaacgagaagcacgacgaggaguucugcgacaugcugagacuguucgacuucugcaagcaggccauccagagacugaagagccccgcccagaugagcauccagcugaucaacaaggccgugaacgcccugaucaacgaccagcugaucaugaagaaccaccugagagacaugaugggcauccccuacugcaacuacagcaaguacugcuaccugaaccacaccagcagcggcagaaccagccugcccaagugcugccuggugagcaacggcagcuaccugaacgagacccacuucagcgacgacaucgagcagcaggccgacaacaugaucaccgagaugcugcagaaggaguacaucgacagacagggcaagaccccccugggccugguggaccuguucguguucagcaccagcuucuaccugaucagcaucuuccugcaccugaucaagauccccacccacagacacaucgugggcaagcccugccccaagccccacagacugaaccacaugggcaucugcagcugcggccuguacaagcagcccggcgugcccaccagauggaagagaugaggacuaguaauaaggaaacuguaugaaugucugugggcaggaagugaagagauccuucuguaaagguuuuuggaauuaugucugcugaauaauaaacuuuuuugaaauaauaaaucugguagaaaaaugagaucuaaaaaaaaaaaaaaaaaaaaaaaaaaaaaaaaaaaaaaaaaaaaaaaaaaaaaaaaaaaaaaaaaaaaaaaaaaaaaaaaaaaaaaaaaaaaaaaaaaaa

SEQ ID NO: 34379 - RNA, 1785 nt, Artificial Sequence
  mRNA product Design b-4 (A100) comprising derived and/or modified sequence from LASV(KAK-428;Clade n.d. (VII))__ANH09740__GPCmut8 (opt4)
aggagagucccgcagucggcguccagcggcucugcuuguucgugugugugucguugcaggccuuauucaagcuuaccaugggccagaucgugaccuucuuccaggaggugccccacgugaucgaggaggugaugaacaucgugcugaucgcccugagccugcuggccauccugaagggccuguacaacuucgccaccugcggcgugaucggccugaucaccuuccugcugcugugcggcagaagcugcagcgccaccuacaagggccaguacgagcugcagacccuggagcugaacauggagagccugaacaugugcaugccccugagcugcaccaagaacaacagccaccacuacaucagagccggcaacaacaccggccuggagcugacccugaccaacaccagcaucaucagccacaaguucugcaaccugagcgacgcccacaagaagaaccuguacgaccacacccugaugagcaucaucaccaccuuccaccugagcauccccaacuucaaccaguacgaggccaugagcugcgacuucaacggcggcaagaucagcauccaguacaaccugagccacagcuacgccggcgacgccgcccagcacugcggcaccguggccaacggcgugcugcagaccuucaugagaauggccuggggcggcagcuaccuggcccuggacagcggcagaagaggcugggacugcaucaucagcagcuaccaguaccugaucauccagaacaccaccugggacgaccacugccaguucagcagacccagccccaucggcuaccugggcuucgugagccagaagaccagagacaucuacaucagcagaagacugcugggcaccuucaccuggacccugagcgacagcgagggccacgacaugcccggcggcuacugccugaccagauggaugcugaucgaggccgaccugaagugcuucggcaacaccgccguggccaagugcaacgagaagcacgacgaggaguucugcgacauguggagacuguucgacuucugcaagcaggccauccagagacugaaggcccccgcccagaugaacauccagcugaucaacaaggccgugaacgcccugaucaacgaccagcugaugaugaagaaccaccugagagacaucaugggcauccccuacugcaacuacagcaaguucugcuaccugaacaacaccaccaccggcagaaccagccugcccagaugcugccugaucagcaacggcagcuaccugaacgagacccacuucagcgacgacaucgagcagcaggccgacaacaugaucaccgagaugcugcagaaggaguacauggacagacagggcaagaccccccugggccugguggaccuguucguguucagcaccagcuucuaccugaucaccaucuuccugcaccuggugaagauccccacccacagacacaucgugggcaagcccugccccaagccccacagacugaaccacaugggcaucugcagcugcggccuguacaagcagcccggcgugcccgugagauggaagagaugaggacuaguaauaaggaaacuguaugaaugucugugggcaggaagugaagagauccuucuguaaagguuuuuggaauuaugucugcugaauaauaaacuuuuuugaaauaauaaaucugguagaaaaaugagaucuaaaaaaaaaaaaaaaaaaaaaaaaaaaaaaaaaaaaaaaaaaaaaaaaaaaaaaaaaaaaaaaaaaaaaaaaaaaaaaaaaaaaaaaaaaaaaaaaaaaa

SEQ ID NO: 34380 - RNA, 1785 nt, Artificial Sequence; identical to SEQ ID NO: 34374
  mRNA product Design b-4 (A100) comprising derived and/or modified sequence from LASV(Pinneo-NIG-1969;Clade I)__AIT17836__GPCmut8 (opt4)

SEQ ID NO: 34381 - RNA, 1785 nt, Artificial Sequence
  mRNA product Design b-4 (A100) comprising derived and/or modified sequence from LASV(ISTH0009-NIG-2011;Clade II)__AIT17404__GPCmut8 (opt4)
aggagagucccgcagucggcguccagcggcucugcuuguucgugugugugucguugcaggccuuauucaagcuuaccaugggccagaucaucaccuucuuccaggaggugccccacgugaucgaggaggugaugaacaucgugcugaucgcccugagccugcuggccauccugaagggcaucuacaacguggccaccugcggccuguucggccuggugagcuuccugcugcugugcggcagaagcugcagcaccaccuacaagggcguguacgagcugcagacccuggagcuggacauggccagccugaacaugugcaugccccugagcugcaccaagaacaacagccaccacuacaucauggugggcaacgagaccggccuggagcugacccugaccaacaccagcaucaucaaccacaaguucugcaaccugagcgacgcccacaagaagaaccuguacgaccacgcccugaugagcaucaucagcaccuuccaccugagcauccccaacuucaaccaguacgaggccaugagcugcgacuucaacggcggcaagaucagcgugcaguacaaccugagccacgccuacgccguggacgccgccaaccacugcggcaccaucgccaacggcgugcugcagaccuucaugagaauggccuggggcggcagcuacaucgcccuggacagcggcaagggcagcugggacugcaucaugaccagcuaccaguaccugaucauccagaacaccaccugggaggaccacugccaguucagcagacccagccccaucggcuaccugggccugcugagccagagaaccagagacaucuacaucagcagaagacugcugggcaccuucaccuggacccugagcgacagcgagggcaacgagacccccggcggcuacugccugaccagauggaugcugaucgaggccgagcugaagugcuucggcaacaccgccguggccaagugcaacgagaagcacgacgaggaguucugcgacaugcugagacuguucgacuucugcaagcaggccaucagaagacugaagacccccgcccagaugagcauccagcugaucaacaaggccgugaacgcccugaucaacgaccagcugaucaugaagaaccaccugagagacaucaugggcauccccuacugcaacuacagcaaguacugcuaccugaaccacaccgugaccggcaagaccagccugcccagaugcugccuggugagcaacggcagcuaccugaacgagacccacuucagcgacgacaucgagcagcaggccgacaacaugaucaccgagcugcugcagaaggaguacauggacagacagggcaagaccccccugggccugguggaccuguucguguucagcaccagcuucuaccugaucagcaucuuccugcaccugaucaagauccccacccacagacacaucaccggcaagcccugccccaagccccacagacugaaccacaugggcaucugcagcugcggccuguacaagcaccccggcgugcccgugaaguggaagagaugaggacuaguaauaaggaaacuguaugaaugucugugggcaggaagugaagagauccuucuguaaagguuuuuggaauuaugucugcugaauaauaaacuuuuuugaaauaauaaaucugguagaaaaaugagaucuaaaaaaaaaaaaaaaaaaaaaaaaaaaaaaaaaaaaaaaaaaaaaaaaaaaaaaaaaaaaaaaaaaaaaaaaaaaaaaaaaaaaaaaaaaaaaaaaaaaa

SEQ ID NO: 34382 - RNA, 1785 nt, Artificial Sequence
  mRNA product Design b-4 (A100) comprising derived and/or modified sequence from LASV(ISTH2010-NIG-2012;Clade II)__AIT17482__GPCmut8 (opt4)
aggagagucccgcagucggcguccagcggcucugcuuguucgugugugugucguugcaggccuuauucaagcuuaccaugggccagaucaucaccuucuuccaggaggugccccacgugaucgaggaggugaugaacaucgugcugaucgcccugagccugcuggccauccugaagggcaucuacaacguggccaccugcggccuguucggccuggugagcuuccugcugcugugcggcagaagcugcagcaccaccuacaagggcguguacgagcugcagacccuggagcuggacauggccagccugaacaugugcaugccccugagcugcaccaagaacaacagccaccacuacaucauggugggcaacgagaccggccuggagcugacccugaccaacaccagcaucaucaaccacaaguucugcaaccugagcgacgcccacaagaagaaccuguacgaccacgcccugaugagcaucaucagcaccuuccaccugagcauccccaacuucaaccaguacgaggccaugagcugcgacuucaacggcggcaagaucagcgugcaguacaaccugagccacgccuacgccguggacgccgccaaccacugcggcaccaucgccaacggcgugcugcagaccuucaugagaauggccuggggcggcagcuacaucgcccuggacagcggcaagggcagcugggacugcaucaugaccagcuaccaguaccugaucauccagaacaucaccugggaggaccacugccaguucagcagacccagccccaucggcuaccugggccugcugagccagagaaccagagacaucuacaucagcagaagacugcugggcaccuucaccuggacccugagcgacagcgagggcaacgagacccccggcggcuacugccugaccagauggaugcugaucgaggccgagcugaagugcuucggcaacaccgccguggccaagugcaacgagaagcacgacgaggaguucugcgacaugcugagacuguucgacuucugcaagcaggccaucagaagacugaagacccccgcccagaugagcauccagcugaucaacaaggccgugaacgcccugaucaacgaccagcugaucaugaagaaccaccugagagacaucaugggcauccccuacugcaacuacagcaaguacugcuaccugaaccacaccgugaccggcaagaccagccugcccagaugcugccuggugagcaacggcagcuaccugaacgagacccacuucagcgacgacaucgagcagcaggccgacaacaugaucaccgagcugcugcagaaggaguacaucgacagacagggcaagaccccccugggccugguggaccuguucguguucagcaccagcuucuaccugaucagcaucuuccugcaccuggugaagauccccacccacagacacguggugggcaagcccugccccaagccccacagacugaaccacaugggcaucugcagcugcggccuguacaagcaccccggcgugcccgugaaguggaagagaugaggacuaguaauaaggaaacuguaugaaugucugugggcaggaagugaagagauccuucuguaaagguuuuuggaauuaugucugcugaauaauaaacuuuuuugaaauaauaaaucugguagaaaaaugagaucuaaaaaaaaaaaaaaaaaaaaaaaaaaaaaaaaaaaaaaaaaaaaaaaaaaaaaaaaaaaaaaaaaaaaaaaaaaaaaaaaaaaaaaaaaaaaaaaaaaaa

SEQ ID NO: 34383 - RNA, 1785 nt, Artificial Sequence
  mRNA product Design b-4 (A100) comprising derived and/or modified sequence from LASV(Lassa virus/H.sapiens-wt/NGA/2015/ISTH_0543;Clade II)__AVO03639__GPCmut8 (opt4)
aggagagucccgcagucggcguccagcggcucugcuuguucgugugugugucguugcaggccuuauucaagcuuaccaugggccagaucaucaccuucuuccaggaggugccccacgugaucgaggaggugaugaacaucgugcugaucgcccugagccugcuggccauccugaagggcaucuacaacguggccaccugcggccuguucggccuggugagcuuccugcugcugugcggcagaagcugcagcaccaccuacaagggcguguacgagcugcagacccuggagcuggacauggccaaccugaacaugugcaugccccugagcugcaccaagaacaacagccaccacuacaucauggugggcaacgagaccggccuggagcugacccugaccaacaccagcaucaucaaccacaaguucugcaaccugagcgacgcccacaagaagaaccuguacgaccacgcccugaugagcaucaucagcaccuuccaccugagcauccccaacuucaaccaguacgaggccaugagcugcgacuucaacggcggcaagaucagcgugcaguacaaccugagccacaccuacgccguggacgccgccaaccacugcggcaccaucgccaacggcgugcugcagaccuucaugagaauggccuggggcggcagcuacaucgcccuggacagcggcaagggcagcugggacugcaucaugaccagcuaccaguaccuggugauccagaacaccaccugggaggaccacugccaguucagcagacccagccccaucggcuaccugggccugcugagccagagaaccagagacaucuacaucagcagaagacugcugggcaccuucaccuggacccugagcgacagcgagggcaacgagacccccggcggcuacugccugaccagauggaugcugaucgaggccgagcugaagugcuucggcaacaccgccguggccaagugcaacgagaagcacgacgaggaguucugcgacaugcugagacuguucgacuucugcaagcaggccaucagaagacugaagacccccgcccagaugagcauccagcugaucaacaaggccgugaacgcccugaucaacgaccagcugaucaugaagaaccaccugagagacaucaugggcauccccuacugcaacuacagcaaguacugcuaccugaaccacaccgugaccggcaagaccagccugcccagaugcugccuggugagcaacggcagcuaccugaacgagacccacuucagcgacgacaucgagcagcaggccgacaacaugaucaccgagcugcugcagaaggaguacaucgacagacagggcaagaccccccugggccugguggaccuguucguguucagcaccagcuucuaccugaucagcaucuuccugcaccuggugaagauccccacccacagacacaucaccggcaagcccugccccaagccccacagacugaaccacaugggcaucugcagcugcggccuguacaagcaccccggcgugcccgugaaguggaagagaugaggacuaguaauaaggaaacuguaugaaugucugugggcaggaagugaagagauccuucuguaaagguuuuuggaauuaugucugcugaauaauaaacuuuuuugaaauaauaaaucugguagaaaaaugagaucuaaaaaaaaaaaaaaaaaaaaaaaaaaaaaaaaaaaaaaaaaaaaaaaaaaaaaaaaaaaaaaaaaaaaaaaaaaaaaaaaaaaaaaaaaaaaaaaaaaaa

SEQ ID NO: 34384 - RNA, 1785 nt, Artificial Sequence
  mRNA product Design b-4 (A100) comprising derived and/or modified sequence from LASV(Lassa virus/H.sapiens-wt/NGA/2016/ISTH_0009;Clade II)__AVO03571__GPCmut8 (opt4)
aggagagucccgcagucggcguccagcggcucugcuuguucgugugugugucguugcaggccuuauucaagcuuaccaugggccagaucaucaccuucuuccaggaggugccccacgugaucgaggaggugaugaacaucgugcugaucgcccugagccugcuggccauccugaagggcaucuacaacguggccaccugcggccugcugggccuggugagcuuccugcugcugugcggcagaagcugcagcaccaccuacaagggcguguacgagcugcagacccuggagcuggacauggccagccugaacaugugcaugccccugagcugcaccaagaacaacagccaccacuacaucauggugggcaacgagaccggccuggagcugacccugaccaacaccagcaucaucaaccacaaguucugcaaccugagcgacgcccacaagaagaaccuguacgaccacgcccugaugagcaucaucagcaccuuccaccugagcauccccaacuucaaccaguacgaggccaugagcugcgacuucaacggcggcagaaucagcgugcaguacaaccugagccacagcuacgccguggacgccgccaaccacugcggcaccaucgccaacggcgugcugcagaccuucaugagaauggccuggggcggcagcuacaucgcccuggacagcggcaagggcagcugggacugcaucaugaccagcuaccaguaccugaucauccagaacaccaccugggaggaccacugccaguucagcagacccagccccaucggcuaccugggccugcugagccagagaaccagagacaucuacaucagcagaagacugcugggcaccuucaccuggacccugagcgacagcgagggcaacgagacccccggcggcuacugccugaccagauggaugcugaucgaggccgagcugaagugcuucggcaacaccgccguggccaagugcaacgagaagcacgacgaggaguucugcgacaugcugagacuguucgacuucugcaagcaggccaucagaagacugaagacccccgcccagaugagcauccagcugaucaacaaggccgugaacgcccugaucaacgaccagcugaucaugaagaaccaccugagagacaucaugggcauccccuacugcaacuacagcaaguacugcuaccugaaccacaccgugaccggcaagaccagccugcccagaugcugccuggugagcaacggcagcuaccugaacgagacccacuucagcgacgacaucgagcagcaggccgacaacaugaucaccgagcugcugcagaaggaguacaucgacagacagggcaagaccccccugggccugguggaccuguucguguucagcaccagcuucuaccugaucagcaucuuccugcaccuggugaagauccccacccacagacacaucaccggcaagcccugccccaagccccacagacugaaccacaugggcaucugcagcugcggccuguacaaccaccccggcgugcccgugaaguggaagagaugaggacuaguaauaaggaaacuguaugaaugucugugggcaggaagugaagagauccuucuguaaagguuuuuggaauuaugucugcugaauaauaaacuuuuuugaaauaauaaaucugguagaaaaaugagaucuaaaaaaaaaaaaaaaaaaaaaaaaaaaaaaaaaaaaaaaaaaaaaaaaaaaaaaaaaaaaaaaaaaaaaaaaaaaaaaaaaaaaaaaaaaaaaaaaaaaa

SEQ ID NO: 34385 - RNA, 1785 nt, Artificial Sequence
  mRNA product Design b-4 (A100) comprising derived and/or modified sequence from LASV(Lassa virus/H.sapiens-wt/NGA/2016/ISTH_0017;Clade II)__AVO03567__GPCmut8 (opt4)
aggagagucccgcagucggcguccagcggcucugcuuguucgugugugugucguugcaggccuuauucaagcuuaccaugggccagaucaucaccuucuuccaggaggugccccacgugaucgaggaggugaugaacaucgugcugaucgcccugagccugcuggccauccugaagggcaucuacaacguggccaccugcggccuguucggccuggugagcuuccugcugcugugcggcagaagcugcagcaccaccuacaagggcguguacgagcugcagacccuggagcuggacauggccagccugaacaugugcaugccccugagcugcaccaagaacaacagccaccacuacaucauggugggcaacgagaccggccuggagcugacccugaccaacaccagcaucaucaaccacaaguucugcaaccugagcgacgcccacaagaagaaccuguacgaccacgcccugaugagcaucaucagcaccuuccaccugagcauccccaacuucaaccaguacgaggccaugagcugcgacuucaacggcggcaagaucagcgugcaguacaaccugagccacaccuacgccaucgacgccgccaaccacugcggcaccaucgccaacggcgugcugcagaccuucaugagaauggccuggggcggcagcuacaucgcccuggacagcggcaagggcagcugggacugcaucaugaccagcuaccaguaccugaucauccagaacaccaccugggaggaccacugccaguucagcagacccagccccaucggcuaccugggccugcugagccagagaaccagagacaucuacaucagcagaagacugcugggcaccuucaccuggacccugagcgacagcgagggcaacgagacccccggcggcuacugccugaccagauggaugcugaucgaggccgagcugaagugcuucggcaacaccgccguggccaagugcaacgagaagcacgacgaggaguucugcgacaugcugagacuguucgacuucugcaagcaggccaucagaagacugaagacccccgcccagaugagcauccagcugaucaacaaggccgugaacgcccugaucaacgaccagcugaucaugaagaaccaccugagagacaucaugggcauccccuacugcaacuacagcaaguacugcuaccugaaccacaccgugaccggcaagaccagccugcccagaugcugccuggugagcaacggcagcuaccugaacgagacccacuucagcgacgacaucgagcagcaggccgacaacaugaucaccgagcugcugcagaaggaguacauggacagacagggcaagaccccccugggccugguggaccuguucguguucagcaccagcuucuaccugaucagcaucuuccugcaccuggugagaauccccacccacagacacgugaucggcaagcccugccccaagccccacagacugaaccacaugggcaucugcagcugcggccuguacaagcaccccggcgugcccgugaaguggaagagaugaggacuaguaauaaggaaacuguaugaaugucugugggcaggaagugaagagauccuucuguaaagguuuuuggaauuaugucugcugaauaauaaacuuuuuugaaauaauaaaucugguagaaaaaugagaucuaaaaaaaaaaaaaaaaaaaaaaaaaaaaaaaaaaaaaaaaaaaaaaaaaaaaaaaaaaaaaaaaaaaaaaaaaaaaaaaaaaaaaaaaaaaaaaaaaaaa

SEQ ID NO: 34386 - RNA, 1785 nt, Artificial Sequence
  mRNA product Design b-4 (A100) comprising derived and/or modified sequence from LASV(Lassa virus/H.sapiens-wt/NGA/2018/ISTH_0959;Clade II)__AVV65099__GPCmut8 (opt4)
aggagagucccgcagucggcguccagcggcucugcuuguucgugugugugucguugcaggccuuauucaagcuuaccaugggccagaucaucaccuucuuccaggaggugccccacgugaucgaggaggugaugaacaucgugcugaucgcccugagccugcuggccauccugaagggcaucuacaacguggugaccugcggccuguucggccuggugagcuuccugcugcugugcggcagaagcugcagcaccaccuacaagggcguguacgagcugcagacccuggagcuggacauggccagccugaacaugugcaugccccugagcugcaccaagaacaacagccaccacuacaucauggugggcaacgagaccggccuggagcugacccugaccaacaccagcaucaucaaccacaaguucugcaaccugagcgacgcccacaagaagaaccuguacgaccacgcccugaugagcaucaucagcaccuuccaccugagcauccccaacuucaaccaguacgaggccaugagcugcgacuucaacggcggcaagaucagcgugcaguacaaccugagccacgccuacgccaucgacgccgccaaccacugcggcaccaucgccaacggcgugcugcagaccuucaugagaauggccuggggcggcagcuacaucgcccuggacagcggcaagggcagcugggacugcaucaugaccagcuaccaguaccugaucauccagaacaccaccugggaggaccacugccaguucagcagacccagccccaucggcuaccugggccugcugagccagagaaccagagacaucuacaucagcagaagacugcugggcaccuucaccuggacccugagcgacagcgagggcaacgagacccccggcggcuacugccugaccagauggaugcugaucgaggccgagcugaagugcuucggcaacaccgccguggccaagugcaacgagaagcacgacgaggaguucugcgacaugcugagacuguucgacuucugcaagcaggccaucagaagacugaagacccccgcccagaugagcauccagcugaucaacaaggccgugaacgcccugaucaacgaccagcugaucaugaagaaccaccugagagacaucaugggcauccccuacugcaacuacagcaaguacugcuaccugaaccacaccgugaccggcaagaccagccugcccagaugcugccuggugagcaacggcagcuaccugaacgagacccacuucagcgacgacaucgagcagcaggccgacaacaugaucaccgagcugcugcagaaggaguacaucgacagacagggcaagaccccccugggccugguggaccuguucguguucagcaccagcuucuaccugaucagcaucuuccugcaccuggugaagauccccacccacagacacgugaucggcaagcccugccccaagccccacagacugaaccacaugggcaucugcagcugcggccuguacaagcaccccggcgugcccgugaaguggaagagaugaggacuaguaauaaggaaacuguaugaaugucugugggcaggaagugaagagauccuucuguaaagguuuuuggaauuaugucugcugaauaauaaacuuuuuugaaauaauaaaucugguagaaaaaugagaucuaaaaaaaaaaaaaaaaaaaaaaaaaaaaaaaaaaaaaaaaaaaaaaaaaaaaaaaaaaaaaaaaaaaaaaaaaaaaaaaaaaaaaaaaaaaaaaaaaaaa

SEQ ID NO: 34387 - RNA, 1785 nt, Artificial Sequence
  mRNA product Design b-4 (A100) comprising derived and/or modified sequence from LASV(LASV003-NIG-2008;Clade II)__AIT17580__GPCmut8 (opt4)
aggagagucccgcagucggcguccagcggcucugcuuguucgugugugugucguugcaggccuuauucaagcuuaccaugggccagaucaucaccuucuuccaggaggugccccacgugaucgaggaggugaugaacaucgugcugaucgcccugagccugcuggccauccugaagggcaucuacaacguggccaccugcggccuguucggccuggugagcuuccugcugcugugcggcagaagcugcagcaccaccuacaagggcguguacgagcugcagacccuggagcuggacauggccagccugaacaugugcaugccccugagcugcaccaagaacaacagccaccacuacaucauggugggcaacgagaccggccuggagcugacccugaccaacaccagcaucaucaaccacaaguucugcaaccugagcgacgcccacaagaagaaccuguacgaccacgcccugaugagcaucaucagcaccuuccaccugagcauccccaacuucaaccaguacgaggccaugagcugcgacuucaacggcggcaagaucagcgugcaguacaaccugagccacaccuacgccguggacgccgccaaccacugcggcaccaucgccaacggcgugcugcagaccuucaugagaauggccuggggcggcagcuacaucgcccuggacagcggcaagggcagcugggacugcaucaugaccagcuaccaguaccugaucauccagaacaccaccugggaggaccacugccaguucagcagacccagccccaucggcuaccugggccugcugagccagagaaccagagacaucuacaucagcagaagacugcugggcaccuucaccuggacccugagcgacagcgagagcaacgagacccccggcggcuacugccugaccagauggaugcugaucgaggccgagcugaagugcuucggcaacaccgccguggccaagugcaacgagaagcacgacgaggaguucugcgacaugcugagacuguucgacuucugcaagcaggccaucagaagacugaaggcccccgcccagaugagcauccagcugaucaacaaggccgugaacgcccugaucaacgaccagcugaucaugaagaaccaccugagagacaucaugggcauccccuacugcaacuacagcaaguacugcuaccugaaccacaccgugaccggcagaaccagccugcccagaugcugccuggugagcaacggcagcuaccugaacgagacccacuucagcgacgacaucgagcagcaggccgacaacaugaucaccgagcugcugcagaaggaguacauggacagacagggcaagaccccccugggccugguggaccuguucguguucagcaccagcuucuaccugaucagcaucuuccugcaccuggugaagauccccacccacagacacgugaucggcaagcccugccccaagccccacagacugaaccacaugggcaucugcagcugcggccuguacaagcaccccggcgugcccgugaaguggaagagaugaggacuaguaauaaggaaacuguaugaaugucugugggcaggaagugaagagauccuucuguaaagguuuuuggaauuaugucugcugaauaauaaacuuuuuugaaauaauaaaucugguagaaaaaugagaucuaaaaaaaaaaaaaaaaaaaaaaaaaaaaaaaaaaaaaaaaaaaaaaaaaaaaaaaaaaaaaaaaaaaaaaaaaaaaaaaaaaaaaaaaaaaaaaaaaaaa

SEQ ID NO: 34388 - RNA, 1785 nt, Artificial Sequence
  mRNA product Design b-4 (A100) comprising derived and/or modified sequence from LASV(LASV035-NIG-2009;Clade II)__AIT17588__GPCmut8 (opt4)
aggagagucccgcagucggcguccagcggcucugcuuguucgugugugugucguugcaggccuuauucaagcuuaccaugggccagaucaucaccuucuuccaggaggugccccacgugaucgaggaggugaugaacaucgugcugaucgcccugagccugcuggccauccugaagggcaucuacaacguggccaccugcggccuguucggccuggugagcuuccugcugcugugcggcagaagcugcagcaccaccuacaagggcguguacgagcugcagacccuggagcuggacauggccagccugaacaugugcaugccccugagcugcaccaagaacaacagccaccacuacaucauggugggcaacgagaccggccuggagcugacccugaccaacaccagcaucaucaaccacaaguucugcaaccugagcgacgcccacaagaagaaccuguacgaccacgcccugaugagcaucaucagcaccuuccaccugagcauccccaacuucaaccaguacgaggccaugagcugcgacuucaacggcggcaagaucagcgugcaguacaaccugagccacgccuacgccguggacgccgccaaccacugcggcaccaucgccaacggcgugcugcagaccuucaugagaauggccuggggcggcagcuacaucgcccuggacagcggcaagggcagcugggacugcaucaugaccagcuaccaguaccugaucauccagaacaccaccugggaggaccacugccaguucagcagacccagccccaucggcuaccugggccugcugagccagagaaccagagacaucuacaucagcagaagacugcugggcaccuucaccuggacccugagcgacagcgagggcaacgagacccccggcggcuacugccugaccagauggaugcugaucgaggccgagcugaagugcuucggcaacaccgccguggccaagugcaacgagaagcacgacgaggaguucugcgacaugcugagacuguucgacuucugcaagcaggccaucagaagacugaaggcccccgcccagaugagcauccagcugaucaacaaggccgugaacgcccugaucaacgaccagcugaucaugaagaaccaccugagagacaucaugggcauccccuacugcaacuacagcaaguacugcuaccugaaccacaccgugaccggcaagaccagccugcccagaugcugccuggugagcaacggcagcuaccugaacgagacccacuucagcgacgacaucgagcagcaggccgacaacaugaucaccgagcugcugcagaaggaguacaucgacagacagggcaagaccccccugggccugguggaccuguucguguucagcaccagcuucuaccugaucagcaucuuccugcaccuggugaagauccccacccacagacacgugaucggcaagcccugccccaagccccacagacugaaccacaugggcaucugcagcugcggccuguacaagcaccccggcgugcccgugaaguggaagagaugaggacuaguaauaaggaaacuguaugaaugucugugggcaggaagugaagagauccuucuguaaagguuuuuggaauuaugucugcugaauaauaaacuuuuuugaaauaauaaaucugguagaaaaaugagaucuaaaaaaaaaaaaaaaaaaaaaaaaaaaaaaaaaaaaaaaaaaaaaaaaaaaaaaaaaaaaaaaaaaaaaaaaaaaaaaaaaaaaaaaaaaaaaaaaaaaa

SEQ ID NO: 34389 - RNA, 1785 nt, Artificial Sequence
  mRNA product Design b-4 (A100) comprising derived and/or modified sequence from LASV(LASV1000-NIG-2009;Clade II)__AIT17782__GPCmut8 (opt4)
aggagagucccgcagucggcguccagcggcucugcuuguucgugugugugucguugcaggccuuauucaagcuuaccaugggccagaucaucaccuucuuccaggaggugccccacgugaucgaggaggugaugaacaucgugcugaucgcccugagccugcuggccauccugaagggcaucuacaacguggccaccugcggccuguucggccuggugagcuuccugcugcugugcggcagaagcugcagcaccaccuacaagggcguguacgagcugcagacccuggagcuggacauggccagccugaacaugugcaugccccugagcugcaccaagaacaacagccaccacuacaucauggugggcaacgagaccggccuggagcugacccugaccaacaccagcaucaucaaccacaaguucugcaaccugagcgacgcccacaagaagaaccuguacgaccacgcccugaugagcaucaucagcaccuuccaccugagcauccccaacuucaaccaguacgaggccaugagcugcgacuucaacggcggcaagaucagcgugcaguacaaccugagccacaccuacgccguggacgccgccaaccacugcggcaccaucgccaacggcgugcugcagaccuucaugagaauggccuggggcggcagcuacaucgcccuggacagcggcaagggcagcugggacugcaucaugaccagcuaccaguaccugaucauccagaacaccaccugggaggaccacugccaguucagcagacccagccccaucggcuaccugggccugcugagccagagaaccagagacaucuacaucagcagaagacugcugggcaccuucaccuggacccugagcgacagcgagggcaacgagacccccggcggcuacugccugaccagauggaugcugaucgaggccgagcugaagugcuucggcaacaccgccguggccaagugcaacgagaagcacgacgaggaguucugcgacaugcugagacuguucgacuucugcaagcaggccaucaagagacugaagacccccgcccagaugagcauccagcugaucaacaaggccgugaacgcccugaucaacgaccagcugaucaugaagaaccaccugagagacaucaugggcauccccuacugcaacuacagcaaguacugcuaccugaaccacaccgugaccggcaagaccagccugcccagaugcugccuggugagcaacggcagcuaccugaacgagacccacuucagcgacgacaucgagcagcaggccgacaacaugaucaccgagcugcugcagaaggaguacaucgacagacagggcaagaccccccugggccugguggaccuguucguguucagcaccagcuucuaccugaucagcaucuuccugcaccuggugaagauccccacccacagacacguggugggcaagcccugccccaagccccacagacugaaccacaugggcaucugcagcugcggccuguacaagcaccccggcgugcccgugaaguggaagagaugaggacuaguaauaaggaaacuguaugaaugucugugggcaggaagugaagagauccuucuguaaagguuuuuggaauuaugucugcugaauaauaaacuuuuuugaaauaauaaaucugguagaaaaaugagaucuaaaaaaaaaaaaaaaaaaaaaaaaaaaaaaaaaaaaaaaaaaaaaaaaaaaaaaaaaaaaaaaaaaaaaaaaaaaaaaaaaaaaaaaaaaaaaaaaaaaa

SEQ ID NO: 34390 - RNA, 1785 nt, Artificial Sequence
  mRNA product Design b-4 (A100) comprising derived and/or modified sequence from LASV(LASV221-NIG-2010;Clade II)__AIT17624__GPCmut8 (opt4)
aggagagucccgcagucggcguccagcggcucugcuuguucgugugugugucguugcaggccuuauucaagcuuaccaugggccagaucaucaccuucuuccaggaggugccccacgugaucgaggaggugaugaacaucgugcugaucgcccugagccugcuggccauccugaagggcaucuacaacguggccaccugcggccuguucggccuggugagcuuccugcugcugugcggcagaagcugcagcaccaccuacaagggcguguacgagcugcagacccuggagcuggacauggccagccugaacaugugcaugccccugagcugcaccaagaacaacagccaccacuacaucauggugggcaacgagaccggccuggagcugacccugaccaacaccagcaucaucaaccacaaguucugcaaccugagcgacgcccacaagaagaaccuguacgaccacgcccugaugagcaucaucagcaccuuccaccugagcauccccaacuucaaccaguacgaggccaugagcugcgacuucaacggcggcaagaucagcgugcaguacaaccugagccacaccuacgccaucgacgccgccaaccacugcggcaccaucgccaacggcgugcugcagaccuucaugagaauggccuggggcggcagcuacaucgcccuggacagcggcaagggcagcugggacugcaucaugaccagcuaccaguaccugaucauccagaacaccaccugggaggaccacugccaguucagcagacccagccccaucggcuaccugggccugcugagccagagaaccagagacaucuacaucagcagaagacugcugggcaccuucaccuggacccugagcgacagcgagggcaacgagacccccggcggcuacugccugaccagauggaugcugaucgaggccgagcugaagugcuucggcaacaccgccguggccaagugcaacgagaagcacgacgaggaguucugcgacaugcugagacuguucgacuucugcaagcaggccaucagaagacugaagacccccgcccagaugagcauccagcugaucaacaaggccgugaacgcccugaucaacgaccagcugaucaugaagaaccaccugagagacaucaugggcauccccuacugcaacuacagcaaguacugcuaccugaaccacaccgugaccggcaagaccagccugcccagaugcugccuggugagcaacggcagcuaccugaacgagacccacuucagcgacgacaucgagcagcaggccgacaacaugaucaccgagaugcugcagaaggaguacauggacagacagggcaagaccccccugggccugguggaccuguucguguucagcaccagcuucuaccugaucagcaucuuccugcaccuggugaagauccccacccacagacacgugaucggcaagcccugccccaagccccacagacugaaccacaugggcaucugcagcugcggccuguacaagcaccccggcgugcccgugaaguggaagagaugaggacuaguaauaaggaaacuguaugaaugucugugggcaggaagugaagagauccuucuguaaagguuuuuggaauuaugucugcugaauaauaaacuuuuuugaaauaauaaaucugguagaaaaaugagaucuaaaaaaaaaaaaaaaaaaaaaaaaaaaaaaaaaaaaaaaaaaaaaaaaaaaaaaaaaaaaaaaaaaaaaaaaaaaaaaaaaaaaaaaaaaaaaaaaaaaa

SEQ ID NO: 34391 - RNA, 1785 nt, Artificial Sequence
  mRNA product Design b-4 (A100) comprising derived and/or modified sequence from LASV(LASV237-NIG-2010;Clade II)__AIT17638__GPCmut8 (opt4)
aggagagucccgcagucggcguccagcggcucugcuuguucgugugugugucguugcaggccuuauucaagcuuaccaugggccagaucaucaccuucuuccaggaggugccccacgugaucgaggaggugaugaacaucgugcugaucgcccugagccugcuggccauccugaagggcaucuacaacguggccaccugcggccuguucggccuggugagcuuccugcugcugugcggcagaagcugcagcaccaccuacaagggcguguacgagcugcagacccuggagcuggacauggccagccugaacaugugcaugccccugagcugcaccaagaacaacagccaccacuacaucauggugggcaacgagaccggccuggagcugacccugaccaacaccagcaucaucaaccacaaguucugcaaccugagcgacgcccacaagaaggaccuguacgaccacgcccugaugagcaucaucagcaccuuccaccugagcauccccaacuucaaccaguacgaggccaugagcugcgacuucaacggcggcaagaucagcgugcaguacaaccugagccacaccuacgccguggacgccgccaaccacugcggcaccaucgccaacggcgugcugcagaccuucaugagaauggccuggggcggcagcuacaucgcccuggacagcggcaagggcagcugggacugcaucaugaccagcuaccaguaccugaucauccagaacaccaccugggaggaccacugccaguucagcagacccagccccaucggcuaccugggccugcugagccagagaaccagagacaucuacaucagcagaagacugcugggcaccuucaccuggacccugagcgacagcgagggcaacgagacccccggcggcuacugccugaccagauggaugcugaucgaggccgagcugaagugcuucggcaacaccgccguggccaagugcaacgagaagcacgacgaggaguucugcgacaugcugagacuguucgacuucugcaagcaggccaucagaagacugaagacccccgcccagaugagcauccagcugaucaacaaggccgugaacgcccugaucaacgaccagcugaucaugaagaaccaccugagagacaucaugggcauccccuacugcaacuacagcaaguacugcuaccugaaccacaccgugaccggcaagaccagccugcccagaugcugccuggugagcaacggcagcuaccugaacgagacccacuucagcgacgacaucgagcagcaggccgacaacaugaucaccgagcugcugcagaaggaguacauggacagacagggcaagaccccccugggccugguggaccuguucguguucagcaccagcuucuaccugaucagcaucuuccugcaccugaucaagauccccacccacagacacaucaccggcaagcccugccccaagccccacagacugaaccacaugggcaucugcagcugcggccuguacaagcaccccggcgugcccgugaaguggaagagaugaggacuaguaauaaggaaacuguaugaaugucugugggcaggaagugaagagauccuucuguaaagguuuuuggaauuaugucugcugaauaauaaacuuuuuugaaauaauaaaucugguagaaaaaugagaucuaaaaaaaaaaaaaaaaaaaaaaaaaaaaaaaaaaaaaaaaaaaaaaaaaaaaaaaaaaaaaaaaaaaaaaaaaaaaaaaaaaaaaaaaaaaaaaaaaaaa

SEQ ID NO: 34392 - RNA, 1785 nt, Artificial Sequence
  mRNA product Design b-4 (A100) comprising derived and/or modified sequence from LASV(LASV253-NIG-2011;Clade II)__AIT17670__GPCmut8 (opt4)
aggagagucccgcagucggcguccagcggcucugcuuguucgugugugugucguugcaggccuuauucaagcuuaccaugggccagaucaucaccuucuuccaggaggugccccacgugaucgaggaggugaugaacaucgugcugaucgcccugagccugcuggccauccugaagggcaucuacaacguggccaccugcggccuguucggccuggugagcuuccugcugcugugcggcagaagcugcagcaccaccuacaagggcguguacgagcugcagacccuggagcuggacauggccagccugaacaugugcaugccccugagcugcaccaagaacaacagccaccacuacaucauggugggcaacgagaccggccuggagcugacccugaccaacaccagcaucaucaaccacaaguucugcaaccugagcgacgcccacaagaagaaccuguacgaccacgcccugaugagcaucaucagcaccuuccaccugagcauccccaacuucaaccaguacgaggccaugagcugcgacuucaacggcggcaagaucagcgugcaguacaaccugagccacaccuacgccguggacgccgccaaccacugcggcaccaucgccaacggcgugcugcagaccuucaugagaauggccuggggcggcagcuacaucgcccuggacagcggcaagggcagcugggacugcaucaugaccagcuaccaguaccugaucauccagaacaccaccugggaggaccacugccaguucagcagacccagccccaucggcuaccugggccugcugagccagagaaccagagacaucuacaucagcagaagacugcugggcaccuucaccuggacccugagcgacagcgagggcaacgagacccccggcggcuacugccugaccagauggaugcugaucgaggccgagcugaagugcuucggcaacaccgccguggccaagugcaacgagaagcacgacgaggaguucugcgacaugcugagacuguucgacuucugcaagcaggccaucagaagacugaaggcccccgcccagaugagcauccagcugaucaacaaggccgugaacgcccugaucaacgaccagcugaucaugaagaaccaccugagagacaucaugggcauccccuacugcaacuacagcaaguacugcuaccugaaccacaccgugaccggcagaaccagccugcccagaugcugccuggugagcaacggcagcuaccugaacgagacccacuucagcgacgacaucgagcagcaggccgacaacaugaucaccgagcugcugcagaaggaguacaucgacagacagggcaagaccccccugggccugguggaccuguucguguucagcaccagcuucuaccugaucagcaucuuccugcaccuggugaagauccccacccacagacacaucaucggcaagcccugccccaagccccacagacugaaccacaugggcaucugcagcugcggccuguacaagcaccccggcgugcccgugaaguggaagagaugaggacuaguaauaaggaaacuguaugaaugucugugggcaggaagugaagagauccuucuguaaagguuuuuggaauuaugucugcugaauaauaaacuuuuuugaaauaauaaaucugguagaaaaaugagaucuaaaaaaaaaaaaaaaaaaaaaaaaaaaaaaaaaaaaaaaaaaaaaaaaaaaaaaaaaaaaaaaaaaaaaaaaaaaaaaaaaaaaaaaaaaaaaaaaaaaa

SEQ ID NO: 34393 - RNA, 1785 nt, Artificial Sequence
  mRNA product Design b-4 (A100) comprising derived and/or modified sequence from LASV(LASV254-NIG-2011;Clade II)__AIT17674__GPCmut8 (opt4)
aggagagucccgcagucggcguccagcggcucugcuuguucgugugugugucguugcaggccuuauucaagcuuaccaugggccagaucaucaccuucuuccaggaggugccccacgugaucgaggaggugaugaacaucgugcugaucgcccugagccugcuggccauccugaagggcaucuacaacguggccaccugcggccuguucggccuggugagcuuccugcugcugugcggcagaagcugcagcaccaccuacaagggcguguacgagcugcagacccuggagcuggacaugaccaaccugaacaugugcaugccccugagcugcaccaagaacaacagccaccacuacaucauggugggcaacgagaccggccuggagcugacccugaccaacaccagcaucaucaaccacaaguucugcaaccugagcgacgcccacaagaagaaccuguacaaccacgcccugaugagcaucaucagcaccuuccaccugagcauccccaacuucaaccaguacgaggccaugagcugcgacuucaacggcggcaagaucagcgugcaguacaaccugagccacagcuacgccguggacgccgccaaccacugcggcaccaucgccaacggcgugcugcagaccuucaugagaauggccuggggcggcagcuacaucgcccuggacagcggcaagggcaacugggacugcaucaugaccagcuaccaguaccugaucauccagaacaccaccugggaggaccacugccaguucagcagacccagccccaucggcuaccugggccugcugagccagagaaccagagacaucuacaucagcagaagacugcugggcaccuucaccuggacccugagcgacagcgagggcaacgagacccccggcggcuacugccugaccagauggaugcugaucgaggccgagcugaagugcuucggcaacaccgccguggccaagugcaacgagaagcacgacgaggaguucugcgacaugcugagacuguucgacuucugcaagcaggccaucagaagacugaagacccccgcccaggccaacauccagcugaucaacaaggccgugaacgcccugaucaacgaccagcugaucaugaagaaccaccugagagacaucaugggcauccccuacugcaacuacagcaaguacugcuaccugaaccacaccgugaccggcaagaccagccugcccagaugcugccuggugagcaacggcagcuaccugaacgagacccacuucagcgacgacaucgagcagcaggccgacaacaugaucaccgagcugcugcagaaggaguacauggacagacagggcaagaccccccugggccugguggaccuguucguguucagcaccagcuucuaccugaucagcaucuuccugcaccuggugaagauccccacccacagacacgugaucggcaagcccugccccaagccccacagacugaaccacaugggcaucugcagcugcggccuguacaagcaccccggcgugcccgugaaguggaagagaugaggacuaguaauaaggaaacuguaugaaugucugugggcaggaagugaagagauccuucuguaaagguuuuuggaauuaugucugcugaauaauaaacuuuuuugaaauaauaaaucugguagaaaaaugagaucuaaaaaaaaaaaaaaaaaaaaaaaaaaaaaaaaaaaaaaaaaaaaaaaaaaaaaaaaaaaaaaaaaaaaaaaaaaaaaaaaaaaaaaaaaaaaaaaaaaaa

SEQ ID NO: 34394 - RNA, 1785 nt, Artificial Sequence
  mRNA product Design b-4 (A100) comprising derived and/or modified sequence from LASV(Nig08-A19;Clade III)__ADU56618__GPCmut8 (opt4)
aggagagucccgcagucggcguccagcggcucugcuuguucgugugugugucguugcaggccuuauucaagcuuaccaugggccagaucgugaccuucuuccaggaggugccccacgugaucgaggaggugaugaacaucgugcugaucgcccugagcauccuggccauccugaagggccuguacaacaucgccaccugcggccugaucggccuggugaccuuccugcugcugagcggcagaagcugcagcaugaccuacaagggcguguacgagcugcagacccuggagcugaacaugaacacccugaacaugugcaugccccugagcugcaccaagaacaacagccaccacuacaucauggugggcaacgagaccggccuggagcugacccugaccaacaccagccugcugcaccacaaguucugcaaccugagcgacgcccacaagaagaaccuguacgaccacacccugaugagcaucaucagcaccuuccaccugagcauccccaacuucaaccaguacgaggccaugagcugcgacuucaacggcggcaagaucaccgugcaguacaaccugagccacagcuacgccaucgacgccgccaaccacugcggcaccguggccaacggcgugcugcagaccuucaugagaauggccuggggcggcagcuacaucgcccuggacagcggcagaggcaagugggacugcaucaugaccagcuaccaguaccugaucauccagaacaccaccugggaggaccacugccaguucagcagacccagccccaucggcuaccugggccugcugagccagagaaccagagacaucuacaucagcagaagacugcugggcaccuucaccuggacccugagcgacagcgagggcaacgagacccccggcggcuacugccugaccagauggaugcugaucgaggccgagcugaagugcuucggcaacaccgccguggccaagugcaacgagaagcacgacgaggaguucugcgacaugcugagacuguucgacuucugcaagcaggccaucagaagacugaaggcccccgcccagaugagcauccagcugaucaacaaggccgugaacgcccugaucaacgaccagcugaucaugaagaaccaccugagagacaucaugggcauccccuacugcaacuacagcaaguacugcuaccugaaccacaccagcaccggcagaaccagccugcccagaugcugccuggugagcaacggcagcuaccugaacgagacccacuucagcgacgacaucgagcagcaggccgacaacaugaucaccgagaugcugcagaaggaguaccuggacagacagggcaagaccccccugggccugguggaccuguucguguucagcaccagcuucuaccugaucagcaucuuccugcaccuggugaagauccccacccacagacacaucgugggcaagcccugccccaagccccacagacugaaccacaugggcaucugcagcugcggccuguacaagcagcccggcgugcccgugagauggaagagaugaggacuaguaauaaggaaacuguaugaaugucugugggcaggaagugaagagauccuucuguaaagguuuuuggaauuaugucugcugaauaauaaacuuuuuugaaauaauaaaucugguagaaaaaugagaucuaaaaaaaaaaaaaaaaaaaaaaaaaaaaaaaaaaaaaaaaaaaaaaaaaaaaaaaaaaaaaaaaaaaaaaaaaaaaaaaaaaaaaaaaaaaaaaaaaaaa

SEQ ID NO: 34395 - RNA, 1788 nt, Artificial Sequence
  mRNA product Design b-4 (A100) comprising derived and/or modified sequence from LASV(G1180-SLE-2010;Clade IV)__AIT17168__GPCmut8 (opt4)
aggagagucccgcagucggcguccagcggcucugcuuguucgugugugugucguugcaggccuuauucaagcuuaccaugggccagaucgugaccuucuuccaggaggugccccacgugaucgaggaggugaugaacaucgugcugaucgcccugagcauccuggccgugcugaagggccuguacaacuucgccaccugcggccuggugggccugcugaccuuccugcugcugugcggcagaagcugcaccgccagcagauacaagggcguguacgagcugcagacccuggagcugaacauggagacccugaacaugugcaugccccugagcugcaccaagaacaacagccaccacuacaucauggugggcaacgagaccggccuggagcugacccugaccaacaccagcaucaucaaccacaaguucugcaaccugagcgacgcccacaagaagaaccuguacgaccacgcccugaugagcaucaucagcaccuuccaccugagcauccccaacuucaaccaguacgaggccaugagcugcgacuucaacggcggcaagaucagcgugcaguacaaccugagccacagcuacgccggcgacgccgccaaccacugcggcaccguggccaacggcgugcugcagaccuucaugagaauggccuggggcggcagcuacaucgcccuggacagcggccacggcagcugggacugcaucaugaccagcuaccaguaccugaucauccagaacaccaccugggaggaccacugccaguucagcagacccagccccaucggcuaccugggccugcugagccagagaaccagagacaucuacaucagcagaagacugcugggcaccuucaccuggacccugagcgacagcgagggcaaggacacccccggcggcuacugccugaccagauggaugcugaucgaggccgagcugaagugcuucggcaacaccgccguggccaagugcaacgagaagcacgacgaggaguucugcgacaugcugagacuguucgacuucugcaagcaggccauccagagacugaaggcccccgcccagaugagcauccagcugaucaacaaggccgugaacgcccugaucaacgaccagcugaucaugaagaaccaccugagagacaucaugggcauccccuacugcaacuacagcaaguacugcuaccugaaccacaccaccaccggcaagaccagccugcccaagugcugccuggugagcaacggcagcuaccugaacgagacccacuucagcgacgacaucgagcagcaggccgacaacaugaucaccgagaugcugcagaaggaguacauggagagacagggcaagaccccccugggccugguggaccuguucguguucagcaccagcuucuaccugaucagcaucuuccugcaccuggugaagauccccacccacagacacaucgugggcaagagcugccccaagccccacagacugaaccacaugggcaucugcagcugcggccuguacaagcagcccggcgugcccgugaaguggaagagaugaggacuaguaauaaggaaacuguaugaaugucugugggcaggaagugaagagauccuucuguaaagguuuuuggaauuaugucugcugaauaauaaacuuuuuugaaauaauaaaucugguagaaaaaugagaucuaaaaaaaaaaaaaaaaaaaaaaaaaaaaaaaaaaaaaaaaaaaaaaaaaaaaaaaaaaaaaaaaaaaaaaaaaaaaaaaaaaaaaaaaaaaaaaaaaaaa

SEQ ID NO: 34396 - RNA, 1788 nt, Artificial Sequence
  mRNA product Design b-4 (A100) comprising derived and/or modified sequence from LASV(G1442-SLE-2011;Clade IV)__AIT17180__GPCmut8 (opt4)
aggagagucccgcagucggcguccagcggcucugcuuguucgugugugugucguugcaggccuuauucaagcuuaccaugggccagaucgugaccuucuuccaggaggugccccacgugaucgaggaggugaugaacaucgugcugaucgcccugagcauccuggccgugcugaagggccuguacaacguggccaccugcggccugaucggccuggugaccuuccugcugcugugcggcagaagcugcaccaccacccuguacaagggcguguacgagcugcagacccuggagcugaacauggagacccugaacaugugcaugccccugagcugcaccaagaacaacagccaccacuacaucagagugggcaacgagaccggccuggagcugacccugaccaacaccagcaucaucaaccacaaguucugcaaccugagcgacgcccacaagaagaaccuguacgaccacgcccugaugagcaucaucagcaccuuccaccugagcauccccaacuucaaccaguacgaggccaugagcugcgacuucaacggcggcaagaucagcgugcaguacaaccugagccacagcuacgccggcgacgccgccaaccacugcggcaccguggccaacggcgugcugcagaccuucaugagaauggccuggggcggcagcuacaucgcccuggacagcggcagaggcaacugggacugcaucaugaccagcuaccaguaccugaucauccagaacaccaccugggacgaccacugccaguucagcagacccagccccaucggcuaccugggccugcugagccagagaaccagagacguguacaucagcagaagacugcugggcaccuucaccuggacccugagcgacagcgagggcaaggacacccccggcggcuacugccugaccagauggaugcugaucgaggccgagcugaagugcuucggcaacaccgccguggccaagugcaacgagaagcacgacgaggaguucugcgacaugcugagacuguucgacuucugcaagcaggccauccagagacugaaggcccccgcccagaugagcauccagcugaucaacaaggccgugaacgcccugaucaacgaccagcugaucaugaagaaccaccugagagacaucaugggcauccccuacugcaacuacagcaaguacugcuaccugaacaacaccgccaccggcaagaccagccugcccaagugcugccugaucagcaacggcagcuaccugaacgagacccacuucagcgacgacaucgagcaggaggccgacaacaugaucaccgagaugcugcagaaggaguacauggagagacagggcaagaccccccugggccugguggaccuguucguguucagcaccagcuucuaccugaucagcaucuuccugcaccuggugaagauccccacccacagacacaucgugggcaagagcugccccaagccccacagacugaaccacaugggcaucugcagcugcggccuguacaagcagcccggcgugcccgugagauggaagagaugaggacuaguaauaaggaaacuguaugaaugucugugggcaggaagugaagagauccuucuguaaagguuuuuggaauuaugucugcugaauaauaaacuuuuuugaaauaauaaaucugguagaaaaaugagaucuaaaaaaaaaaaaaaaaaaaaaaaaaaaaaaaaaaaaaaaaaaaaaaaaaaaaaaaaaaaaaaaaaaaaaaaaaaaaaaaaaaaaaaaaaaaaaaaaaaaa

SEQ ID NO: 34397 - RNA, 1788 nt, Artificial Sequence
  mRNA product Design b-4 (A100) comprising derived and/or modified sequence from LASV(G3010-SLE-2013;Clade IV)__AIT17344__GPCmut8 (opt4)
aggagagucccgcagucggcguccagcggcucugcuuguucgugugugugucguugcaggccuuauucaagcuuaccaugggccagaucgugaccuucuuccaggaggugccccacgugaucgaggaggugaugaacaucgugcugaucgcccugagcauccuggccgugcugaagggccuguacaacuucgccaccugcggccuggugggccuggugaccuuccugcugcugugcggcagaagcugcaccaccagccuguacaagggcguguacgagcugcagacccuggagcugaacauggagacccugaacaugugcaugccccugagcugcaccaagaacaacagccaccacuacaucauggugggcaacgagaccggccuggagcugacccugaccaacaccagcaucaucaaccacaaguucugcaaccugagcgacgcccacaagaagaaccuguacaaccacgcccugaugagcaucaucagcaccuuccaccugagcauccccaacuucaaccaguacgaggccaugagcugcgacuucaacggcggcaagaucagcgugcaguacaaccugagccacagcuacgccggcgacgccgccagccacugcggcaccguggccaacggcgugcugcagaccuucaugagaauggccuggggcggcagcuacaucgcccuggacagcggcuacggcaagugggacugcaucaugaccagcuaccaguaccugaucauccagaacaccaccugggaggaccacugccaguucagcagacccagccccaucggcuaccugggccugcugagccagagaaccagagacaucuacaucagcagaagacugcugggcaccuucaccuggacccugagcgacagcgagggcaaggacacccccggcggcuacugccugaccagauggaugcugaucgaggccgagcugaagugcuucggcaacaccgccguggccaagugcaacgagaagcacgacgaggaguucugcgacaugcugagacuguucgacuucugcaagcaggccauccagagacugaagacccccgcccagaugagcauccagcugaucaacaaggccgugaacgcccugaucaacgaccagcugaucaugaagaaccaccugagagacaucaugggcauccccuacugcaacuacagcaaguacugcuaccugaaccacaccaccaccggcaagaccagccugcccaagugcugccuggugagcaacggcagcuaccugaacgagacccacuucagcgacgacaucgagcagcaggccgacaacaugaucaccgagaugcugcagaaggaguacauggagagacagggcaagaccccccugggccugguggaccuguucguguucagcaccagcuucuaccugaucagcaucuuccugcaccuggugaagauccccacccacagacacaucgugggcaagagcugccccaagccccacagacugaaccacaugggcaucugcagcugcggccuguacaagcagcccggcgugcccgugagauggaagagaugaggacuaguaauaaggaaacuguaugaaugucugugggcaggaagugaagagauccuucuguaaagguuuuuggaauuaugucugcugaauaauaaacuuuuuugaaauaauaaaucugguagaaaaaugagaucuaaaaaaaaaaaaaaaaaaaaaaaaaaaaaaaaaaaaaaaaaaaaaaaaaaaaaaaaaaaaaaaaaaaaaaaaaaaaaaaaaaaaaaaaaaaaaaaaaaaa

SEQ ID NO: 34398 - RNA, 1788 nt, Artificial Sequence
  mRNA product Design b-4 (A100) comprising derived and/or modified sequence from LASV(G502-SLE-2009;Clade IV)__AIT17126__GPCmut8 (opt4)
aggagagucccgcagucggcguccagcggcucugcuuguucgugugugugucguugcaggccuuauucaagcuuaccaugggccagaucgugaccuucuuccaggaggugccccacgugaucgaggaggugaugaacaucgugcugaucgcccugagcauccuggccgugcugaagggccuguacaacuucgccaccugcggccuggugggccugcugaccuuccugcugcugugcggcagaagcugcaccaccggccuguacaagggcguguacgagcugcagacccuggagcugaacauggagacccugaacaugugcaugccccugagcugcaccaagaacaacagccaccacuacaucauggugggcaacgagaccggccuggagcugacccugaccaacaccagcaucaucaaccacaaguucugcaaccugagcgacgcccacaagaagaaccuguacgaccacgcccugaugagcaucaucagcaccuuccaccugagcauccccaacuucaaccaguacgaggccaugagcugcgacuucaacggcggcaagaucagcgugcaguacaaccugagccacagcuacgccggcgacgccgccgaccacugcggcaccguggccaacggcgugcugcagaccuucaugagaauggccuggggcggcagcuacaucgcccuggacagcggcagaggcagaugggacugcaucaugaccagcuaccaguaccugaucauccagaacaccaccugggaggaccacugccaguucagcagacccagccccaucggcuaccugggccugcugagccagagaaccagagacaucuacaucagcagaagacugcugggcaccuucaccuggacccugagcgacagcgagggcaaggacacccccggcggcuacugccugaccagauggaugcugaucgaggccgagcugaagugcuucggcaacaccgccguggccaagugcaacgagaagcacgacgaggaguucugcgacaugcugagacuguucgacuucugcaagcaggccauccagagacugaaggcccccgcccagaugagcauccagcugaucaacaaggccgugaacgcccugaucaacgaccagcuggugaugaagaaccaccugagagacaucaugggcauccccuacugcaacuacagcagauacugcuaccugaaccacaccaccaccggcagaaccagccugcccaagugcugccuggugagcaacggcagcuaccugaacgagacccacuucagcgacgacaucgagcagcaggccgacaacaugaucaccgagaugcugcagaaggaguacauggagagacagggcaagaccccccugggccugguggaccuguucguguucagcaccagcuucuaccugaucagcaucuuccugcaccuggugaagauccccacccacagacacaucgugggcaagagcugccccaagccccacagacugaaccacaugggcaucugcagcugcggccuguacaagcagcccggcgugcccgugaaguggaagagaugaggacuaguaauaaggaaacuguaugaaugucugugggcaggaagugaagagauccuucuguaaagguuuuuggaauuaugucugcugaauaauaaacuuuuuugaaauaauaaaucugguagaaaaaugagaucuaaaaaaaaaaaaaaaaaaaaaaaaaaaaaaaaaaaaaaaaaaaaaaaaaaaaaaaaaaaaaaaaaaaaaaaaaaaaaaaaaaaaaaaaaaaaaaaaaaaa

SEQ ID NO: 34399 - RNA, 1788 nt, Artificial Sequence
  mRNA product Design b-4 (A100) comprising derived and/or modified sequence from LASV(G733-SLE-2010;Clade IV)__AIT17154__GPCmut8 (opt4)
aggagagucccgcagucggcguccagcggcucugcuuguucgugugugugucguugcaggccuuauucaagcuuaccaugggccagaucgugaccuucuuccaggaggugccccacgugaucgaggaggugaugaacaucgugcugaucgcccugagcauccuggccgugcugaagggccuguacaacuucgccaccugcggcaucgugggccuggugagcuuccugcugcugugcggcagaagcugcaccaccagccuguacaagggcguguacgagcugcagacccuggagcugaacauggagacccugaacaugugcaugccccugagcugcaccaagaacaacagccaccacuacaucauggugggcaacgagaccggccuggagcugacccugaccaacaccagcaucaucaaccacaaguucugcaaccugagcgacgcccacaagaagaaccuguacgaccacgcccugaugagcaucaucagcaccuuccaccugagcauccccaacuucaaccaguacgaggccaugagcugcgacuucaacggcggcaagaucagcgugcaguacaaccugagccacagcuacgccggcgacgccgccaaccacugcggcaccaucgccaacggcgugcugcagaccuucaugagaauggccuggggcggcagcuacaucgcccuggacagcggcagagacagaugggacugcaucaugaccagcuaccaguaccugaucauccagaacaccaccugggaggaccacugccaguucagcagacccagccccaucggcuaccugggccugcugagccagagaaccagagacaucuacaucagcagaagacugcugggcaccuucaccuggacccugagcgacagcgagggcaaggacacccccggcggcuacugccugaccagauggaugcugaucgaggccgagcugaagugcuucggcaacaccgccguggccaagugcaacgagaagcacgacgaggaguucugcgacaugcugagacuguucgacuucugcaagcaggccauccagagacugaaggcccccgcccagaugagcauccagcugaucaacaaggccgugaacgcccugaucaacgaccagcugaucaugaagaaccaccugagagacaucaugggcauccccuacugcaacuacagcaaguacugcuaccugaaccacaccaccaccggcaagaccagccugcccaagugcugccuggugagcaacggcagcuaccugaacgagacccacuucagcgacgacaucgagcagcaggccgacaacaugaucaccgagaugcugcagaaggaguacauggagagacagggcaagaccccccugggccugguggaccuguucguguucagcaccagcuucuaccugaucagcaucuuccugcaccuggugaagauccccacccacagacacguggugggcaagagcugccccaagccccacagacugaaccacaugggcaucugcagcugcggccuguacggccagcccggcgugcccgugaaguggaagagaugaggacuaguaauaaggaaacuguaugaaugucugugggcaggaagugaagagauccuucuguaaagguuuuuggaauuaugucugcugaauaauaaacuuuuuugaaauaauaaaucugguagaaaaaugagaucuaaaaaaaaaaaaaaaaaaaaaaaaaaaaaaaaaaaaaaaaaaaaaaaaaaaaaaaaaaaaaaaaaaaaaaaaaaaaaaaaaaaaaaaaaaaaaaaaaaaa

SEQ ID NO: 34400 - RNA, 1788 nt, Artificial Sequence
  mRNA product Design b-4 (A100) comprising derived and/or modified sequence from MOPV/LASV reassortant(IGS-1;Clade IV)__AFY05576__GPCmut8 (opt4)
aggagagucccgcagucggcguccagcggcucugcuuguucgugugugugucguugcaggccuuauucaagcuuaccaugggccagaucgugaccuucuuccaggaggugccccacgugaucgaggaggugaugaacaucgugcugaucgcccugagcgugcuggccgugcugaagggccuguacaacuucgccaccugcggccuggugggccuggugaccuuccugcugcugugcggcagaagcugcaccaccagccuguacaagggcguguacgagcugcagacccuggagcugaacauggagacccugaacaugugcaugccccugagcugcaccaagaacaacagccaccacuacaucauggugggcaacgagaccggccuggagcugacccugaccaacaccagcaucaucaaccacaaguucugcaaccugagcgacgcccacaagaagaaccuguacgaccacgcccugaugagcaucaucagcaccuuccaccugagcauccccaacuucaaccaguacgaggccaugagcugcgacuucaacggcggcaagaucagcgugcaguacaaccugagccacagcuacgccggcgacgccgccaaccacugcggcaccguggccaacggcgugcugcagaccuucaugagaauggccuggggcggcagcuacaucgcccuggacagcggcagaggcaacugggacugcaucaugaccagcuaccaguaccugaucauccagaacaccaccugggaggaccacugccaguucagcagacccagccccaucggcuaccugggccugcugagccagagaaccagagacaucuacaucagcagaagacugcugggcaccuucaccuggacccugagcgacagcgagggcgaggacacccccggcggcuacugccugaccagauggaugcugaucgaggccgagcugaagugcuucggcaacaccgccguggccaagugcaacgagaagcacgacgaggaguucugcgacaugcugagacuguucgacuucugcaagcaggccauccagagacugaaggcccccgcccagaugagcauccagcugaucaacaaggccgugaacgcccugaucaacgaccagcugaucaugaagaaccaccugagagacaucaugggcauccccuacugcaacuacagcaaguacugcuaccugaaccacaccaccaccggcagaaccagccugcccaagugcugccuggugagcaacggcagcuaccugaacgagacccacuucagcgacgacaucgagcagcaggccgacaacaugaucaccgagaugcugcagaaggaguacauggagagacagggcaagaccccccugggccugguggaccuguucguguucagcaccagcuucuaccugaucagcaucuuccugcaccuggugaagauccccacccacagacacaucgugggcaagagcugccccaagccccacagacugaaccacaugggcaucugcagcugcggccuguacaagcagcccggcgugcccgugaaguggaagagaugaggacuaguaauaaggaaacuguaugaaugucugugggcaggaagugaagagauccuucuguaaagguuuuuggaauuaugucugcugaauaauaaacuuuuuugaaauaauaaaucugguagaaaaaugagaucuaaaaaaaaaaaaaaaaaaaaaaaaaaaaaaaaaaaaaaaaaaaaaaaaaaaaaaaaaaaaaaaaaaaaaaaaaaaaaaaaaaaaaaaaaaaaaaaaaaaa

SEQ ID NO: 34401 - RNA, 1788 nt, Artificial Sequence
  mRNA product Design b-4 (A100) comprising derived and/or modified sequence from LASV(LM765-SLE-2012;Clade IV)__AIT17814__GPCmut8 (opt4)
aggagagucccgcagucggcguccagcggcucugcuuguucgugugugugucguugcaggccuuauucaagcuuaccaugggccagaucgugaccuucuuccaggaggugccccacgugaucgaggaggugaugaacaucgugcugaucgcccugagcauccuggccgugcugaagggccuguacaacuucgccaccugcggccuggugggccuggugaccuuccugcugcugugcggcagaagcugcaccaccagccuguacaagggcguguacgagcugcagacccuggagcugaacauggagacccugaacaugugcaugccccugagcugcaccaagaacaacagccaccacuacaucauggugggcaacgagaccggccuggagcugacccugaccaacaccagcaucaucgaccacaaguucugcaaccugagcgacgcccacagaaagaaccuguacgaccacgcccugaugagcaucaucagcaccuuccaccugagcauccccaacuucaaccaguacgaggccaugagcugcgacuucaacggcggcaagaucagcgugcaguacaaccugagccacagcuacgccaaggacgccgccgaccacugcggcaccguggccaacggcgugcugcagaccuucaugagaauggccuggggcggcagcuacaucgcccuggacagcggcagaggcagaugggacugcaucaugaccagcuaccaguaccugaucauccagaacaccaccugggaggaccacugccaguucagcagacccagccccaucggcuaccugggccugcugagccagagaaccagagacaucuacaucagcagaagacugcugggcaccuucaccuggacccugagcgacagcgagggcaaggacacccccggcggcuacugccugaccagauggaugcugaucgaggccgagcugaagugcuucggcaacaccgccguggccaagugcaacgagaagcacgacgaggaguucugcgacaugcugagacuguucgacuucugcaagcaggccauccagagacugaaggcccccgcccagaugagcauccagcugaucaacaaggccgugaacgcccugaucaacgaccagcugaucaugaagaaccaccugagagacaucaugggcauccccuacugcaacuacagcaaguacugcuaccugaaccacaccaccaccggcaagaccagccugcccaagugcugccuggugagcaacggcagcuaccugaacgagacccacuucagcgacgacaucgagcagcaggccgacaacaugaucaccgagaugcugcagaaggaguacauggagagacagggcaagaccccccugggccugguggaccuguucguguucagcaccagcuucuaccugaucagcaucuuccugcaccuggugaagauccccacccacagacacaucgugggcaagcccugccccaagccccacagacugaaccacaugggcaucugcagcugcggccuguacaagcagcccggcgugcccgugaaguggaagagaugaggacuaguaauaaggaaacuguaugaaugucugugggcaggaagugaagagauccuucuguaaagguuuuuggaauuaugucugcugaauaauaaacuuuuuugaaauaauaaaucugguagaaaaaugagaucuaaaaaaaaaaaaaaaaaaaaaaaaaaaaaaaaaaaaaaaaaaaaaaaaaaaaaaaaaaaaaaaaaaaaaaaaaaaaaaaaaaaaaaaaaaaaaaaaaaaa

SEQ ID NO: 34402 - RNA, 1788 nt, Artificial Sequence
  mRNA product Design b-4 (A100) comprising derived and/or modified sequence from LASV(LM776-SLE-2012;Clade IV)__AIT17824__GPCmut8 (opt4)
aggagagucccgcagucggcguccagcggcucugcuuguucgugugugugucguugcaggccuuauucaagcuuaccaugggccagaucgugaccuucuuccaggaggugccccacgugaucgaggaggugaugaacaucgugcugaucgcccugagcauccuggccgugcugaagggccuguacaacuucgccaccugcggccuggugggccuggugaccuuccugcugcugugcggcagaagcugcaccaccagcguguacaagggcguguacgagcugcagacccuggagcugaacauggagacccugaacaugugcaugccccugagcugcaccaagaacaacagccaccacuacaucauggugggcaacgagaccggccuggagcugacccugaccaacaccagcaucaucaaccacaaguucugcaaccugagcgacgcccacaagaagaaccuguacgaccacgcccugaugagcaucaucagcaccuuccaccugagcauccccaacuucaaccaguacgaggccaugagcugcgacuucaacggcggcaagaucagcgugcaguacaaccugagccacagcuacgccggcgacgccgccaaccacugcggcaccguggccaacggcgugcugcagaccuucaugagaauggccuggggcggcagcuacaucgcccuggacagcggccacggcaagugggacugcaucaugaccagcuaccaguaccugaucauccagaacaccaccugggaggaccacugccaguucagcagacccagccccaucggcuaccugggccugcugagccagagaaccagagacaucuacaucagcagaagacugcugggcaccuucaccuggacccugagcgacagcgagggcaaggacacccccggcggcuacugccugaccagauggaugcugaucgaggccgagcugaagugcuucggcaacaccgccguggccaagugcaacgagaagcacgacgaggaguucugcgacaugcugagacuguucgacuucugcaagcaggccauccagagacugaaggcccccgcccagaugagcauccagcugaucaacaaggccgugaacgcccugaucaacgaccagcugaucaugaagaaccaccugagagacaucaugggcauccccuacugcaacuacagcaaguacugcuaccugaaccacaccaccaccggcaagaccagccugcccaagugcugccuggugagcaacggcagcuaccugaacgagacccacuucagcgacgacaucgagcagcaggccgacaacaugaucaccgagaugcugcagaaggaguacauggagagacagggcaagaccccccugggccugguggaccuguucguguucagcaccagcuucuaccugaucagcaucuuccugcaccuggugaagauccccacccacagacacaucgugggcaagagcugccccaagccccacagacugaaccacaugggcaucugcagcugcggccuguacaagcagcccggcgugcccgugagauggaagagaugaggacuaguaauaaggaaacuguaugaaugucugugggcaggaagugaagagauccuucuguaaagguuuuuggaauuaugucugcugaauaauaaacuuuuuugaaauaauaaaucugguagaaaaaugagaucuaaaaaaaaaaaaaaaaaaaaaaaaaaaaaaaaaaaaaaaaaaaaaaaaaaaaaaaaaaaaaaaaaaaaaaaaaaaaaaaaaaaaaaaaaaaaaaaaaaaa

SEQ ID NO: 34403 - RNA, 1788 nt, Artificial Sequence
  mRNA product Design b-4 (A100) comprising derived and/or modified sequence from LASV(Mad39;Clade IV)__ANH09722__GPCmut8 (opt4)
aggagagucccgcagucggcguccagcggcucugcuuguucgugugugugucguugcaggccuuauucaagcuuaccaugggccagaucgugaccuucuuccaggaggugccccacgugaucgaggaggugaugaacaucgugcugaucgcccugagcauccuggccgugcugaagggccuguacaacguggccaccugcggccugaucggccuggugaccuuccugcugcugugcggcagaagcugcaccaccacccuguacaagggcguguacgagcugcaggcccuggagcugaacauggagacccugaacaugugcaugccccugagcugcaccaagaacaacagccaccacuacaucagagugggcaacgagaccggccuggagcugacccugaccaacaccagccugaucaaccacaaguucugcaaccugagcgacgcccacaagaagaaccuguacgaccacgcccugaugagcaucaucagcaccuuccaccugagcauccccaacuucaaccaguacgaggccaugagcugcgacuucaacgacggcaagaucagcgugcaguacaaccugagccacaccuacgccggcgacaccgccaaccacugcggcaccguggccaacggcgugcugcagaccuucaugagaauggccuggggcggcagcuacaucgcccuggacagcggcagaggcggcugggacugcaucaugaccagcuaccaguaccugaucauccagaacaccaccugggaggaccacugccaguucagcagacccagccccaucggcuaccugggccugcugagccagagaaccagagacaucuacaucagcagaagacugcugggcaccuucaccuggacccugagcgacagcgagggcaaggacacccccggcggcuacugccugaccagauggaugcugaucgaggccgagcugaagugcuucggcaacaccgccguggccaagugcaacgagaagcacgacgaggaguucugcgacaugcugagacuguucgacuucugcaagcaggccauccagagacugaaggcccccgcccagaugagcauccagcugaucaacaaggccgugaacgcccugaucaacgaccagcugaucaugaagaaccaccugagagacaucaugggcauccccuacugcaacuacagcaaguacugcuaccugaaccacaccgugaccggcaagaccagccugcccaagugcugccuggugagcaacggcagcuaccugaacgagacccacuucagcgacgacaucgagcagcaggccgacaacaugaucaccgagaugcugcagaaggaguacauggagagacagggcaagaccccccugggccugguggaccuguucguguucagcaccagcuucuaccugaucagcaucuuccugcaccuggugaagauccccacccacagacacguggugggcaagcccugccccaagccccacagacugaaccacaugggcaucugcagcugcggcuucuacaagcagcccggcgugcccgugagauggaagagaugaggacuaguaauaaggaaacuguaugaaugucugugggcaggaagugaagagauccuucuguaaagguuuuuggaauuaugucugcugaauaauaaacuuuuuugaaauaauaaaucugguagaaaaaugagaucuaaaaaaaaaaaaaaaaaaaaaaaaaaaaaaaaaaaaaaaaaaaaaaaaaaaaaaaaaaaaaaaaaaaaaaaaaaaaaaaaaaaaaaaaaaaaaaaaaaaa

SEQ ID NO: 34404 - RNA, 1788 nt, Artificial Sequence
  mRNA product Design b-4 (A100) comprising derived and/or modified sequence from LASV(Z0947-SLE-2011;Clade IV)__AIT17840__GPCmut8 (opt4)
aggagagucccgcagucggcguccagcggcucugcuuguucgugugugugucguugcaggccuuauucaagcuuaccaugggccagaucgugaccuucuuccaggaggugccccacgugaucgaggaggugaugaacaucgugcugaucgcccugagcauccuggccgugcugaagggccuguacaacuucgccaccugcggccuggugggccuggugaccuuccugcugcugugcggcagaagcugcaccaucagccuguacaagggcguguacgagcugcagacccuggagcugaacauggagacccugaacaugugcaugccccugagcugcaccaagaacaacagccaccacuacaucauggugggcaacgagaccggccuggagcugacccugaccaacaccagcaucaucaaccacaaguucugcaaccugagcgacgcccacaagaagaaccuguacgaccacgcccugaugagcaucaucagcaccuuccaccugagcauccccaacuucaaccaguacgaggccaugagcugcgacuucaacggcggcaagaucagcgugcaguacaaccugagccacagcuacgccggcgacgccgccaaccacugcggcaccguggccaacggcgugcugcagaccuucaugagaauggccuggggcggcagcuacaucgcccuggacagcggcagagacagaugggacugcaucaugaccagcuaccaguaccugaucauccagaacaccaccugggaggaccacugccaguucagcagacccagccccaucggcuaccugggccugcugagccagagaaccagagacaucuacaucagcagaagacugcugggcaccuucaccuggacccugagcgacagcgagggcaaggacacccccggcggcuacugccugaccagauggaugcugaucgaggccgagcugaagugcuucggcaacaccgccguggccaagugcaacgagaagcacgacgaggaguucugcgacaugcugagacuguucgacuucugcaagcaggccauccagagacugaaggcccccgcccagaugagcauccagcugaucaacaaggccgugaacgcccugaucaacgaccagcugaucaugaagaaccaccugagagacaucaugggcauccccuacugcaacuacagcaaguacugcuaccugaaccacaccaccaccggcaagaccagccugcccaagugcugccuggugagcaacggcagcuaccugaacgagacccacuucagcgacgacaucgagcagcaggccgacaacaugaucaccgagaugcugcagaaggaguacauggagagacagggcaagaccccccugggccugguggaccuguucguguucagcaccagcuucuaccugaucagcaucuuccugcaccuggugaagauccccacccacagacacaucgugggcaagcccugccccaagccccacagacugaaccacaugggcaucugcagcugcggccuguacaagcagcccggcgugcccgugaaguggaagagaugaggacuaguaauaaggaaacuguaugaaugucugugggcaggaagugaagagauccuucuguaaagguuuuuggaauuaugucugcugaauaauaaacuuuuuugaaauaauaaaucugguagaaaaaugagaucuaaaaaaaaaaaaaaaaaaaaaaaaaaaaaaaaaaaaaaaaaaaaaaaaaaaaaaaaaaaaaaaaaaaaaaaaaaaaaaaaaaaaaaaaaaaaaaaaaaaa

SEQ ID NO: 34405 - RNA, 1788 nt, Artificial Sequence
  mRNA product Design b-4 (A100) comprising derived and/or modified sequence from LASV(Josiah;Clade IV)__NP_694870__GPCmut8 (opt5)
aggagagucccgcagucggcguccagcggcucugcuuguucgugugugugucguugcaggccuuauucaagcuuaccaugggccagaucgugaccuucuuucaagaggucccccacguuauugaagaggugaugaacaucgugcugauugcccucagcguccuggcugugcuuaaggggcuguacaauuucgccacaugcggacucguuggccuggugacguuucuucugcucugugggagauccugcaccacaucucuguauaaaggagucuacgaacugcagacccucgagcugaacauggaaacacuuaauauguguaugccucugagcugcaccaagaacaauucccaucacuauaucauggugggcaacgagacagggcucgagcugacccuuacgaauaccucuauuaucaaccauaaauucuguaaucugagcgacgcgcacaagaaaaaccucuacgaucaugcucugauguccaucauuucuacauuucaccugagcaucccgaauuucaaccaguaugaagccauguccugcgacuuuaauggaggcaagauuagcguucaguacaaccucucucacuccuaugccggcgaugcugccaaucauugugggaccguggcuaacggaguccugcaaacauucaugcggauggccuggggcgggagcuacaucgcgcuugacucuggacgcggcaacugggauugcauuaugaccuccuaccaguaucugaucauucagaauacgacaugggaggaccacugucaguuuagcagacccucuccuaucggguaccucggacugcuuucccaacggacccgcgauaucuauauuagcagacggcugcucggcacauucaccuggacccuguccgacucugaaggcaaggauacacccgggggauacugccugacgcgcuggaugcucaucgaggccgagcugaaauguuuuggcaacaccgcuguggccaagugcaaugaaaaacaugacgaggaguucugcgauaugcuuagacuguuugacuucuguaagcaggcuauucagcggcucaaagccccugcgcagaugagcauccaacugauuaacaaggccgugaaugcucuuaucaacgaucagcugaucaugaagaaucaccuccgcgacauuauggggauccccuauugcaacuacuccaaauauuguuaccugaaucacacaaccacaggaagaaccagccugccuaagugcugucucgucucuaacggcuccuaccugaaugaaacgcauuucagcgacgauauugaacagcaagccgacaacaugaucacagagaugcuucagaaagaguauauggaacggcaggggaagaccccgcugggacucguugaucuguuuguguucucuaccagcuuuuaccugauuuccaucuuccuucaccucgugaaaauccccacacaucgccacauugucggcaagucuugcccuaaaccccauagacugaaucacaugggcaucuguagcugcgggcuguauaagcagccuggagugcccguuaaguggaaacggugaggacuaguaauaaggaaacuguaugaaugucugugggcaggaagugaagagauccuucuguaaagguuuuuggaauuaugucugcugaauaauaaacuuuuuugaaauaauaaaucugguagaaaaaugagaucuaaaaaaaaaaaaaaaaaaaaaaaaaaaaaaaaaaaaaaaaaaaaaaaaaaaaaaaaaaaaaaaaaaaaaaaaaaaaaaaaaaaaaaaaaaaaaaaaaaaa

SEQ ID NO: 34406 - RNA, 1785 nt, Artificial Sequence
  mRNA product Design b-4 (A100) comprising derived and/or modified sequence from LASV(LP;Clade I)__AAF86701__GPCmut8 (opt5)
aggagagucccgcagucggcguccagcggcucugcuuguucgugugugugucguugcaggccuuauucaagcuuaccaugggccagaucauuaccuucuuucaagaggugccccacgucaucgaagagguuaugaacauugugcugaucgcccucagccugcuugcuauucugaaggggcucuacaauaucgccacaugcggaaucauuggccugguggcguuccuuuuucugugugggaaauccugcucucucacgcugaagggaggcuaugaacugcagacccucgagcugaacauggaaacacuuaauauguguaugccucugagcugcaccaaaaacuccucucaucacuacaucagagucgggaaugagacaggacucgagcugacccuuacaaacaccagcauuaucaaucauaaguucuguaaccuguccgacgcucacaaaaagaaucucuaugaucaugcccugaugucuauuaucagcacguuucaccuguccauuccgaacuucaaucaguacgaagccaugagcugcgacuuuaacggcggcaagaucucugugcaguauaaucucucccacagcuacgcuggggaugccgcugagcauuguggaaccguugccaacggcgugcugcaaacauucaugcggauggcguggggagggcgcuauaucgcccuugacucuggcaaagggaauugggauugcauuaugaccuccuaccaguaccugaucauucagaacacaaccugggaagaccacugucaguuuagcagacccucuccuaucggauaucucggccugcuuucccaacggacgcgcgauauuuacaucagcagacggcugcucggcacauucaccuggacacuguccgacucugaggggaacgagacccccggaggcuauugccugacccgcuggaugcucaucgaagcugagcugaaguguuuugggaauacagccgucgcuaaaugcaacgaaaagcaugaugaggaguucugcgacaugcuuagacuguuugauuucuguaaacaggccauucggcgccucaaggcgccugcccagaugagcauccagcugauuaauaaggcugugaacgcccuuaucaaugaccaacugauuaugaaaaaccaccucagagauaucaugggaauccccuacugcaauuauuccaaguacuguuaucugaaccacacgagcucuggccggaccucccugccuaaaugcugucucauuagcaaugggucuuaccugaacgaaacacaguucagcgacgacaucgagcagcaagcugauaauaugauuaccgaaaugcuucagaaggaguacaucgaacgccagggaaaaacaccgcugggccucguugacauuuuuaucuucuccaccucuuuuuaucugauuagcaucuuccugcaucuuaucaagauucccacgcacagacauaucgugggcaaaccuugccccaagccucaccggcucaaccauaugggggucuguuccugcggacuguacaagcaccccggcgugccgacaaaauggaagcgcugaggacuaguaauaaggaaacuguaugaaugucugugggcaggaagugaagagauccuucuguaaagguuuuuggaauuaugucugcugaauaauaaacuuuuuugaaauaauaaaucugguagaaaaaugagaucuaaaaaaaaaaaaaaaaaaaaaaaaaaaaaaaaaaaaaaaaaaaaaaaaaaaaaaaaaaaaaaaaaaaaaaaaaaaaaaaaaaaaaaaaaaaaaaaaaaaa

SEQ ID NO: 34407 - RNA, 1785 nt, Artificial Sequence
  mRNA product Design b-4 (A100) comprising derived and/or modified sequence from LASV(803213;Clade II)__AAF86703__GPCmut8 (opt5)
aggagagucccgcagucggcguccagcggcucugcuuguucgugugugugucguugcaggccuuauucaagcuuaccaugggccagaucauuaccuucuuucaagaggugccccacgucaucgaagagguuaugaacauugugcugaucgcccucagccugcuugcuauucugaaggggaucuacaauguggccacaugcggacucuucggccugaucuccuuucuucugcucugugggagaucuugcagcgucacguauaaaggaguguacgaacugcagacccuggagcucaacauggcgaaucugaacauguguaugccucuuuccugcacaaagaauaacucucaucacuauauuaugguuggcaaugaaaccgggcuggagcucacacugaccaacacaagcaucauuaaucauaaauucuguaaccuuuccgacgcucacaagaaaaaucuguacgaucaugcccucaugucuaucauuagcaccuuucaccuguccaucccgaacuucaaucaguaugaggccaugagcugcgacuuuaacggaggcaagauuucugugcaguacaaucugucccacagcuucgcugucgaugccgcuaaccauuguggcacgaucgccaacggggugcuccaaaccuuuaugcggauggcguggggaggcucuuauaucgcccuggacuccgggaagggaaauugggauugcauuaugacaagcuaccaguaccuuaucauucagaacaccacaugggaagaccacugucaguucucucgccccuccccuaucggcuaucuggggcuccugagccaaagaacccgggauauuuacaucucccgcagacuucugggaacguuuacauggacccucucugacagcgagggcaaugaagcucccggcggguauugccugacacgguggaugcugaucgaggccgagcucaaauguuucggaaacaccgcuguugccaagugcaaugaaaaacaugaugaggaauuuugcgacaugcugcgccuuuucgauuucuguaagcaggcgauuaaaagacugaagaccccugcccagauguccauccagcucauuaacaaggcugugaaugcccugaucaacgaccaacuuauuaugaaaaaucaucugcgggauaucaugggcauccccuacugcaacuauagccgcuacuguuaucucaaucacacagucacggggaagaccucucugccuagaugcugucugguguccaacggaagcuaccucaaugagacacacuuuucugacgacauugaacagcaggcugauaacaugaucaccgagaugcugcaaaaagaguacauggaccggcagggcaagacaccgcuugggcugguggaucucuucgucuuuagcaccuccuucuaucugauuucuaucuuucugcaccuuguuaaaauucccacgcaucgccacaucgugggaaagccuugccccaaaccucauagacucaaucacaugggcauuuguagcugcggccuguacaagcaccccggggugccggucaaguggaaacggugaggacuaguaauaaggaaacuguaugaaugucugugggcaggaagugaagagauccuucuguaaagguuuuuggaauuaugucugcugaauaauaaacuuuuuugaaauaauaaaucugguagaaaaaugagaucuaaaaaaaaaaaaaaaaaaaaaaaaaaaaaaaaaaaaaaaaaaaaaaaaaaaaaaaaaaaaaaaaaaaaaaaaaaaaaaaaaaaaaaaaaaaaaaaaaaaa

SEQ ID NO: 34408 - RNA, 1785 nt, Artificial Sequence
  mRNA product Design b-4 (A100) comprising derived and/or modified sequence from LASV(GA391;Clade III)__CAA36645__GPCmut8 (opt5)
aggagagucccgcagucggcguccagcggcucugcuuguucgugugugugucguugcaggccuuauucaagcuuaccaugggccagaucgugaccuucuuucaagaggucccccacguuauugaagaggugaugaacaucgugcugauugcccucagcauccuggcuauucuuaaggggcuguacaaugucgccacaugcggacucaucggccuggugacguuccuucugcucuccgggagaucuuguagccugaucuauaaaggaaccuacgaacugcagacacucgagcugaacauggaaacccuuaauaugugcaugccucuguccuguacaaagaacaauucucaucacuauauucggguuggcaacgagaccgggcucgagcugacacuuaccaauacgagcauccugaaccauaaauuuugcaaucucuccgacgcgcacaagcgcaaccuguacgaucauucucugaugagcauuaucuccaccuuccaccucagcauuccgaauuuuaaccaguaugaagcuaugucuugugacuucaauggaggcaaaaucacagugcaguacaaccugucccacagcuuugccgucgaugccgcuggccauugcgggacccuugccaauggagugcugcaaacauucaugagaauggcuuggggcgggucuuauauugcccucgacuccggacggggcaacugggauuguaucaugaccagcuaccaguaccugaucauucagaacacgacaugggacgaucacugccaguuuucucgccccuccccuaucggguaucuuggacugcucagccaaagaacccgggacauuuacaucucccgcagacugcugggcacauucaccuggacccucucugauagcgagggcaaugaaacacccgggggauauugucugacgcgguggaugcuuauugaggcggagcugaagugcuuuggcaacaccgccguugcuaaguguaaugaaaaacaugacgaggaguucugcgauaugcuccgccuguuugacuucugcaagcaggccaucagacggcuuaaaaccccugcucagauguccauccagcugauuaacaaggccgugaaugcgcucaucaacgaucaacugauuaugaaaaaucaucugcgcgacaucauggggauucccuacuguaacuauagcagauacugcuaucucaaucacacaucuacaggaaagaccucccugccucgguguugccuuaucagcaacggcucuuaccugaaugaaacgaaguucagcgacgauaucgaacagcaggccgacaacaugauuacagagaugcuccaaaaagaguacaucgaucgccaggggaagaccccgcugggacuggucgaccuuuuuguguucuccaccucuuuuuaucucauuagcaucuuccugcaccuggugaaaauucccacacacagacauaucgucggcaagccuugucccaaaccucaccggcucaaucauaugggcauuugcuccugugggcuguacaagcagcccggaguuccggugagauggaaacgcugaggacuaguaauaaggaaacuguaugaaugucugugggcaggaagugaagagauccuucuguaaagguuuuuggaauuaugucugcugaauaauaaacuuuuuugaaauaauaaaucugguagaaaaaugagaucuaaaaaaaaaaaaaaaaaaaaaaaaaaaaaaaaaaaaaaaaaaaaaaaaaaaaaaaaaaaaaaaaaaaaaaaaaaaaaaaaaaaaaaaaaaaaaaaaaaaa

SEQ ID NO: 34409 - RNA, 1788 nt, Artificial Sequence
  mRNA product Design b-4 (A100) comprising derived and/or modified sequence from LASV(AV;Clade V)__CCA30314__GPCmut8 (opt5)
aggagagucccgcagucggcguccagcggcucugcuuguucgugugugugucguugcaggccuuauucaagcuuaccaugggccagaucgugaccuucuuucaagaggucccccacguuauugaagaggugaugaacaucgugcugauugcccucagcauccuggcuguccuuaaggggcuguacaauauugccacaugcggacucaucggccugaucacguuccuucugcucugugggagauccugcucuagcaaccuguauaaaggaguguacgaacugcagucccucgaccugaauauggagacccuuaacauguguaugccucugucuugcacaaagaauaacagccaucacuauauucggguuggcaaugauaccgggcucgaacugacacuuaccaacacauccauccugaaucauaaauuuuguaaccucucugacgcgcacaagaaagaucuguacgaccaugcucugaugagcauuaucuccaccuuccaccucagcauuccgaauuuuaaccaguaugaggccaugucuugcgauuucaauggaggcaagaucuccgugcaguacaaccugagccacucuuaugccauugacgcugccaaucauuguggcacggucgcuaacgggauccuucaaaccuuuaugcgcauggccuggggaggcuccuacaucgcgcuggauagcgggagaggaaacugggacugcauuaugacaucuuaccaguaucucaucauucagaauaccacaugggagaaccacugucaguucucccggcccagcccuaucggcuaccuggggcuucugucccaacgcaccagagauauuuauaucucucggcgccuccugggaacguuuacauggacccugagcgacuccgaaggcaaugccacacccggcggguacugccucaccagauggaugcugaucgaggcugaacuuaaguguuucggaaacaccgccguggcuaaaugcaaugagaagcaugaugaggaauuuugcgacaugcugcgccucuucgauuuuuguaaacaggccauuagccggcugaagucuccugcgcagauguccauccagcuuauuaacaaagccguuaaugcucugaucaacgaccaacucauuaugaagaaucaccugagagacaucaugggcauccccuauugcaacuacagcaaguauuguuaccugaaucacacaauuacggggaaaaccucucucccuaagugcugucuggugagcaacggauccuaccuuaaugagacacauuucucugaugacaucgaacagcaggccgauaacaugauuaccgagaugcugcaaaaagaauauauggagcggcagggcaagacaccgcucgggcuggucgaccuguucguguuuagcaccuccuucuaccuuaucagcauuuuucuccgccuggugaaaauccccacgcacagacauauugucggaaagccuugccccaaaccucaccggcugaaucauaugggcaucuguucuugcggccucuauaagcagcccgggguuccggugcgcuggaagagaugaggacuaguaauaaggaaacuguaugaaugucugugggcaggaagugaagagauccuucuguaaagguuuuuggaauuaugucugcugaauaauaaacuuuuuugaaauaauaaaucugguagaaaaaugagaucuaaaaaaaaaaaaaaaaaaaaaaaaaaaaaaaaaaaaaaaaaaaaaaaaaaaaaaaaaaaaaaaaaaaaaaaaaaaaaaaaaaaaaaaaaaaaaaaaaaaa

SEQ ID NO: 34410 - RNA, 1785 nt, Artificial Sequence
  mRNA product Design b-4 (A100) comprising derived and/or modified sequence from LASV(Togo/2016/7082;Clade VI)__AMR44577__GPCmut8 (opt5)
aggagagucccgcagucggcguccagcggcucugcuuguucgugugugugucguugcaggccuuauucaagcuuaccaugggccagaucauuaccuucuuucaagaggugccccacgucaucgaagagguuaugaacauugugcugaucgcccucagccugcuugcuauucugaaggggguguacaaugucgccacaugcggaaucaucggccucgugacguuccuguuucuuugugggagauccugcucucugauuuauaaaggaagcuacgaacuccagacccuggagcugaacauggaaacacucaauauguguaugccucuguccugcaccaagaacucuagccaucacuauauccggguuggcaaugagacagggcuugagcugacccucacaaacaccuccauuaucaaucauaaauucuguaaccugucugacgcgcacaagcgcaaucuuuacgaucaugcucugaugagcauucucuccacguuucaccugagcaucccgaacuucaaucaguaugaagccaugucuugcgacuuuaacggaggcaaaauuuccgugcaguacaaucugagccacgccuaugcugucgaugccgcugagcauuguggcaccguggccaacgggguucuccaaacauucaugagaauggcguggggaggcucuuacaucgcccuggacuccgggcggggaaauugggauugcaucaugaccagcuaccaguaucuuauuauccagaacacaaccugggaagaccacugucaguuuucucgccccuccccuauuggcuaccuggggcuccugagccaaagaacgcgggauaucuauauuucccgcagacuucugggaacauucaccuggacacucucugacagcgagggcaacgagacccccggcggguacugccugacccgguggaugcugaucgaagcugagcucaaguguuuuggaaauacagccguggcuaagugcaacgaaaaacaugaugaggaguucugcgacaugcugcgccuuuuugauuucuguaagcaggccauccagagacugaaauccccugcgcagaugagcauucaacucaucaauaaggccgucaacgcucugauuaaugaccagcuuaucaugaaaaaccaucugcgggauaugaugggcauucccuauugcaauuacucuaaguauuguuaccucaaccacacguccagcgggcgcaccucucugccuaagugcugucuggugagcaauggauccuaccucaacgaaacacacuucucugacgacaucgagcagcaagccgauaauaugaucaccgaaaugcugcagaaagaguauauugacagacagggcaagacaccgcuugggcugguggaucucuuugucuucagcaccuccuuuuaccugaucagcauuuuccugcaccuuaucaaaauucccacgcaucggcacaucguuggaaagccuugccccaaaccucaucgccucaaccacaugggcauuuguucuugcggccuguauaagcagcccggggugccgacaagauggaaacggugaggacuaguaauaaggaaacuguaugaaugucugugggcaggaagugaagagauccuucuguaaagguuuuuggaauuaugucugcugaauaauaaacuuuuuugaaauaauaaaucugguagaaaaaugagaucuaaaaaaaaaaaaaaaaaaaaaaaaaaaaaaaaaaaaaaaaaaaaaaaaaaaaaaaaaaaaaaaaaaaaaaaaaaaaaaaaaaaaaaaaaaaaaaaaaaaa

SEQ ID NO: 34411 - RNA, 1785 nt, Artificial Sequence
  mRNA product Design b-4 (A100) comprising derived and/or modified sequence from LASV(KAK-428;Clade n.d. (VII))__ANH09740__GPCmut8 (opt5)
aggagagucccgcagucggcguccagcggcucugcuuguucgugugugugucguugcaggccuuauucaagcuuaccaugggccagaucgugaccuucuuucaagaggucccccacguuauugaagaggugaugaacaucgugcugauugcccucagccugcuugcuauccugaaggggcucuacaauuucgccacaugcggagucauuggccugaucacguuucuucugcucugugggagauccugcucugcgaccuauaaaggacaguacgaacugcagacacuggagcucaacauggaaagccugaauauguguaugccucuuuccugcaccaagaacaauucucaucacuauauccgggcuggcaacaauacagggcuggagcucacccugacaaacaccagcauuaucucccauaaauucuguaaucuuucugacgcccacaagaaaaaccuguacgaucauacgcucaugagcauuaucaccacauuucaccuguccauuccgaauuucaaccaguaugaggccaugagcugcgacuuuaauggaggcaagaucucuauucaauacaaccugucccacagcuaugcuggcgaugccgcucagcauugugggaccguggccaauggaguucuccagacauucaugcgcauggcguggggcgggucuuaccuggcccuugacuccggaagacggggcugggauugcaucaucagcucuuaccaguaucugauuauccaaaacaccacgugggacgaucacugucaguuuucccgccccagcccuauuggguaccucggauucgugucccagaagacaagagacaucuauauuucucggcgccugcuuggcaccuuuacauggacccugagcgauuccgaaggccaugacaugcccgggggauacugccucaccagauggaugcugaucgaggcugaucugaaauguuucggcaacacagccgucgcuaagugcaaugaaaaacacgacgaggaguuuugcgauauguggcgccucuucgacuucuguaagcaggccauccaacggcugaaagcgccugcccagaugaacauucagcuuaucaauaaggcugugaacgcccugauuaaugaccaacucaugaugaagaaccaccugagagauaucauggggauucccuauugcaauuacagcaaauuuuguuaucuuaacaauacgaccacaggacggaccucucugccucgcugcugucucaucuccaacggcagcuaccugaaugaaacacauuucucugacgauaucgagcagcaggcugacaacaugauuaccgaaaugcugcagaaggaguacauggauagacaagggaaaacgccgcucggacugguugaccuuuuuguguucagcacauccuuuuaucugaucaccauuuuccuccaccuggucaagauccccacccaucggcacauugugggcaaaccuugccccaagccucaucgccugaaucacaugggcaucuguucuugcgggcuuuacaaacagcccggagugccggucagauggaagcggugaggacuaguaauaaggaaacuguaugaaugucugugggcaggaagugaagagauccuucuguaaagguuuuuggaauuaugucugcugaauaauaaacuuuuuugaaauaauaaaucugguagaaaaaugagaucuaaaaaaaaaaaaaaaaaaaaaaaaaaaaaaaaaaaaaaaaaaaaaaaaaaaaaaaaaaaaaaaaaaaaaaaaaaaaaaaaaaaaaaaaaaaaaaaaaaaa

SEQ ID NO: 34412 - RNA, 1785 nt, Artificial Sequence; identical to SEQ ID NO: 34406
  mRNA product Design b-4 (A100) comprising derived and/or modified sequence from LASV(Pinneo-NIG-1969;Clade I)__AIT17836__GPCmut8 (opt5)

SEQ ID NO: 34413 - RNA, 1785 nt, Artificial Sequence
  mRNA product Design b-4 (A100) comprising derived and/or modified sequence from LASV(ISTH0009-NIG-2011;Clade II)__AIT17404__GPCmut8 (opt5)
aggagagucccgcagucggcguccagcggcucugcuuguucgugugugugucguugcaggccuuauucaagcuuaccaugggccagaucauuaccuucuuucaagaggugccccacgucaucgaagagguuaugaacauugugcugaucgcccucagccugcuugcuauucugaaggggaucuacaauguggccacaugcggacucuucggccuggucuccuuucuucugcucugugggagaucuugcagcacgaccuauaaaggaguguacgaacugcagacacuggagcucgacauggcgucccugaacauguguaugccucuuucuugcaccaagaauaacagccaucacuauaucaugguuggcaaugaaacagggcuggagcucacccugacaaacaccuccauuaucaaucauaaauucuguaaccuuucugaugcucacaagaaaaaucuguacgaccaugcccucaugagcauuaucuccacguuucaccugagcauuccgaacuucaaucaguaugaggccaugucuugcgauuuuaacggaggcaagaucuccgugcaguacaaucugagccacgcuuaugccgucgacgcugccaaccauuguggcaccauugcgaauggggugcuccaaacauucaugcggauggccuggggaggcucuuacaucgcucuggauuccgggaagggaagcugggacugcaucaugaccucuuaccaguaucuuauuauccagaacacaaccugggaagaucacugucaguuuucccgccccagcccuauuggcuaccuggggcuccugucccaaagaacgcgggacaucuauauuucucgcagacuucugggaacauucaccuggacacucagcgauuccgagggcaacgaaacccccggcggguacugccugacccgguggaugcugaucgaggccgagcucaaauguuuuggaaauacagcuguugccaagugcaacgaaaaacaugacgaggaguucugcgauaugcugcgccuuuuugacuucuguaagcaggcgaucagacggcugaaaacgccugcccagaugagcauucagcucaucaauaaggcugugaacgcccugauuaaugaucaacuuaucaugaagaaccaucugcgcgacauuaugggcauccccuauugcaauuacucuaaauauuguuaccucaaccacaccgucacagggaagaccucccugccuagaugcugucuggugagcaauggaucuuaccucaacgaaacacacuucagcgacgauaucgaacagcaggcugacaauaugauuaccgagcugcuucaaaaagaguauauggaucggcagggcaagacgccgcuggggcucguggaccuguuugucuucuccacaucuuuuuaccugaucagcauuuuccuucaccucaucaaaauucccacccaucgccacaucaccggaaagccuugccccaaaccucauagacugaaccacaugggcauuuguuccugcggccuguauaagcaccccgggguuccggugaaguggaaacggugaggacuaguaauaaggaaacuguaugaaugucugugggcaggaagugaagagauccuucuguaaagguuuuuggaauuaugucugcugaauaauaaacuuuuuugaaauaauaaaucugguagaaaaaugagaucuaaaaaaaaaaaaaaaaaaaaaaaaaaaaaaaaaaaaaaaaaaaaaaaaaaaaaaaaaaaaaaaaaaaaaaaaaaaaaaaaaaaaaaaaaaaaaaaaaaaa

SEQ ID NO: 34414 - RNA, 1785 nt, Artificial Sequence
  mRNA product Design b-4 (A100) comprising derived and/or modified sequence from LASV(ISTH2010-NIG-2012;Clade II)__AIT17482__GPCmut8 (opt5)
aggagagucccgcagucggcguccagcggcucugcuuguucgugugugugucguugcaggccuuauucaagcuuaccaugggccagaucauuaccuucuuucaagaggugccccacgucaucgaagagguuaugaacauugugcugaucgcccucagccugcuugcuauucugaaggggaucuacaauguggccacaugcggacucuucggccuggucuccuuucuucugcucugugggagaucuugcagcacgaccuauaaaggaguguacgaacugcagacacuggagcucgacauggcgucccugaacauguguaugccucuuucuugcaccaagaauaacagccaucacuauaucaugguuggcaaugaaacagggcuggagcucacccugacaaacaccuccauuaucaaucauaaauucuguaaccuuucugaugcucacaagaaaaaucuguacgaccaugcccucaugagcauuaucuccacguuucaccugagcauuccgaacuucaaucaguaugaggccaugucuugcgauuuuaacggaggcaagaucuccgugcaguacaaucugagccacgcuuaugccgucgacgcugccaaccauuguggcaccauugcgaauggggugcuccaaacauucaugcggauggccuggggaggcucuuacaucgcucuggauuccgggaagggaagcugggacugcaucaugaccucuuaccaguaucuuauuauccagaacauuacaugggaagaucacugucaguuuucccgccccagcccuaucggcuaccuggggcuccugucccaaagaacccgggacauuuauaucucucgcagacuucugggaacguucacauggacccucagcgauuccgagggcaacgaaacacccggcggguacugccugacccgguggaugcugaucgaggccgagcucaaauguuuuggaaauaccgcuguugccaagugcaacgaaaaacaugacgaggaguucugcgauaugcugcgccuuuuugacuucuguaagcaggcgauuagacggcugaaaacgccugcccagaugagcauccagcucauuaauaaggcugugaacgcccugaucaaugaucaacuuauuaugaagaaccaucugcgcgacaucaugggcauccccuauugcaauuacucuaaauauuguuaccucaaccacacagucaccgggaagacaucccugccuagaugcugucuggugagcaauggaucuuaccucaacgaaacccacuucagcgacgauauugaacagcaggcugacaauaugaucacagagcugcuucaaaaagaguauauugaucggcagggcaagaccccgcuggggcucguggaccuguuugucuucuccacgucuuuuuaccugaucagcauuuuccuucaccucguuaaaauccccacacaucgccacguggugggaaagccuugccccaaaccucauagacugaaccacaugggcauuuguuccugcggccuguauaagcaccccggggucccggugaaguggaaacggugaggacuaguaauaaggaaacuguaugaaugucugugggcaggaagugaagagauccuucuguaaagguuuuuggaauuaugucugcugaauaauaaacuuuuuugaaauaauaaaucugguagaaaaaugagaucuaaaaaaaaaaaaaaaaaaaaaaaaaaaaaaaaaaaaaaaaaaaaaaaaaaaaaaaaaaaaaaaaaaaaaaaaaaaaaaaaaaaaaaaaaaaaaaaaaaaa

SEQ ID NO: 34415 - RNA, 1785 nt, Artificial Sequence
  mRNA product Design b-4 (A100) comprising derived and/or modified sequence from LASV(Lassa virus/H.sapiens-wt/NGA/2015/ISTH_0543;Clade II)__AVO03639__GPCmut8 (opt5)
aggagagucccgcagucggcguccagcggcucugcuuguucgugugugugucguugcaggccuuauucaagcuuaccaugggccagaucauuaccuucuuucaagaggugccccacgucaucgaagagguuaugaacauugugcugaucgcccucagccugcuugcuauucugaaggggaucuacaauguggccacaugcggacucuucggccuggucuccuuucuucugcucugugggagaucuugcagcacgaccuauaaaggaguguacgaacugcagacacuggagcucgacauggcgaaccugaauauguguaugccucuuuccugcaccaagaacaauucucaucacuauaucaugguuggcaacgaaacagggcuggagcucacccugacaaauaccagcauuaucaaccauaaauucuguaaucuuuccgaugcucacaagaaaaaccuguacgaccaugcccucaugucuauuaucagcacguuucaccuguccauuccgaauuucaaccaguaugaggccaugagcugcgauuuuaauggaggcaagaucucugugcaguacaaccugucccacaccuaugcugucgacgccgcuaaucauuguggcacaauugccaacggggugcuccaaaccuucaugcggauggcguggggaggcagcuacaucgcccuggauucugggaagggauccugggacugcaucaugacaagcuaccaguaucuuguuauucagaacaccacgugggaagaucacugucaguuuucucgccccuccccuaucggcuaccuggggcuccugagccaaagaacacgggacauuuauaucucccgcagacuucugggaaccuucacauggacccucucugauagcgagggcaaugaaacccccggcggguacugccugacacgguggaugcugauugaggcugagcucaaauguuuuggaaacacggccguggcuaagugcaaugaaaaacaugacgaggaguucugcgauaugcugcgccuuuuugacuucuguaagcaggccaucagacggcugaaaaccccugcgcagauguccauccagcucauuaacaaggccgucaaugcucugaucaacgaucaacuuauuaugaagaaucaucugcgcgacaucaugggcauucccuauugcaacuacagcaaauauuguuaccucaaucacacagugaccgggaagacaucucugccuagaugcugucugguguccaacggaagcuaccucaaugaaacccacuucucugacgauaucgaacagcaggccgacaacaugaucacggagcugcuucaaaaagaguauauugaucggcagggcaagacaccgcuggggcucgucgaccuguuuguuuucagcaccuccuuuuaccugaucucuauuuuccuucaccucgugaaaauccccacccaucgccacauuacaggaaagccuugccccaaaccucauagacugaaucacaugggcaucuguagcugcggccuguauaagcaccccggggugccggucaaguggaaacggugaggacuaguaauaaggaaacuguaugaaugucugugggcaggaagugaagagauccuucuguaaagguuuuuggaauuaugucugcugaauaauaaacuuuuuugaaauaauaaaucugguagaaaaaugagaucuaaaaaaaaaaaaaaaaaaaaaaaaaaaaaaaaaaaaaaaaaaaaaaaaaaaaaaaaaaaaaaaaaaaaaaaaaaaaaaaaaaaaaaaaaaaaaaaaaaaa

SEQ ID NO: 34416 - RNA, 1785 nt, Artificial Sequence
  mRNA product Design b-4 (A100) comprising derived and/or modified sequence from LASV(Lassa virus/H.sapiens-wt/NGA/2016/ISTH_0009;Clade II)__AVO03571__GPCmut8 (opt5)
aggagagucccgcagucggcguccagcggcucugcuuguucgugugugugucguugcaggccuuauucaagcuuaccaugggccagaucauuaccuucuuucaagaggugccccacgucaucgaagagguuaugaacauugugcugaucgcccucagccugcuugcuauucugaaggggaucuacaauguggccacaugcggacuccugggccuugucuccuuccugcuccugugugggagaucuugcagcacgaccuauaaaggaguguacgaacugcagacacucgagcuggacauggcgucccuuaacauguguaugccucugucuugcaccaagaauaacagccaucacuauaucaugguuggcaaugaaacagggcucgagcugacccuuacaaacaccuccauuaucaaucauaaauuuuguaaccugucugaugcucacaagaaaaaucucuacgaccaugcccugaugagcauuaucuccacguuccaccugagcauuccgaacuuuaaucaguaugaggccaugucuugcgauuucaacggaggccggaucuccgugcaguacaaucucagccacucuuaugcugucgacgccgcuaaccauuguggcaccauugccaauggggugcugcaaacauuuaugcgcauggcguggggaggcuccuacaucgcccuugauagcgggaagggaucuugggacugcaucaugaccuccuaccaguaucugauuauccagaacacaaccugggaagaucacugucaguucagcagacccuccccuauuggcuaccucgggcugcuuucucaacggacgcgcgacaucuauauuagcagacggcugcucggaacauuuaccuggacacuguccgauagcgagggcaacgaaacccccggcggguacugccugacccgcuggaugcucaucgaggcugagcugaaguguuucggaaauacagccguugcuaaaugcaacgaaaagcaugacgaggaauuuugcgauaugcuuagacuguucgacuuuuguaaacaggccauccggcgccucaagacgccugcgcagaugucuauucagcugaucaauaaagccgugaacgcucuuauuaaugaucaacugaucaugaagaaccaccucagagacauuaugggcauccccuauugcaauuacuccaaguauuguuaccugaaccacaccgucacagggaaaaccagccugccucggugcugucucgugucuaauggaagcuaccugaacgagacacauuucuccgacgauaucgaacagcaggccgacaauaugauuaccgagcuucugcaaaaggaguauaucgaucgccagggcaaaacgccgcucgggcugguggaccuguucgucuuuucuaccagcuucuaccuuauuuccaucuuucuccaccugguuaagauucccacacauagacacaucaccggaaaaccuugccccaagccucaucggcugaaccacaugggcauuuguagcugcggccucuauaaucaccccggggugccggugaaauggaagcgcugaggacuaguaauaaggaaacuguaugaaugucugugggcaggaagugaagagauccuucuguaaagguuuuuggaauuaugucugcugaauaauaaacuuuuuugaaauaauaaaucugguagaaaaaugagaucuaaaaaaaaaaaaaaaaaaaaaaaaaaaaaaaaaaaaaaaaaaaaaaaaaaaaaaaaaaaaaaaaaaaaaaaaaaaaaaaaaaaaaaaaaaaaaaaaaaaa

SEQ ID NO: 34417 - RNA, 1785 nt, Artificial Sequence
  mRNA product Design b-4 (A100) comprising derived and/or modified sequence from LASV(Lassa virus/H.sapiens-wt/NGA/2016/ISTH_0017;Clade II)__AVO03567__GPCmut8 (opt5)
aggagagucccgcagucggcguccagcggcucugcuuguucgugugugugucguugcaggccuuauucaagcuuaccaugggccagaucauuaccuucuuucaagaggugccccacgucaucgaagagguuaugaacauugugcugaucgcccucagccugcuugcuauucugaaggggaucuacaauguggccacaugcggacucuucggccuggucuccuuucuucugcucugugggagaucuugcagcacgaccuauaaaggaguguacgaacugcagacacuggagcucgacauggcgucccugaacauguguaugccucuuucuugcaccaagaauaacagccaucacuauaucaugguuggcaaugaaacagggcuggagcucacccugacaaacaccuccauuaucaaucauaaauucuguaaccuuucugaugcucacaagaaaaaucuguacgaccaugcccucaugagcauuaucuccacguuucaccugagcauuccgaacuucaaucaguaugaggccaugucuugcgauuuuaacggaggcaagaucuccgugcaguacaaucugagccacaccuaugcuauugacgccgcuaaccauuguggcacaaucgccaaugggguccuccaaaccuucaugcggauggcguggggaggcucuuacaucgcccuggauuccgggaagggaagcugggacugcauuaugacaucuuaccaguaucuuaucauucagaacaccacgugggaagaucacugucaguuuucccgccccagcccuaucggcuaccuggggcuccugucccaaagaacacgggacauuuauaucucucgcagacuucugggaaccuucacauggacccucagcgauuccgagggcaacgaaacccccggcggguacugccugacacgguggaugcugaucgaggcugagcucaaauguuuuggaaauacggccguggcuaagugcaacgaaaaacaugacgaggaguucugcgauaugcugcgccuuuuugacuucuguaagcaggccauuagacggcugaaaaccccugcgcagaugagcauccagcucauuaauaaggccguuaacgcucugaucaaugaucaacuuauuaugaagaaccaucugcgcgacaucaugggcauccccuauugcaauuacucuaaauauuguuaccucaaccacacagugaccgggaagacaucccugccuagaugcugucuggucagcaauggaucuuaccucaacgaaacccacuucagcgacgauauugaacagcaggccgacaauaugaucacggagcugcuucaaaaagaguauauggaucggcagggcaagacaccgcuggggcucguggaccuguuuguguucuccaccucuuuuuaccugauuagcaucuuccuucaccucguccgcauucccacccauagacacguuaucggaaaaccuugccccaagccucaucggcugaaccacaugggcauuuguuccugcggccuguauaaacaccccggggugccggugaaguggaagcgcugaggacuaguaauaaggaaacuguaugaaugucugugggcaggaagugaagagauccuucuguaaagguuuuuggaauuaugucugcugaauaauaaacuuuuuugaaauaauaaaucugguagaaaaaugagaucuaaaaaaaaaaaaaaaaaaaaaaaaaaaaaaaaaaaaaaaaaaaaaaaaaaaaaaaaaaaaaaaaaaaaaaaaaaaaaaaaaaaaaaaaaaaaaaaaaaaa

SEQ ID NO: 34418 - RNA, 1785 nt, Artificial Sequence
  mRNA product Design b-4 (A100) comprising derived and/or modified sequence from LASV(Lassa virus/H.sapiens-wt/NGA/2018/ISTH_0959;Clade II)__AVV65099__GPCmut8 (opt5)
aggagagucccgcagucggcguccagcggcucugcuuguucgugugugugucguugcaggccuuauucaagcuuaccaugggccagaucauuaccuucuuucaagaggugccccacgucaucgaagagguuaugaacauugugcugaucgcccucagccugcuugcuauucugaaggggaucuacaauguggucacaugcggacucuucggccugguguccuuucuucugcucugugggagaucuugcagcacgaccuauaaaggaguuuacgaacugcagacacuggagcucgacauggccucccugaacauguguaugccucuuucuugcaccaagaauaacagccaucacuauaucauggugggcaaugaaacagggcuggagcucacccugacaaacaccuccauuaucaaucauaaauucuguaaccuuucugaugcgcacaagaaaaaucuguacgaccaugcucucaugagcauuaucuccacguuucaccugagcauuccgaacuucaaucaguaugaggccaugucuugcgauuuuaacggaggcaagaucuccguccaguacaaucugagccacgccuaugcuauugacgccgcuaaccauuguggcaccaucgccaauggggugcuccaaacauucaugcggauggcguggggaggcucuuacaucgcccuggauuccgggaagggaagcugggacugcauuaugaccucuuaccaguaucuuaucauucagaacacaaccugggaagaucacugucaguuuucccgccccagcccuaucggcuaccuggggcuccugucccaaagaacgcgggacauuuauaucucucgcagacuucugggaacauucaccuggacacucagcgauuccgagggcaacgaaacccccggcggguacugccugacccgguggaugcugaucgaggcugagcucaaauguuuuggaaauacagccguugcuaagugcaacgaaaaacaugacgaggaguucugcgauaugcugcgccuuuuugacuucuguaagcaggccauuagacggcugaaaacgccugcgcagaugagcauccagcucauuaauaaggccgugaacgcucugaucaaugaucaacuuauuaugaagaaccaucugcgcgacaucaugggcauccccuauugcaauuacucuaaauauuguuaccucaaccacaccgucacagggaagaccucccugccuagaugcugucuggugagcaauggaucuuaccucaacgaaacacacuucagcgacgauauugaacagcaggccgacaauaugaucaccgagcugcuucaaaaagaguauauugaucggcagggcaagacgccgcuggggcucguggaccuguuugucuucuccacaucuuuuuaccugaucagcauuuuccuucaccucguuaaaauccccacccaucgccacgugauuggaaagccuugccccaaaccucauagacugaaccacaugggcaucuguuccugcggccuguauaagcaccccggggugccggucaaguggaaacggugaggacuaguaauaaggaaacuguaugaaugucugugggcaggaagugaagagauccuucuguaaagguuuuuggaauuaugucugcugaauaauaaacuuuuuugaaauaauaaaucugguagaaaaaugagaucuaaaaaaaaaaaaaaaaaaaaaaaaaaaaaaaaaaaaaaaaaaaaaaaaaaaaaaaaaaaaaaaaaaaaaaaaaaaaaaaaaaaaaaaaaaaaaaaaaaaa

SEQ ID NO: 34419 - RNA, 1785 nt, Artificial Sequence
  mRNA product Design b-4 (A100) comprising derived and/or modified sequence from LASV(LASV003-NIG-2008;Clade II)__AIT17580__GPCmut8 (opt5)
aggagagucccgcagucggcguccagcggcucugcuuguucgugugugugucguugcaggccuuauucaagcuuaccaugggccagaucauuaccuucuuucaagaggugccccacgucaucgaagagguuaugaacauugugcugaucgcccucagccugcuugcuauucugaaggggaucuacaauguggccacaugcggacucuucggccuggucuccuuucuucugcucugugggagaucuugcagcacgaccuauaaaggaguguacgaacugcagacacuggagcucgacauggcgucccugaacauguguaugccucuuucuugcaccaagaauaacagccaucacuauaucaugguuggcaaugaaacagggcuggagcucacccugacaaacaccuccauuaucaaucauaaauucuguaaccuuucugaugcucacaagaaaaaucuguacgaccaugcccucaugagcauuaucuccacguuucaccugagcauuccgaacuucaaucaguaugaggccaugucuugcgauuuuaacggaggcaagaucuccgugcaguacaaucugagccacaccuaugcugucgacgccgcuaaccauuguggcacaauugccaauggggugcuccaaaccuucaugcggauggcguggggaggcucuuacaucgcccuggauuccgggaagggaagcugggacugcaucaugacaucuuaccaguaucuuauuauccagaacaccacgugggaagaucacugucaguuuucccgccccagcccuauuggcuaccuggggcuccugucccaaagaacacgggacaucuauauuucucgcagacuucugggaaccuucacauggacccucagcgauuccgagagcaacgaaacccccggcggcuacugccugacacgguggaugcugaucgaggcugagcucaaauguuuugggaauacggccguugcuaagugcaacgaaaaacaugacgaggaguucugcgauaugcugcgccuuuuugacuucuguaagcaggccaucagacggcugaaagcgccugcccagaugucuauucagcucaucaauaaggcugugaacgcccugauuaaugaucaacuuaucaugaagaaccaucugcgcgacauuaugggaauccccuauugcaauuacuccaaauauuguuaccucaaccacaccgucacaggcagaaccagccugccucggugcugucuggugucuaaugggagcuaccucaacgaaacacacuucuccgacgauaucgaacagcaggcugacaauaugauuaccgagcugcuucaaaaggaguauauggaucgccagggaaaaacgccgcugggccucguggaccuguuugucuucucuaccagcuuuuaccugaucuccauuuuccuucaccucguuaagauccccacacauagacacgugauugggaaaccuugccccaagccucaucggcugaaccacaugggaaucuguagcugcggccuguauaaacaccccggcgugccggucaaguggaagcgcugaggacuaguaauaaggaaacuguaugaaugucugugggcaggaagugaagagauccuucuguaaagguuuuuggaauuaugucugcugaauaauaaacuuuuuugaaauaauaaaucugguagaaaaaugagaucuaaaaaaaaaaaaaaaaaaaaaaaaaaaaaaaaaaaaaaaaaaaaaaaaaaaaaaaaaaaaaaaaaaaaaaaaaaaaaaaaaaaaaaaaaaaaaaaaaaaa

SEQ ID NO: 34420 - RNA, 1785 nt, Artificial Sequence
  mRNA product Design b-4 (A100) comprising derived and/or modified sequence from LASV(LASV035-NIG-2009;Clade II)__AIT17588__GPCmut8 (opt5)
aggagagucccgcagucggcguccagcggcucugcuuguucgugugugugucguugcaggccuuauucaagcuuaccaugggccagaucauuaccuucuuucaagaggugccccacgucaucgaagagguuaugaacauugugcugaucgcccucagccugcuugcuauucugaaggggaucuacaauguggccacaugcggacucuucggccuggucuccuuucuucugcucugugggagaucuugcagcacgaccuauaaaggaguguacgaacugcagacacuggagcucgacauggcgucccugaacauguguaugccucuuucuugcaccaagaauaacagccaucacuauaucaugguuggcaaugaaacagggcuggagcucacccugacaaacaccuccauuaucaaucauaaauucuguaaccuuucugaugcucacaagaaaaaucuguacgaccaugcccucaugagcauuaucuccacguuucaccugagcauuccgaacuucaaucaguaugaggccaugucuugcgauuuuaacggaggcaagaucuccgugcaguacaaucugagccacgcuuaugccgucgacgcugccaaccauuguggcaccauugcgaauggggugcuccaaacauucaugcggauggccuggggaggcucuuacaucgcucuggauuccgggaagggaagcugggacugcaucaugaccucuuaccaguaucuuauuauccagaacacaaccugggaagaucacugucaguuuucccgccccagcccuauuggcuaccuggggcuccugucccaaagaacgcgggacaucuauauuucucgcagacuucugggaacauucaccuggacacucagcgauuccgagggcaacgaaacccccggcggguacugccugacccgguggaugcugaucgaggccgagcucaaauguuuuggaaauacagcuguugccaagugcaacgaaaaacaugacgaggaguucugcgauaugcugcgccuuuuugacuucuguaagcaggcgaucagacggcugaaagccccugcucagaugagcauucagcucaucaauaaggccgugaacgcucugauuaaugaucaacuuaucaugaagaaccaucugcgcgacauuaugggcauccccuauugcaauuacucuaaauauuguuaccucaaccacacggucaccgggaagacaucccugccuagaugcugucuggugagcaauggaucuuaccucaacgaaacccacuucagcgacgauaucgaacagcaggccgacaauaugauuacagagcugcuucaaaaagaguauaucgaucggcagggcaagaccccgcuggggcucguggaccuguuugucuucuccacgucuuuuuaccugauuagcaucuuccuucaccucguuaaaauucccacacaucgccacgugaucggaaagccuugccccaaaccucauagacugaaccacaugggcauuuguuccugcggccuguauaagcaccccggggugccggucaaguggaaacggugaggacuaguaauaaggaaacuguaugaaugucugugggcaggaagugaagagauccuucuguaaagguuuuuggaauuaugucugcugaauaauaaacuuuuuugaaauaauaaaucugguagaaaaaugagaucuaaaaaaaaaaaaaaaaaaaaaaaaaaaaaaaaaaaaaaaaaaaaaaaaaaaaaaaaaaaaaaaaaaaaaaaaaaaaaaaaaaaaaaaaaaaaaaaaaaaa

SEQ ID NO: 34421 - RNA, 1785 nt, Artificial Sequence
  mRNA product Design b-4 (A100) comprising derived and/or modified sequence from LASV(LASV1000-NIG-2009;Clade II)__AIT17782__GPCmut8 (opt5)
aggagagucccgcagucggcguccagcggcucugcuuguucgugugugugucguugcaggccuuauucaagcuuaccaugggccagaucauuaccuucuuucaagaggugccccacgucaucgaagagguuaugaacauugugcugaucgcccucagccugcuugcuauucugaaggggaucuacaauguggccacaugcggacucuucggccuggucuccuuucuucugcucugugggagaucuugcagcacgaccuauaaaggaguguacgaacugcagacacuggagcucgacauggcgucccugaacauguguaugccucuuucuugcaccaagaauaacagccaucacuauaucaugguuggcaaugaaacagggcuggagcucacccugacaaacaccuccauuaucaaucauaaauucuguaaccuuucugaugcucacaagaaaaaucuguacgaccaugcccucaugagcauuaucuccacguuucaccugagcauuccgaacuucaaucaguaugaggccaugucuugcgauuuuaacggaggcaagaucuccgugcaguacaaucugagccacaccuaugcugucgacgccgcuaaccauuguggcacaauugccaauggggugcuccaaaccuucaugcggauggcguggggaggcucuuacaucgcccuggauuccgggaagggaagcugggacugcaucaugacaucuuaccaguaucuuauuauccagaacaccacgugggaagaucacugucaguuuucccgccccagcccuauuggcuaccuggggcuccugucccaaagaacacgggacaucuauauuucucgcagacuucugggaaccuucacauggacccucagcgauuccgagggcaacgaaacccccggcggguacugccugacacgguggaugcugaucgaggcugagcucaaauguuuuggaaauacggccguugcuaagugcaacgaaaaacaugacgaggaguucugcgauaugcugcgccuuuuugacuucuguaagcaggccaucaaaagacugaagaccccugcgcagaugagcauucagcucaucaauaaggccgugaacgcucugauuaaugaucaacuuaucaugaaaaaccaucugcgggacauuaugggcauccccuauugcaauuacucuaaguauuguuaccucaaccacacagucaccgggaaaacaucccugccucgcugcugucuggugagcaauggaucuuaccucaacgaaacccacuucagcgacgauaucgaacagcaggccgacaauaugauuacggagcugcuucaaaaggaguauaucgauagacagggcaaaacaccgcuggggcucguggaccuguuugucuucuccaccucuuuuuaccugauuagcaucuuccuucaccucguuaagauucccacccaucggcacguggugggaaaaccuugccccaagccucaucgccugaaccacaugggcaucuguuccugcggccuguauaagcaccccggggucccggugaaauggaagagaugaggacuaguaauaaggaaacuguaugaaugucugugggcaggaagugaagagauccuucuguaaagguuuuuggaauuaugucugcugaauaauaaacuuuuuugaaauaauaaaucugguagaaaaaugagaucuaaaaaaaaaaaaaaaaaaaaaaaaaaaaaaaaaaaaaaaaaaaaaaaaaaaaaaaaaaaaaaaaaaaaaaaaaaaaaaaaaaaaaaaaaaaaaaaaaaaa

SEQ ID NO: 34422 - RNA, 1785 nt, Artificial Sequence
  mRNA product Design b-4 (A100) comprising derived and/or modified sequence from LASV(LASV221-NIG-2010;Clade II)__AIT17624__GPCmut8 (opt5)
aggagagucccgcagucggcguccagcggcucugcuuguucgugugugugucguugcaggccuuauucaagcuuaccaugggccagaucauuaccuucuuucaagaggugccccacgucaucgaagagguuaugaacauugugcugaucgcccucagccugcuugcuauucugaaggggaucuacaauguggccacaugcggacucuucggccuggucuccuuucuucugcucugugggagaucuugcagcacgaccuauaaaggaguguacgaacugcagacacuggagcucgacauggcgucccugaacauguguaugccucuuucuugcaccaagaauaacagccaucacuauaucaugguuggcaaugaaacagggcuggagcucacccugacaaacaccuccauuaucaaucauaaauucuguaaccuuucugaugcucacaagaaaaaucuguacgaccaugcccucaugagcauuaucuccacguuucaccugagcauuccgaacuucaaucaguaugaggccaugucuugcgauuuuaacggaggcaagaucuccgugcaguacaaucugagccacaccuaugcuauugacgccgcuaaccauuguggcacaaucgccaaugggguccuccaaaccuucaugcggauggcguggggaggcucuuacaucgcccuggauuccgggaagggaagcugggacugcauuaugacaucuuaccaguaucuuaucauucagaacaccacgugggaagaucacugucaguuuucccgccccagcccuaucggcuaccuggggcuccugucccaaagaacacgggacauuuauaucucucgcagacuucugggaaccuucacauggacccucagcgauuccgagggcaacgaaacccccggcggguacugccugacacgguggaugcugaucgaggcugagcucaaauguuuuggaaauacggccguggcuaagugcaacgaaaaacaugacgaggaguucugcgauaugcugcgccuuuuugacuucuguaagcaggccauuagacggcugaaaaccccugcgcagaugagcauccagcucauuaauaaggccguuaacgcucugaucaaugaucaacuuauuaugaagaaccaucugcgcgacaucaugggcauccccuauugcaauuacucuaaauauuguuaccucaaccacacagugaccgggaagacaucccugccuagaugcugucuggucagcaauggaucuuaccucaacgaaacccacuucagcgacgauauugaacagcaggccgacaauaugaucacggagaugcugcaaaaagaguauauggaucggcagggcaagacaccgcuugggcugguggaccucuuuguguucuccaccucuuuuuaccugauuagcaucuuccugcaccuugucaaaauucccacccaucgccacguuaucggaaagccuugccccaaaccucauagacucaaccacaugggcauuuguuccugcggccuguauaagcaccccggggugccggugaaguggaaacggugaggacuaguaauaaggaaacuguaugaaugucugugggcaggaagugaagagauccuucuguaaagguuuuuggaauuaugucugcugaauaauaaacuuuuuugaaauaauaaaucugguagaaaaaugagaucuaaaaaaaaaaaaaaaaaaaaaaaaaaaaaaaaaaaaaaaaaaaaaaaaaaaaaaaaaaaaaaaaaaaaaaaaaaaaaaaaaaaaaaaaaaaaaaaaaaaa

SEQ ID NO: 34423 - RNA, 1785 nt, Artificial Sequence
  mRNA product Design b-4 (A100) comprising derived and/or modified sequence from LASV(LASV237-NIG-2010;Clade II)__AIT17638__GPCmut8 (opt5)
aggagagucccgcagucggcguccagcggcucugcuuguucgugugugugucguugcaggccuuauucaagcuuaccaugggccagaucauuaccuucuuucaagaggugccccacgucaucgaagagguuaugaacauugugcugaucgcccucagccugcuugcuauucugaaggggaucuacaauguggccacaugcggacucuucggccuggucuccuuucuucugcucugugggagaucuugcagcacgaccuauaaaggaguguacgaacugcagacacuggagcucgacauggcgucccugaacauguguaugccucuuucuugcaccaagaauaacagccaucacuauaucaugguuggcaaugaaacagggcuggagcucacccugacaaacaccuccauuaucaaucauaaauucuguaaccuuucugaugcucacaagaaagaccuguacgaucaugcccucaugagcauuaucuccacguuucaccugagcauuccgaauuucaaccaguaugaggccaugucuugcgacuuuaauggaggcaagaucuccgugcaguacaaccugagccacaccuaugcugucgaugccgcuaaucauuguggcacaauugccaacggggugcuccaaaccuucaugcggauggcguggggaggcucuuacaucgcccuggacuccgggaagggaagcugggauugcaucaugacaucuuaccaguaucuuauuauccagaauaccacgugggaagaccacugucaguuuucccgccccagcccuauuggcuaccuggggcuccugucccaaagaacacgggauaucuauauuucucgcagacuucugggaaccuucacauggacccucagcgacuccgagggcaacgaaacccccggcggguacugccugacacgguggaugcugaucgaggcugagcucaaauguuuuggaaacacggccguugcuaagugcaaugaaaaacaugaugaggaguucugcgacaugcugcgccuuuuugauuucuguaagcaggccaucagacggcugaaaaccccugcgcagaugagcauucagcucaucaacaaggccgugaaugcucugauuaacgaccaacuuaucaugaagaaucaucugcgcgacauuaugggcauccccuauugcaacuacucuaaauauuguuaccucaaucacacagucaccgggaagacaucccugccuagaugcugucuggugagcaacggaucuuaccucaaugaaacccacuucagcgaugacaucgaacagcaggccgauaacaugauuacggagcugcuucaaaaagaguauauggaccggcagggcaagacaccgcuggggcucguggaucuguuugucuucuccaccucuuuuuaccugaucagcauuuuccuucaccucaucaaaauucccacccaucgccacaucacaggaaagccuugccccaaaccucauagacugaaucacaugggcauuuguuccugcggccuguauaagcaccccgggguuccggugaaguggaaacggugaggacuaguaauaaggaaacuguaugaaugucugugggcaggaagugaagagauccuucuguaaagguuuuuggaauuaugucugcugaauaauaaacuuuuuugaaauaauaaaucugguagaaaaaugagaucuaaaaaaaaaaaaaaaaaaaaaaaaaaaaaaaaaaaaaaaaaaaaaaaaaaaaaaaaaaaaaaaaaaaaaaaaaaaaaaaaaaaaaaaaaaaaaaaaaaaa

SEQ ID NO: 34424 - RNA, 1785 nt, Artificial Sequence
  mRNA product Design b-4 (A100) comprising derived and/or modified sequence from LASV(LASV253-NIG-2011;Clade II)__AIT17670__GPCmut8 (opt5)
aggagagucccgcagucggcguccagcggcucugcuuguucgugugugugucguugcaggccuuauucaagcuuaccaugggccagaucauuaccuucuuucaagaggugccccacgucaucgaagagguuaugaacauugugcugaucgcccucagccugcuugcuauucugaaggggaucuacaauguggccacaugcggacucuucggccuggucuccuuucuucugcucugugggagaucuugcagcacgaccuauaaaggaguguacgaacugcagacacuggagcucgacauggcgucccugaacauguguaugccucuuucuugcaccaagaauaacagccaucacuauaucaugguuggcaaugaaacagggcuggagcucacccugacaaacaccuccauuaucaaucauaaauucuguaaccuuucugaugcucacaagaaaaaucuguacgaccaugcccucaugagcauuaucuccacguuucaccugagcauuccgaacuucaaucaguaugaggccaugucuugcgauuuuaacggaggcaagaucuccgugcaguacaaucugagccacaccuaugcugucgacgccgcuaaccauuguggcacaauugccaauggggugcuccaaaccuucaugcggauggcguggggaggcucuuacaucgcccuggauuccgggaagggaagcugggacugcaucaugacaucuuaccaguaucuuauuauccagaacaccacgugggaagaucacugucaguuuucccgccccagcccuauuggcuaccuggggcuccugucccaaagaacacgggacaucuauauuucucgcagacuucugggaaccuucacauggacccucagcgauuccgagggcaacgaaacccccggcggguacugccugacacgguggaugcugaucgaggcugagcucaaauguuuuggaaauacggccguugcuaagugcaacgaaaaacaugacgaggaguucugcgauaugcugcgccuuuuugacuucuguaagcaggccaucagacggcugaaagcgccugcccagaugagcauucagcucaucaauaaggcugugaacgcccugauuaaugaucaacuuaucaugaagaaccaucugcgcgacauuaugggcauccccuauugcaauuacucuaaauauuguuaccucaaccacaccgucacagggagaaccucccugccucggugcugucuggugagcaauggaucuuaccucaacgaaacacacuucagcgacgauaucgaacagcaggcugacaauaugauuaccgagcugcuucaaaaggaguauaucgaucgccagggcaaaacgccgcuggggcucguggaccuguuugucuucuccacaucuuuuuaccugauuagcaucuuccuucaccucguuaagauucccacccauagacacaucauuggaaaaccuugccccaagccucaucggcugaaccacaugggcaucuguuccugcggccuguauaaacaccccggggugccggugaaguggaagcgcugaggacuaguaauaaggaaacuguaugaaugucugugggcaggaagugaagagauccuucuguaaagguuuuuggaauuaugucugcugaauaauaaacuuuuuugaaauaauaaaucugguagaaaaaugagaucuaaaaaaaaaaaaaaaaaaaaaaaaaaaaaaaaaaaaaaaaaaaaaaaaaaaaaaaaaaaaaaaaaaaaaaaaaaaaaaaaaaaaaaaaaaaaaaaaaaaa

SEQ ID NO: 34425 - RNA, 1785 nt, Artificial Sequence
  mRNA product Design b-4 (A100) comprising derived and/or modified sequence from LASV(LASV254-NIG-2011;Clade II)__AIT17674__GPCmut8 (opt5)
aggagagucccgcagucggcguccagcggcucugcuuguucgugugugugucguugcaggccuuauucaagcuuaccaugggccagaucauuaccuucuuucaagaggugccccacgucaucgaagagguuaugaacauugugcugaucgcccucagccugcuugcuauucugaaggggaucuacaauguggccacaugcggacucuucggccuggucuccuuucuucugcucugugggagaucuugcagcacgaccuauaaaggaguguacgaacugcagacacuggagcucgacaugaccaaccugaauauguguaugccucuuuccugcacaaagaacaauucucaucacuauaucaugguuggcaacgaaaccgggcuggagcucacacugaccaauacgagcauuaucaaccauaaauucuguaaucuuuccgaugcgcacaagaaaaaccuguacaaucaugcucucaugucuauuaucagcaccuuucaccuguccauuccgaacuucaaucaguaugaggccaugagcugcgacuuuaacggaggcaagaucucugugcaguacaaucugucccacagcuaugccgucgaugcugccaaccauuguggcacaauugcuaacggggugcuccaaaccuucaugcggauggccuggggaggcucuuacaucgcgcuggacuccgggaagggaaauugggauugcaucaugacaagcuaccaguaucuuauuauccagaacaccacgugggaagaccacugucaguuuucucgccccuccccuauuggcuaccuggggcuccugagccaaagaacacgggauaucuauauuucccgcagacuucugggaaccuucacauggacccucucugacagcgagggcaaugaaacccccggcggguacugccugacacgguggaugcugaucgaggccgagcucaaauguuuuggaaacacggcuguugccaagugcaaugaaaaacaugaugaggaguucugcgacaugcugcgccuuuuugauuucuguaagcaggcuaucagacggcugaaaaccccugcccaggcgaacauucagcucaucaauaaggccgugaacgcucugauuaaugaccaacuuaucaugaagaaccaucugcgcgauauuaugggcauccccuauugcaauuacuccaaauauuguuaccucaaccacacagucaccgggaagacaagccugccuagaugcugucuggugucuaauggauccuaccucaacgaaacccacuucagcgacgacaucgaacagcaggccgauaauaugauuacggagcugcuucaaaaagaguauauggaccggcagggcaagacaccgcuggggcucguggaucuguuugucuucucuaccagcuuuuaccugaucuccauuuuccuucaccucguuaaaauccccacccaucgccacgugauuggaaagccuugccccaaaccucauagacugaaccacaugggcaucuguucuugcggccuguauaagcaccccggggugccggucaaguggaaacggugaggacuaguaauaaggaaacuguaugaaugucugugggcaggaagugaagagauccuucuguaaagguuuuuggaauuaugucugcugaauaauaaacuuuuuugaaauaauaaaucugguagaaaaaugagaucuaaaaaaaaaaaaaaaaaaaaaaaaaaaaaaaaaaaaaaaaaaaaaaaaaaaaaaaaaaaaaaaaaaaaaaaaaaaaaaaaaaaaaaaaaaaaaaaaaaaa

SEQ ID NO: 34426 - RNA, 1785 nt, Artificial Sequence
  mRNA product Design b-4 (A100) comprising derived and/or modified sequence from LASV(Nig08-A19;Clade III)__ADU56618__GPCmut8 (opt5)
aggagagucccgcagucggcguccagcggcucugcuuguucgugugugugucguugcaggccuuauucaagcuuaccaugggccagaucgugaccuucuuucaagaggucccccacguuauugaagaggugaugaacaucgugcugauugcccucagcauccuggcuauucuuaaggggcuguacaauaucgccacaugcggacucaucggccuggucacguuccuucugcucuccgggagaucuuguagcaugaccuauaaaggaguguacgaacugcagacacuggagcucaacaugaauacccugaacaugugcaugccucuuuccuguacaaagaauaacucucaucacuauauuaugguuggcaaugaaaccgggcuggagcucacacugaccaacacgagccuucugcaucacaaauuuugcaaucucuccgacgcgcauaagaaaaaccuguacgaucacacccugaugucuaucauuagcacauuccaccucuccaucccgaauuuuaaccaguaugaggcuaugagcugugacuucaauggaggcaagauuaccgugcaguacaaccugucucauuccuaugccaucgaugccgcuaaucacugcggcacagucgccaacggggugcuucaaaccuuuaugcggauggcuuggggaggcagcuacauugcccuggacucugggcgcggaaagugggauuguaucaugacguccuaccaguaucucaucauucagaacacaaccugggaagaccauugccaguucagcagacccucuccuaucggcuaccuggggcuucugucccaacggacacgcgauauuuauaucagcagacggcuccugggaaccuuuaccuggacacuguccgacucugagggcaaugaaacgcccggcggguacugucucacccgcuggaugcugauugaggcggagcuuaaaugcuucggaaacacagccguugcuaaguguaaugaaaaacacgaugaggaauuuugcgacaugcugagacucuucgauuuuugcaagcaggccauccggcgccugaaagcuccugcccagaugagcauccagcuuauuaacaaggcggugaaugcccugaucaacgaccaacucauuaugaagaaucaccugagagauaucaugggcauucccuauuguaacuacuccaaauauugcuaccugaaucauaccagcacagggcggaccucucucccucgcuguugccuggucuccaacggaagcuaccuuaaugagacgcacuucucugacgacaucgaacagcaggcugauaacaugaucacagagaugcugcaaaaggaguaucucgacagacagggcaaaaccccgcuggggcugguggaucuuuucguguuuagcaccuccuucuaccucauuucuaucuuucugcaucuggucaagauucccacacaccggcauaucguuggaaaaccuugucccaagccucaccgccucaaucacaugggcauuugcagcuguggccuguauaaacagcccggggugccggugagauggaagcggugaggacuaguaauaaggaaacuguaugaaugucugugggcaggaagugaagagauccuucuguaaagguuuuuggaauuaugucugcugaauaauaaacuuuuuugaaauaauaaaucugguagaaaaaugagaucuaaaaaaaaaaaaaaaaaaaaaaaaaaaaaaaaaaaaaaaaaaaaaaaaaaaaaaaaaaaaaaaaaaaaaaaaaaaaaaaaaaaaaaaaaaaaaaaaaaaa

SEQ ID NO: 34427 - RNA, 1788 nt, Artificial Sequence
  mRNA product Design b-4 (A100) comprising derived and/or modified sequence from LASV(G1180-SLE-2010;Clade IV)__AIT17168__GPCmut8 (opt5)
aggagagucccgcagucggcguccagcggcucugcuuguucgugugugugucguugcaggccuuauucaagcuuaccaugggccagaucgugaccuucuuucaagaggucccccacguuauugaagaggugaugaacaucgugcugauugcccucagcauccuggcuguccuuaaggggcuguacaauuucgccacaugcggacucgugggccugcuuacguuucugcuccugugugggagauccugcaccgcgucucgguauaaaggaguuuacgaacugcagacacucgagcugaacauggaaacccuuaauauguguaugccucugagcugcacaaagaacaauucccaucacuauauuauggugggcaacgagaccgggcucgagcugacacuuaccaauacgucuaucaucaaccauaaauucuguaaucugagcgacgcucacaagaaaaaccucuacgaucaugcccugauguccauuaucucuaccuuucaccugagcauuccgaauuucaaccaguaugaagccauguccugcgacuuuaauggaggcaagaucagcguccaguacaaccucucucacuccuaugcuggcgaugccgcuaaucauugugggacaguggccaacggaguucugcaaaccuucaugcgcauggcguggggcgggagcuacauugcccuugacucuggacacggcuccugggauugcaucaugacaagcuaccaguaucugauuauccagaacaccacgugggaggaccauugucaguuuucuagacccuccccuaucggguaccucggacugcuuagccaacggacacgcgauauuuauaucuccagacggcugcucggcaccuucacauggacccugucugacagcgaaggcaaggauacccccgggggauacugccugacacgcuggaugcucauugaggcugagcugaaauguuuuggcaauacggccguggcuaagugcaacgaaaaacacgacgaggaguucugcgauaugcuuagacuguuugacuucuguaagcaggccauccagcggcucaaagcgccugcccagauguccauucaacugaucaauaaggcugucaacgcccuuaucaaugaucagcugauuaugaagaaccaccuccgcgacaucauggggauucccuauugcaauuacagcaaauauuguuaccugaaccauaccacaaccggaaagacaucucugccuaaaugcugucucguguccaauggcagcuaccugaacgaaacccacuucucugacgauaucgaacagcaagcugacaauaugauuacggagaugcuucagaaggaguauauggaaagacaggggaaaacaccgcugggacucguggaucuguuugucuucagcaccuccuuuuaccugaucucuaucuuccuucaucucguuaagauucccacccaccggcauaucgugggcaaaagcugcccuaagccccaccgccugaaccacaugggcauuuguuccugcgggcuguauaagcagccuggagugcccgucaaauggaagagaugaggacuaguaauaaggaaacuguaugaaugucugugggcaggaagugaagagauccuucuguaaagguuuuuggaauuaugucugcugaauaauaaacuuuuuugaaauaauaaaucugguagaaaaaugagaucuaaaaaaaaaaaaaaaaaaaaaaaaaaaaaaaaaaaaaaaaaaaaaaaaaaaaaaaaaaaaaaaaaaaaaaaaaaaaaaaaaaaaaaaaaaaaaaaaaaaa

SEQ ID NO: 34428 - RNA, 1788 nt, Artificial Sequence
  mRNA product Design b-4 (A100) comprising derived and/or modified sequence from LASV(G1442-SLE-2011;Clade IV)__AIT17180__GPCmut8 (opt5)
aggagagucccgcagucggcguccagcggcucugcuuguucgugugugugucguugcaggccuuauucaagcuuaccaugggccagaucgugaccuucuuucaagaggucccccacguuauugaagaggugaugaacaucgugcugauugcccucagcauccuggcuguccuuaaggggcuguacaauguggccacaugcggacucauuggccugguuacguuccuucugcucugugggagauccugcaccacaacccuguauaaaggaguguacgaacugcagacacucgagcugaacauggaaacccuuaauauguguaugccucugucuugcacaaagaacaauagccaucacuauauccgggucggcaacgagaccgggcucgagcugacgcuuaccaauacauccaucauuaaccauaaauuuuguaaucugucugacgcgcacaagaaaaaccucuacgaucaugcucugaugagcaucauuuccaccuuccaccugucuaucccgaauuuuaaccaguaugaagccaugagcugcgacuucaauggaggcaagauuuccgugcaguacaaccucagccacucuuaugccggcgaugcugccaaucauugugggacaguugcuaacggagugcugcaaaccuuuaugcgcauggccuggggcggguccuacaucgcgcuugacagcggaagaggcaacugggauugcauuaugacgucuuaccaguaucugaucauccagaauacaaccugggacgaucacugucaguucucccggcccagcccuauuggguaccucggacugcuuucucaacgcacaagagacgucuauaucucccggcgccugcucggcaccuuuaccuggacacugagcgauuccgagggcaaggacacgcccgggggauacugccugaccagauggaugcucauugaagccgagcugaaauguuucggcaacacagcuguggccaagugcaaugagaaacaugaugaagaguuuugcgacaugcuucggcuguucgauuuuuguaagcaggcuauccagcgccucaaagccccugcgcagaugucuauucaacugaucaacaaggccgugaaugcucuuaucaacgaccagcugauuaugaagaaucaccucagagacaucauggggauucccuauugcaacuacagcaaauauuguuaccugaauaacaccgccacaggaaagaccucccugccuaaaugcugucucaucagcaauggcucuuaccugaacgaaacgcacuucuccgaugacauugagcaggaagcugauaauaugaucacagagaugcuucaaaaggaguauauggaacggcaggggaaaaccccgcugggacucgucgaccuguucguuuuuagcaccucuuucuaccugaucagcauuuuucuucaucucgugaagauccccacacaccgccauauugugggcaaauccugcccuaagccccacagacugaaccauaugggcaucuguucuugcgggcuguauaagcagccuggaguccccgugcgguggaaacgcugaggacuaguaauaaggaaacuguaugaaugucugugggcaggaagugaagagauccuucuguaaagguuuuuggaauuaugucugcugaauaauaaacuuuuuugaaauaauaaaucugguagaaaaaugagaucuaaaaaaaaaaaaaaaaaaaaaaaaaaaaaaaaaaaaaaaaaaaaaaaaaaaaaaaaaaaaaaaaaaaaaaaaaaaaaaaaaaaaaaaaaaaaaaaaaaaa

SEQ ID NO: 34429 - RNA, 1788 nt, Artificial Sequence
  mRNA product Design b-4 (A100) comprising derived and/or modified sequence from LASV(G3010-SLE-2013;Clade IV)__AIT17344__GPCmut8 (opt5)
aggagagucccgcagucggcguccagcggcucugcuuguucgugugugugucguugcaggccuuauucaagcuuaccaugggccagaucgugaccuucuuucaagaggucccccacguuauugaagaggugaugaacaucgugcugauugcccucagcauccuggcuguccuuaaggggcuguacaauuucgccacaugcggacucgugggccugguuacguuucuucugcucugugggagauccugcaccacaucucuguauaaaggaguguacgaacugcagacccucgagcugaacauggaaacacuuaauauguguaugccucugagcugcaccaagaacaauucccaucacuauauuauggucggcaacgagacagggcucgagcugacccuuacgaauaccucuaucaucaaccauaaauucuguaaucugagcgacgcgcacaagaaaaaccucuacaaucaugcucugauguccauuaucucuacauuucaccugagcauuccgaacuucaaucaguaugaagccauguccugcgauuuuaacggaggcaagaucagcgugcaguacaaucucucucacuccuaugccggcgacgcugccagccauugugggaccguugcuaacggagugcugcaaacauucaugcggauggccuggggcgggucuuacauugcgcuugauuccggauacggcaagugggacugcaucaugaccagcuaucaguaccugauuauccagaacacgacaugggaggaucacugucaguuuucucgccccuccccuaucggguaucucggacugcuuagccaaagaacccgggacauuuacaucucccgcagacugcucggcacauucaccuggacccugucugauagcgaaggcaaagacacacccgggggauauugccugacgcgguggaugcucauugaggccgagcugaaguguuuuggcaauaccgcugucgccaaaugcaacgaaaagcaugaugaggaguucugcgacaugcuucgccuguuugauuucuguaaacaggcuauccagagacucaagaccccugcccagauguccauucaacugaucaauaaggcggugaacgcccuuaucaaugaccagcugauuaugaaaaaccaccuccgggauaucauggggauucccuacugcaauuauagcaaguacuguuaccugaaccacacaacaaccggaaaaacgucucugccuaagugcugucucguguccaauggcagcuaucugaacgaaacacauuucucugacgacaucgaacagcaagcugauaauaugauuaccgagaugcuucagaaagaguacauggaacgccaggggaagaccccgcugggacucgucgaccuguuuguuuucagcacauccuuuuaucugaucucuaucuuccuucaccucgugaaaauucccacccauagacacaucgugggcaagagcugcccuaagccccaucggcugaaccacaugggcauuuguuccugcgggcuguacaaacagccuggaguccccgugcgcuggaagagaugaggacuaguaauaaggaaacuguaugaaugucugugggcaggaagugaagagauccuucuguaaagguuuuuggaauuaugucugcugaauaauaaacuuuuuugaaauaauaaaucugguagaaaaaugagaucuaaaaaaaaaaaaaaaaaaaaaaaaaaaaaaaaaaaaaaaaaaaaaaaaaaaaaaaaaaaaaaaaaaaaaaaaaaaaaaaaaaaaaaaaaaaaaaaaaaaa

SEQ ID NO: 34430 - RNA, 1788 nt, Artificial Sequence
  mRNA product Design b-4 (A100) comprising derived and/or modified sequence from LASV(G502-SLE-2009;Clade IV)__AIT17126__GPCmut8 (opt5)
aggagagucccgcagucggcguccagcggcucugcuuguucgugugugugucguugcaggccuuauucaagcuuaccaugggccagaucgugaccuucuuucaagaggucccccacguuauugaagaggugaugaacaucgugcugauugcccucagcauccuggcuguccuuaaggggcuguacaauuucgccacaugcggacucgugggccugcuuacguuucugcuccugugugggagauccugcaccacaggacuguauaaaggcguuuacgaacuccagacccuggagcuuaacauggaaacacugaauauguguaugccucucucuugcaccaagaacaauagccaucacuauauuaugguggggaacgagacaggacuggagcuuacccugacgaauaccuccaucaucaaccauaaauucuguaaucucucugacgcgcacaagaaaaaccuguacgaucaugcucugaugagcauuaucuccacauuucaccucucuauuccgaauuucaaccaguaugaagccaugagcugcgacuuuaauggcggcaagaucuccguccaguacaaccugagccacucuuaugccggggaugcugccgaccauuguggaaccguggcuaauggcguucuucaaacauucaugcggauggccuggggaggguccuacauugcgcuggauagcggccgcgggagaugggacugcaucaugaccucuuaccaguaucucauuauccagaacacgacaugggaggaucacugucaguuuucccggcccagcccuaucggauaccugggccuucugucucaacgcaccagagacauuuauaucucccggcgccuccugggcacauucaccuggacccugagcgauuccgaagggaaggacacacccggaggcuacugccucacgagauggaugcugauugaggccgagcuuaaauguuuugggaacaccgcuguggccaagugcaaugaaaaacaugaugaggaguucugcgacaugcugcggcucuuugauuucuguaagcaggcuauccagcgccugaaagccccugcgcagaugucuauucaacuuaucaacaaggccgucaaugcucugaucaacgaccagcucgugaugaagaaucaccugagagacauuaugggaauccccuauugcaacuacagccgguauuguuaccugaaucacacaaccacaggccgcaccucccucccuaaaugcugucuggugagcaacgggucuuaccuuaaugaaacgcauuucuccgaugacauugaacagcaagccgauaacaugaucacagagaugcugcagaaggaguauauggaaagacagggaaaaaccccgcucggccuggucgaccuguuuguuuucagcaccucuuuuuaccuuauuagcaucuuccuccaccuggugaagauccccacacaucggcacauugugggcaaauccugcccuaagccccaucgccugaaucacauggggaucuguucuugcggacucuauaaacagccuggcguccccgugaaguggaagagaugaggacuaguaauaaggaaacuguaugaaugucugugggcaggaagugaagagauccuucuguaaagguuuuuggaauuaugucugcugaauaauaaacuuuuuugaaauaauaaaucugguagaaaaaugagaucuaaaaaaaaaaaaaaaaaaaaaaaaaaaaaaaaaaaaaaaaaaaaaaaaaaaaaaaaaaaaaaaaaaaaaaaaaaaaaaaaaaaaaaaaaaaaaaaaaaaa

SEQ ID NO: 34431 - RNA, 1788 nt, Artificial Sequence
  mRNA product Design b-4 (A100) comprising derived and/or modified sequence from LASV(G733-SLE-2010;Clade IV)__AIT17154__GPCmut8 (opt5)
aggagagucccgcagucggcguccagcggcucugcuuguucgugugugugucguugcaggccuuauucaagcuuaccaugggccagaucgugaccuucuuucaagaggucccccacguuauugaagaggugaugaacaucgugcugauugcccucagcauccuggcuguccuuaaggggcuguacaauuucgccacaugcggaauugugggccucguuuccuuucugcuucugugugggagaucuugcacgaccagccucuauaaaggaguguacgaacugcagacacuggagcucaacauggaaacccugaauauguguaugccucuuuccugcacaaagaacaauucucaucacuauaucauggucggcaacgagaccgggcuggagcucacacugaccaauacgagcaucauuaaccauaaauucuguaaucuuuccgacgcgcacaagaaaaaccuguacgaucaugcucucaugucuaucauuagcaccuuucaccuguccaucccgaauuucaaccaguaugaagccaugagcugcgacuuuaauggaggcaagauuucugugcaguacaaccugucccacagcuaugccggcgaugcugccaaucauugugggacaaucgcuaacggaguucuccaaaccuucaugcggauggccuggggcgggucuuacauugcgcuggacuccggacgcgauagaugggacugcaucaugacaagcuaccaguaucuuaucauucagaacaccacgugggaggaucacugucaguuuucucggcccuccccuaucggcuaccuggggcuccugagccaacgcacaagagacauuuauaucucccggcgccuucugggaaccuucacauggacccucucugauagcgaaggcaaggacacccccggcggguacugccugacaagauggaugcugauugaggccgagcucaaauguuuuggaaauacggcuguggccaagugcaacgaaaaacaugaugaggaguucugcgacaugcugcggcuuuuugauuucuguaagcaggcuauccagcgccugaaagccccugcgcagauguccauccaacucauuaauaaggccgucaacgcucugaucaaugaccagcuuauuaugaagaaccaccugagagacaucaugggcauucccuauugcaauuacagcaaauauuguuaccucaaccacaccacaaccgggaagacaucucugccuaaaugcugucugguguccaauggaagcuaccucaacgaaacccauuucucugaugacaucgaacagcaagccgauaauaugaucacggagaugcugcagaaggaguauauggaacggcagggcaaaacaccgcuugggcugguggaccucuuugucuucagcaccuccuuuuaccugauuucuaucuuccugcaccuuguuaagauucccacccaucgccacguggugggaaaaagcugcccuaagccccauagacucaaccacaugggcaucuguuccugcggccuguaugggcagccuggaguccccgugaaguggaaacggugaggacuaguaauaaggaaacuguaugaaugucugugggcaggaagugaagagauccuucuguaaagguuuuuggaauuaugucugcugaauaauaaacuuuuuugaaauaauaaaucugguagaaaaaugagaucuaaaaaaaaaaaaaaaaaaaaaaaaaaaaaaaaaaaaaaaaaaaaaaaaaaaaaaaaaaaaaaaaaaaaaaaaaaaaaaaaaaaaaaaaaaaaaaaaaaaa

SEQ ID NO: 34432 - RNA, 1788 nt, Artificial Sequence
  mRNA product Design b-4 (A100) comprising derived and/or modified sequence from MOPV/LASV reassortant(IGS-1;Clade IV)__AFY05576__GPCmut8 (opt5)
aggagagucccgcagucggcguccagcggcucugcuuguucgugugugugucguugcaggccuuauucaagcuuaccaugggccagaucgugaccuucuuucaagaggucccccacguuauugaagaggugaugaacaucgugcugauugcccucagcguccuggcugugcuuaaggggcuguacaauuucgccacaugcggacucguuggccuggugacguuucuucugcucugugggagauccugcaccacaucucuguauaaaggagucuacgaacugcagacccucgagcugaacauggaaacacuuaauauguguaugccucugagcugcaccaagaacaauucccaucacuauaucauggugggcaacgagacagggcucgagcugacccuuacgaauaccucuauuaucaaccauaaauucuguaaucugagcgacgcgcacaagaaaaaccucuacgaucaugcucugauguccaucauuucuacauuucaccugagcaucccgaauuucaaccaguaugaagccauguccugcgacuuuaauggaggcaagauuagcguucaguacaaccucucucacuccuaugccggcgaugcugccaaucauugugggaccguggcuaacggaguccugcaaacauucaugcggauggccuggggcgggagcuacaucgcgcuugacucuggacgcggcaacugggauugcauuaugaccuccuaccaguaucugaucauucagaauacgacaugggaggaccacugucaguuuagcagacccucuccuaucggguaccucggacugcuuucccaacggacccgcgauaucuauauuagcagacggcugcucggcacauucaccuggacccuguccgacucugaaggcgaggauacacccgggggauacugccugacgcgcuggaugcucaucgaggccgaacugaaguguuuuggcaacaccgcuguggccaaaugcaaugagaagcaugacgaagaguucugcgauaugcuuagacuguuugacuucuguaaacaggcuauucagcggcucaaggccccugcgcagaugagcauccaacugauuaacaaagccgugaaugcucuuaucaacgaucagcugaucaugaagaaucaccuccgcgacauuauggggauccccuauugcaacuacuccaaguauuguuaccugaaucacacaaccacaggaagaaccagccugccuaaaugcugucucgucucuaacggcuccuaccugaaugaaacgcauuucagcgacgauauugagcagcaagccgacaacaugaucacagagaugcuucagaaggaauauauggagcggcaggggaaaaccccgcugggacucguugaucuguuuguguucucuaccagcuuuuaccugauuuccaucuuccuucaccucgugaagauccccacacaucgccacauugucggcaaaucuugcccuaagccccauagacugaaucacaugggcaucuguagcugcgggcuguauaaacagccuggagugcccguuaaguggaagcggugaggacuaguaauaaggaaacuguaugaaugucugugggcaggaagugaagagauccuucuguaaagguuuuuggaauuaugucugcugaauaauaaacuuuuuugaaauaauaaaucugguagaaaaaugagaucuaaaaaaaaaaaaaaaaaaaaaaaaaaaaaaaaaaaaaaaaaaaaaaaaaaaaaaaaaaaaaaaaaaaaaaaaaaaaaaaaaaaaaaaaaaaaaaaaaaaa

SEQ ID NO: 34433 - RNA, 1788 nt, Artificial Sequence
  mRNA product Design b-4 (A100) comprising derived and/or modified sequence from LASV(LM765-SLE-2012;Clade IV)__AIT17814__GPCmut8 (opt5)
aggagagucccgcagucggcguccagcggcucugcuuguucgugugugugucguugcaggccuuauucaagcuuaccaugggccagaucgugaccuucuuucaagaggucccccacguuauugaagaggugaugaacaucgugcugauugcccucagcauccuggcuguccuuaaggggcuguacaauuucgccacaugcggacucgugggccugguuacguuucuucugcucugugggagauccugcaccacaucucuguauaaaggaguguacgaacugcagacccucgagcugaacauggaaacacuuaauauguguaugccucugagcugcaccaagaacaauucccaucacuauauuauggucggcaacgagacagggcucgagcugacccuuacgaauaccucuaucaucgaccauaaauucuguaaccugagcgaugcgcaccggaagaaucucuacgaccaugcucugauguccauuaucucuacauuucaccugagcauuccgaacuucaaucaguaugaagccauguccugcgauuuuaacggaggcaaaaucagcgugcaguacaaucucucucacuccuaugccaaggacgcugccgaucauuguggcaccguugcuaacggggugcugcaaacauucaugcgcauggccuggggaggcagcuacauugcgcuugacucugggagaggacggugggauugcaucaugaccuccuaccaguaucugauuauccagaauacgacaugggaggaccacugucaguuuagccgccccucuccuaucggcuaccucgggcugcuuucccaaagaacccgggauauuuauaucagccgcagacugcucggaacauucaccuggacccuguccgacucugaaggcaaggauacacccggcggguacugccugacgcgguggaugcucauugaggccgagcugaaauguuuuggaaacaccgcugucgccaagugcaacgaaaaacaugacgaggaguucugcgauaugcuucgccuguuugacuucuguaagcaggcuauccagagacucaaagccccugcgcagaugagcauucaacugaucaauaaggccgugaacgcucuuaucaaugaccagcugauuaugaagaaccaccuccgggauaucaugggcauucccuauugcaauuacuccaaauauuguuaccugaaccacacaaccacagggaagaccagccugccuaaaugcugucucgugucuaauggauccuaccugaacgaaacgcauuucagcgacgauaucgaacagcaagccgacaauaugauuacagagaugcuucagaaggaguauauggaacgccagggcaaaaccccgcuggggcucgucgaucuguuuguuuucucuaccagcuuuuaccugaucuccaucuuccuucaccucgugaagauucccacacauagacacaucgugggaaaaccuugccccaagccucaucggcugaaccacaugggcauuuguucuugcggccuguauaagcagcccggggucccggugaaauggaagcgcugaggacuaguaauaaggaaacuguaugaaugucugugggcaggaagugaagagauccuucuguaaagguuuuuggaauuaugucugcugaauaauaaacuuuuuugaaauaauaaaucugguagaaaaaugagaucuaaaaaaaaaaaaaaaaaaaaaaaaaaaaaaaaaaaaaaaaaaaaaaaaaaaaaaaaaaaaaaaaaaaaaaaaaaaaaaaaaaaaaaaaaaaaaaaaaaaa

SEQ ID NO: 34434 - RNA, 1788 nt, Artificial Sequence
  mRNA product Design b-4 (A100) comprising derived and/or modified sequence from LASV(LM776-SLE-2012;Clade IV)__AIT17824__GPCmut8 (opt5)
aggagagucccgcagucggcguccagcggcucugcuuguucgugugugugucguugcaggccuuauucaagcuuaccaugggccagaucgugaccuucuuucaagaggucccccacguuauugaagaggugaugaacaucgugcugauugcccucagcauccuggcuguccuuaaggggcuguacaauuucgccacaugcggacucgugggccugguuacguuucuucugcucugugggagauccugcaccacaucuguguauaaaggagucuacgaacugcagacccuggagcucaacauggaaacacugaauauguguaugccucuuagcugcaccaagaacaauucccaucacuauauuauggugggcaacgagacagggcuggagcucacccugacgaauaccucuaucaucaaccauaaauucuguaaucuuagcgacgcgcacaagaaaaaccuguacgaucaugcucucauguccauuaucucuacauuucaccugagcauuccgaauuucaaccaguaugaagccauguccugcgacuuuaauggaggcaagaucagcguucaguacaaccugucucacuccuaugccggcgaugcugccaaucauugugggaccguggcuaacggaguccuccaaacauucaugcggauggccuggggcgggagcuacauugcgcuggacucuggacacggcaagugggauugcaucaugaccuccuaccaguaucuuauuauccagaacacgacaugggaggaccauugucaguuuagccgccccucuccuaucggguaccugggacuccugucccaaagaacccgggauauuuauaucagccgcagacuucugggcacauucaccuggacccucuccgacucugaaggcaaagauacacccgggggauacugccugacgcgguggaugcugauugaggccgagcucaaguguuuuggcaauaccgcuguggccaaaugcaacgaaaagcacgacgaggaguucugcgauaugcugcgccuuuuugacuucuguaaacaggcuauccagagacugaaggccccugcgcagaugagcauucaacucaucaauaaggccgugaacgcucugaucaaugaucagcuuauuaugaaaaaccaucugcgggacaucauggggauucccuauugcaauuacuccaaguauuguuaccucaaccacacaaccacaggaaaaaccagccugccuaagugcugucuggucucuaauggcuccuaccucaacgaaacgcacuucagcgacgauaucgaacagcaagccgacaauaugauuacagagaugcugcagaaagaguauauggaacgccaggggaagaccccgcuuggacugguugaucucuuuguguucucuaccagcuuuuaccugaucuccaucuuccugcaucuugugaaaauucccacacacagacauaucgucggcaagucuugcccuaagccccaccggcucaaccacaugggcauuuguagcugcgggcuguauaaacagccuggagugcccguucgcuggaagagaugaggacuaguaauaaggaaacuguaugaaugucugugggcaggaagugaagagauccuucuguaaagguuuuuggaauuaugucugcugaauaauaaacuuuuuugaaauaauaaaucugguagaaaaaugagaucuaaaaaaaaaaaaaaaaaaaaaaaaaaaaaaaaaaaaaaaaaaaaaaaaaaaaaaaaaaaaaaaaaaaaaaaaaaaaaaaaaaaaaaaaaaaaaaaaaaaa

SEQ ID NO: 34435 - RNA, 1788 nt, Artificial Sequence
  mRNA product Design b-4 (A100) comprising derived and/or modified sequence from LASV(Mad39;Clade IV)__ANH09722__GPCmut8 (opt5)
aggagagucccgcagucggcguccagcggcucugcuuguucgugugugugucguugcaggccuuauucaagcuuaccaugggccagaucgugaccuucuuucaagaggucccccacguuauugaagaggugaugaacaucgugcugauugcccucagcauccuggcuguccuuaaggggcuguacaauguggccacaugcggacucauuggccugguuacguuccuucugcucugugggagauccugcaccacaacccuguauaaaggaguguacgaacugcaggcgcucgagcugaacauggaaacacuuaauauguguaugccucugucuugcaccaagaacaauagccaucacuauauccgggucggcaacgagacagggcucgagcugacccuuacgaauaccucccugaucaaccauaaauuuuguaaucucucugacgcucacaagaaaaaccuguacgaucaugcccugaugagcauuaucuccacauuccaccucucuauuccgaauuuuaaccaguaugaagccaugagcugcgacuucaaugauggaaagaucuccgugcaguacaaccugagccacaccuaugcuggcgacacagccaaucauuguggcaccguugcuaacggggugcuucaaacguuuaugcgcauggccuggggaggcucuuacauugcgcuggauuccgggagaggaggcugggacugcaucaugacaagcuaccaguaucucauuauccagaacaccacaugggaggaucacugucaguucucucggcccuccccuaucggguaccugggacuucugagccaacgcaccagagacauuuauaucucucggcgccuccugggcaccuuuacauggacgcuguccgauagcgaaggcaaggacacccccgggggauacugccucacaagauggaugcugauugaggccgagcuuaaauguuucggcaauaccgcugucgccaagugcaacgaaaaacaugaugaggaauuuugcgacaugcugcgccucuucgauuuuuguaagcaggcuauccagcggcugaaagccccugcgcagauguccauucaacuuaucaauaaggccgugaacgcucugaucaaugaccagcucauuaugaagaaccaccugagagacaucauggggauucccuauugcaauuacucuaaauauuguuaccugaaccacacagugaccggaaagacgagccucccuaaaugcugucuggucuccaauggcagcuaccuuaacgagacacauuucucugaugacaucgaacagcaagccgauaauaugauuaccgagaugcugcagaaggaguauauggaacggcaggggaaaaccccgcucggacugguugaccuguucguguuuuccaccagcuucuaccuuaucucuaucuuucuccaccuggugaagauucccacacaucgccacgucgugggcaaaccuugccccaagccucauagacugaaccacaugggcaucuguagcugcggguucuauaagcagcccggaguuccggugcgguggaaacgcugaggacuaguaauaaggaaacuguaugaaugucugugggcaggaagugaagagauccuucuguaaagguuuuuggaauuaugucugcugaauaauaaacuuuuuugaaauaauaaaucugguagaaaaaugagaucuaaaaaaaaaaaaaaaaaaaaaaaaaaaaaaaaaaaaaaaaaaaaaaaaaaaaaaaaaaaaaaaaaaaaaaaaaaaaaaaaaaaaaaaaaaaaaaaaaaaa

SEQ ID NO: 34436 - RNA, 1788 nt, Artificial Sequence
  mRNA product Design b-4 (A100) comprising derived and/or modified sequence from LASV(Z0947-SLE-2011;Clade IV)__AIT17840__GPCmut8 (opt5)
aggagagucccgcagucggcguccagcggcucugcuuguucgugugugugucguugcaggccuuauucaagcuuaccaugggccagaucgugaccuucuuucaagaggucccccacguuauugaagaggugaugaacaucgugcugauugcccucagcauccuggcuguccuuaaggggcuguacaauuucgccacaugcggacucgugggccugguuacguuucuucugcucugugggagauccugcaccauuucucuguauaaaggaguguacgaacugcagacacucgagcugaacauggaaacccuuaauauguguaugccucugagcugcacaaagaacaauucccaucacuauaucauggucggcaacgagaccgggcucgagcugacacuuaccaauacgucuaucauuaaccauaaauucuguaaucugagcgacgcgcacaagaaaaaccucuacgaucaugcucugauguccaucauuucuaccuuucaccugagcaucccgaauuucaaccaguaugaagccauguccugcgacuuuaauggaggcaagauuagcgugcaguacaaccucucucacuccuaugccggcgaugcugccaaucauugugggacaguugcuaacggagugcugcaaaccuucaugcggauggccuggggcgggagcuacaucgcgcuugacucuggacgcgauagaugggacugcauuaugacauccuaccaguaucugaucauccagaacaccacgugggaggaucacugucaguuuagccggcccucuccuauuggcuaccucgggcugcuuucccaacgcacaagagacaucuauauuagccggcgccugcucggaaccuucacauggacccuguccgauucugaaggcaaggacacccccggcggguacugccugacaagauggaugcucaucgaggccgagcugaaauguuuuggaaauacggcugucgccaagugcaacgaaaaacaugaugaggaguucugcgacaugcuucggcuguuugauuucuguaagcaggcuauucagcgccucaaagccccugcgcagaugagcauccaacugaucaauaaggccgugaacgcucuuauuaaugaccagcugaucaugaagaaccaccucagagacauuaugggcauccccuauugcaauuacuccaaauauuguuaccugaaccacaccacaaccgggaagacaagccugccuaaaugcugucucgugucuaauggauccuaccugaacgaaacccauuucagcgaugacauugaacagcaagccgauaauaugaucacggagaugcuucagaaggaguauauggaacggcagggcaaaacaccgcuggggcucgucgaccuguuuguuuucucuaccagcuuuuaccugaucuccauuuuccuucaccucgugaagauccccacccaucgccacauugugggaaaaccuugccccaagccucauagacugaaccacaugggcaucuguucuugcggccuguauaagcagcccggggucccggugaaauggaagcggugaggacuaguaauaaggaaacuguaugaaugucugugggcaggaagugaagagauccuucuguaaagguuuuuggaauuaugucugcugaauaauaaacuuuuuugaaauaauaaaucugguagaaaaaugagaucuaaaaaaaaaaaaaaaaaaaaaaaaaaaaaaaaaaaaaaaaaaaaaaaaaaaaaaaaaaaaaaaaaaaaaaaaaaaaaaaaaaaaaaaaaaaaaaaaaaaa

SEQ ID NO: 34437 - RNA, 1658 nt, Artificial Sequence
  mRNA product Design i-3 (hSL-A64-N5) comprising derived and/or modified sequence from LASV(Josiah;Clade IV)__NP_694870__GPCmut8 (opt1)
aggagaaagcuuaccaugggccagaucgugaccuucuuccaggaggucccccacgugaucgaggaggugaugaacaucguccugaucgcccucagcgugcuggccgugcugaaggggcucuacaacuucgcgaccugcggccuggucgggcuggugacguuccuccugcugugcggccgcuccugcaccaccagccucuacaaggggguguacgagcugcagacccuggagcucaacauggagacgcugaacaugugcaugccgcuguccugcaccaagaacaacagccaccacuacaucauggucggcaacgagaccggccucgagcugacgcugaccaacaccuccaucaucaaccacaaguucugcaaccucagcgacgcccacaagaagaaccuguacgaccacgcccugauguccaucaucagcaccuuccaccucuccauccccaacuucaaccaguacgaggccaugagcugcgacuucaacgggggcaagaucuccgugcaguacaaccugagccacuccuacgccggggacgcggccaaccacugcggcacgguggccaacgggguccugcagaccuucaugcggauggccuggggcggcagcuacaucgcgcucgacuccgggcgcggcaacugggacugcaucaugaccagcuaccaguaccugaucauccagaacaccacgugggaggaccacugccaguucucccggcccagccccaucggguaccugggccuccugucccagcgcacccgggacaucuacaucagccgccggcugcucggcaccuucaccuggacgcugagcgacuccgaggggaaggacaccccgggcggguacugccugacccgcuggaugcucaucgaggccgagcugaagugcuucggcaacaccgccguggccaagugcaacgagaagcacgacgaggaguucugcgacaugcugcggcuguucgacuucugcaagcaggccauccagcgccugaaggcgcccgcccagaugagcauccagcugaucaacaaggccgugaacgcccucaucaacgaccagcugaucaugaagaaccaccuccgggacaucauggggauccccuacugcaacuacuccaaguacugcuaccucaaccacacgaccaccggccgcaccagccugcccaagugcugccuggucuccaacggcagcuaccucaacgagacgcacuucuccgacgacaucgagcagcaggccgacaacaugaucaccgagaugcugcagaaggaguacauggagcggcaggggaagacgccccugggccucguggaccuguucguguucagcaccuccuucuaccugaucagcaucuuccugcaccucgucaagaucccgacccaccgccacaucguggggaaguccugccccaagccccaccggcugaaccacaugggcaucugcagcugcgggcuguacaagcagcccggcgugccggucaaguggaagcgcugaggacuaguuauaagacugacuagcccgaugggccucccaacgggcccuccuccccuccuugcaccgagauuaaucaaaggcucuuuucagagccaccaaaaaaaaaaaaaaaaaaaaaaaaaaaaaaaaaaaaaaaaaaaaaaaaaaaaaaaaaaaaaaaaagaauu

SEQ ID NO: 34438 - RNA, 1655 nt, Artificial Sequence
  mRNA product Design i-3 (hSL-A64-N5) comprising derived and/or modified sequence from LASV(LP;Clade I)__AAF86701__GPCmut8 (opt1)
aggagaaagcuuaccaugggccagaucaucaccuucuuccaggaggugccccacgucaucgaggaggugaugaacaucgugcugaucgcccucagccugcuggccauccucaaggggcuguacaacaucgcgaccugcggcaucaucgggcuggucgccuuccucuuccugugcggcaaguccugcagccugacgcucaagggcggguacgagcugcagacccuggagcucaacauggagacccugaacaugugcaugccgcuguccugcacgaagaacagcucccaccacuacauccgcgugggcaacgagaccgggcucgagcugacccugaccaacacgagcaucaucaaccacaaguucugcaaccucuccgacgcccacaagaagaaccuguacgaccacgcccugaugagcaucaucuccaccuuccaccucagcauccccaacuucaaccaguacgaggccauguccugcgacuucaacggcgggaagaucagcgugcaguacaaccugucccacagcuacgcgggcgacgccgccgagcacugcgggaccgucgccaacggcgugcugcagaccuucaugcggauggcguggggcgggcgcuacaucgcccucgacuccggcaaggggaacugggacugcaucaugacgagcuaccaguaccugaucauccagaacaccaccugggaggaccacugccaguucucccggcccagccccaucggcuaccugggccuccugucccagcgcacccgggacaucuacaucagccgccggcugcucgggacguucaccuggacccugagcgacuccgagggcaacgagacccccgggggcuacugccugacgcgcuggaugcucaucgaggccgagcugaagugcuucgggaacaccgccguggccaagugcaacgagaagcacgacgaggaguucugcgacaugcugcggcuguucgacuucugcaagcaggcgauccgccggcugaaggcccccgcccagaugagcauccagcugaucaacaaggccgucaacgcccucaucaacgaccagcugaucaugaagaaccaccuccgcgacaucaugggcauccccuacugcaacuacuccaaguacugcuaccucaaccacaccagcuccggccggaccagccugcccaagugcugccugaucuccaacgggagcuaccucaacgagacgcaguucuccgacgacaucgagcagcaggcggacaacaugaucaccgagaugcugcagaaggaguacaucgagcgccagggcaagaccccgcuggggcucguggacaucuucaucuucagcaccuccuucuaccugaucagcaucuuccugcaccugaucaagaucccgacgcaccggcacaucgugggcaagcccugccccaagccccaccgccucaaccacaugggggucugcuccugcggccuguacaagcacccgggcgugcccaccaaguggaagcggugaggacuaguuauaagacugacuagcccgaugggccucccaacgggcccuccuccccuccuugcaccgagauuaaucaaaggcucuuuucagagccaccaaaaaaaaaaaaaaaaaaaaaaaaaaaaaaaaaaaaaaaaaaaaaaaaaaaaaaaaaaaaaaaaagaauu

SEQ ID NO: 34439 - RNA, 1655 nt, Artificial Sequence
  mRNA product Design i-3 (hSL-A64-N5) comprising derived and/or modified sequence from LASV(803213;Clade II)__AAF86703__GPCmut8 (opt1)
aggagaaagcuuaccaugggccagaucaucaccuucuuccaggaggugccccacgucaucgaggaggugaugaacaucgugcugaucgcccucagccugcuggccauccucaaggggaucuacaacgucgcgaccugcggccuguucgggcugaucuccuuccuccugcugugcggccgcagcugcuccgugacguacaaggggguguacgagcuccagacccuggagcugaacauggccaaccucaacaugugcaugccgcugagcugcaccaagaacaacucccaccacuacaucauggucggcaacgagacgggccuggagcucacccugaccaacaccagcaucaucaaccacaaguucugcaaccuguccgacgcccacaagaagaaccucuacgaccacgcccugaugagcaucaucuccacguuccaccugagcauccccaacuucaaccaguacgaggccauguccugcgacuucaacgggggcaagaucagcgugcaguacaaccucucccacagcuucgcgguggacgccgccaaccacugcgggaccaucgccaacggcguccugcagaccuucaugcggauggcguggggcggguccuacaucgcccuggacagcggcaaggggaacugggacugcaucaugaccuccuaccaguaccucaucauccagaacacgaccugggaggaccacugccaguucagccgccccucccccaucggcuaccuggggcugcucagccagcggacccgcgacaucuacaucagccggcgccugcugggcaccuucacguggacccucuccgacagcgagggcaacgaggcccccgggggcuacugccugacccgguggaugcugaucgaggccgagcucaagugcuucgggaacaccgccguggcgaagugcaacgagaagcacgacgaggaguucugcgacaugcugcgccuguucgacuucugcaagcaggccaucaagcggcucaagacgcccgcccagauguccauccagcugaucaacaaggccgugaacgcccugaucaacgaccagcucaucaugaagaaccaccuccgcgacaucaugggcauccccuacugcaacuacagccgguacugcuaccugaaccacaccgucaccgggaagaccucccugccccgcugcugccuggugagcaacggcuccuaccugaacgagacgcacuucagcgacgacaucgagcagcaggcggacaacaugaucaccgagaugcuccagaaggaguacauggaccggcagggcaagaccccgcuggggcugguggaccucuucgucuucuccaccagcuucuaccugaucuccaucuuccugcaccuggugaagaucccgacgcaccgccacaucgugggcaagcccugccccaagccccaccggcucaaccacauggggaucugcagcugcggccuguacaagcacccggggguccccgugaaguggaagcgcugaggacuaguuauaagacugacuagcccgaugggccucccaacgggcccuccuccccuccuugcaccgagauuaaucaaaggcucuuuucagagccaccaaaaaaaaaaaaaaaaaaaaaaaaaaaaaaaaaaaaaaaaaaaaaaaaaaaaaaaaaaaaaaaaagaauu

SEQ ID NO: 34440 - RNA, 1655 nt, Artificial Sequence
  mRNA product Design i-3 (hSL-A64-N5) comprising derived and/or modified sequence from LASV(GA391;Clade III)__CAA36645__GPCmut8 (opt1)
aggagaaagcuuaccaugggccagaucgugaccuucuuccaggaggucccccacgugaucgaggaggugaugaacaucguccugaucgcccucagcauccuggccauccugaaggggcucuacaacguggcgaccugcggccugaucgggcuggugacguuccuccugcuguccggccgcagcugcucccucaucuacaaggggaccuacgagcugcagacccuggagcucaacauggagacccugaacaugugcaugccgcugagcugcaccaagaacaacucccaccacuacauccgggucggcaacgagaccggccucgagcugacccugacgaacaccagcauccucaaccacaaguucugcaaccuguccgacgcccacaagcgcaaccuguacgaccacagccucauguccaucaucagcaccuuccaccuguccauccccaacuucaaccaguacgaggccaugagcugcgacuucaacgggggcaagaucaccgugcaguacaaccugucccacagcuucgccguggacgccgcggggcacugcggcacgcucgccaacgggguccugcagaccuucaugcggauggccuggggcggcuccuacaucgcccuggacagcgggcgcggcaacugggacugcaucaugaccuccuaccaguaccucaucauccagaacaccacgugggacgaccacugccaguucagccggcccucccccaucggguaccugggccugcucagccagcgcacccgggacaucuacaucagccgccggcugcugggcaccuucaccuggacgcucuccgacagcgaggggaacgagaccccgggcggguacugccugacccgcuggaugcugaucgaggcggagcucaagugcuucggcaacaccgccguggccaagugcaacgagaagcacgacgaggaguucugcgacaugcugcggcuguucgacuucugcaagcaggccauccgccggcucaagacgcccgcccagauguccauccagcugaucaacaaggcggugaacgcccugaucaacgaccagcucaucaugaagaaccaccuccgcgacaucauggggauccccuacugcaacuacagccgguacugcuaccugaaccacaccuccaccggcaagaccagccugccccgcugcugccugaucuccaacggcagcuaccugaacgagacgaaguucuccgacgacaucgagcagcaggccgacaacaugaucaccgagaugcuccagaaggaguacaucgaccggcaggggaagacgccccugggccuggucgaccuguucguguucagcaccuccuucuaccucaucagcaucuuccugcaccuggugaagaucccgacccaccgccacaucgucgggaagcccugccccaagccccaccggcucaaccacaugggcaucugcuccugcgggcuguacaagcagccgggcgugcccgugcgcuggaagcggugaggacuaguuauaagacugacuagcccgaugggccucccaacgggcccuccuccccuccuugcaccgagauuaaucaaaggcucuuuucagagccaccaaaaaaaaaaaaaaaaaaaaaaaaaaaaaaaaaaaaaaaaaaaaaaaaaaaaaaaaaaaaaaaaagaauu

SEQ ID NO: 34441 - RNA, 1658 nt, Artificial Sequence
  mRNA product Design i-3 (hSL-A64-N5) comprising derived and/or modified sequence from LASV(AV;Clade V)__CCA30314__GPCmut8 (opt1)
aggagaaagcuuaccaugggccagaucgugaccuucuuccaggaggucccccacgugaucgaggaggugaugaacaucguccugaucgcccucagcauccuggccgugcugaaggggcucuacaacaucgcgaccugcggccugaucgggcugaucacguuccuccugcugugcggccgcuccugcagcuccaaccucuacaaggggguguacgagcugcagagccuggaccucaacauggagacccugaacaugugcaugccgcuguccugcaccaagaacaacagccaccacuacauccgggucggcaacgacacgggccucgagcugacccugaccaacaccuccauccucaaccacaaguucugcaaccugagcgacgcccacaagaaggaccuguacgaccacgcccucauguccaucaucagcacguuccaccuguccauccccaacuucaaccaguacgaggccaugagcugcgacuucaacgggggcaagaucuccgugcaguacaaccugagccacuccuacgccaucgacgcggccaaccacugcgggaccguggccaacggcauccuccagaccuucaugcgcauggccuggggcgggagcuacaucgcgcuggacuccggccgggggaacugggacugcaucaugaccagcuaccaguaccugaucauccagaacacgaccugggagaaccacugccaguucucccgccccagccccaucggcuaccucgggcugcugagccagcggacccgcgacaucuacaucucccggcgccuccugggcaccuucacguggacccugagcgacuccgagggcaacgccacccccgggggcuacugccucacccgguggaugcugaucgaggccgagcugaagugcuucgggaacacggccgucgccaagugcaacgagaagcacgacgaggaguucugcgacaugcuccgccuguucgacuucugcaagcaggcgaucagccggcugaagucccccgcccagaugagcauccagcucaucaacaaggccgugaacgcccugaucaacgaccagcugaucaugaagaaccaccuccgcgacaucaugggcauccccuacugcaacuacuccaaguacugcuaccugaaccacaccaucaccgggaagaccagccugcccaagugcugccucguguccaacggcagcuaccugaacgagacgcacuucuccgacgacaucgagcagcaggccgacaacaugaucaccgagaugcugcagaaggaguacauggagcggcagggcaagaccccgcucgggcuggucgaccuguucguguucagcaccuccuucuaccugaucagcaucuuccuccgccuggugaagaucccgacgcaccggcacaucgucggcaagcccugccccaagccccaccgccugaaccacauggggaucugcuccugcggccucuacaagcagccgggggugcccgugcgguggaagcgcugaggacuaguuauaagacugacuagcccgaugggccucccaacgggcccuccuccccuccuugcaccgagauuaaucaaaggcucuuuucagagccaccaaaaaaaaaaaaaaaaaaaaaaaaaaaaaaaaaaaaaaaaaaaaaaaaaaaaaaaaaaaaaaaaagaauu

SEQ ID NO: 34442 - RNA, 1655 nt, Artificial Sequence
  mRNA product Design i-3 (hSL-A64-N5) comprising derived and/or modified sequence from LASV(Togo/2016/7082;Clade VI)__AMR44577__GPCmut8 (opt1)
aggagaaagcuuaccaugggccagaucaucaccuucuuccaggaggugccccacgucaucgaggaggugaugaacaucgugcugaucgcccucagccugcuggccauccucaagggggucuacaacguggcgaccugcggcaucaucgggcuggugacguuccuguuccucugcggccgcuccugcagccugaucuacaagggguccuacgagcugcagacccucgagcugaacauggagacccugaacaugugcaugccgcucagcugcacgaagaacuccagccaccacuacauccgggucggcaacgagaccggccuggagcugacccucaccaacacguccaucaucaaccacaaguucugcaaccugagcgacgcccacaagcgcaaccuguacgaccacgcccucauguccauccugagcaccuuccaccuguccauccccaacuucaaccaguacgaggccaugagcugcgacuucaacgggggcaagaucuccgugcaguacaaccucagccacgccuacgcgguggacgccgccgagcacugcgggaccgucgccaacggcgugcugcagaccuucaugcggauggcguggggcggguccuacaucgcccuggacagcggccgcgggaacugggacugcaucaugacguccuaccaguaccucaucauccagaacaccaccugggaggaccacugccaguucagccggcccucccccaucggcuaccuggggcugcucagccagcgcacccgggacaucuacaucagccgccggcugcugggcacguucaccuggacccucuccgacagcgagggcaacgagacccccgggggcuacugccugacgcgcuggaugcugaucgaggccgagcucaagugcuucgggaacaccgccguggccaagugcaacgagaagcacgacgaggaguucugcgacaugcugcggcuguucgacuucugcaagcaggcgauccagcgccucaagucccccgcccagaugagcauccagcugaucaacaaggccgucaacgcccugaucaacgaccagcucaucaugaagaaccaccuccgggacaugaugggcauccccuacugcaacuacuccaaguacugcuaccugaaccacaccagcuccgggcgcaccagccugcccaagugcugccugguguccaacggcagcuaccugaacgagacgcacuucuccgacgacaucgagcagcaggccgacaacaugaucaccgagaugcuccagaaggaguacaucgaccggcagggcaagaccccgcuggggcugguggaccucuucgucuucagcaccuccuucuaccugaucagcaucuuccugcaccugaucaagaucccgacgcaccgccacaucgugggcaagcccugccccaagccccaccggcucaaccacauggggaucugcuccugcggccuguacaagcagccgggggugcccacccgcuggaagcggugaggacuaguuauaagacugacuagcccgaugggccucccaacgggcccuccuccccuccuugcaccgagauuaaucaaaggcucuuuucagagccaccaaaaaaaaaaaaaaaaaaaaaaaaaaaaaaaaaaaaaaaaaaaaaaaaaaaaaaaaaaaaaaaaagaauu

SEQ ID NO: 34443 - RNA, 1655 nt, Artificial Sequence
  mRNA product Design i-3 (hSL-A64-N5) comprising derived and/or modified sequence from LASV(KAK-428;Clade n.d. (VII))__ANH09740__GPCmut8 (opt1)
aggagaaagcuuaccaugggccagaucgugaccuucuuccaggaggucccccacgugaucgaggaggugaugaacaucguccugaucgcccucagccugcuggccauccucaaggggcuguacaacuucgcgaccugcggcgugaucgggcugaucacguuccuccugcugugcggccgcuccugcagcgccaccuacaaggggcaguacgagcuccagacccuggagcugaacauggagucccucaacaugugcaugccgcugagcugcacgaagaacaacucccaccacuacauccgggccggcaacaacaccggccuggagcucacccugaccaacacgagcaucaucucccacaaguucugcaaccugagcgacgcccacaagaagaaccucuacgaccacacccugauguccaucaucaccaccuuccaccugagcauccccaacuucaaccaguacgaggccauguccugcgacuucaacgggggcaagaucagcauccaguacaaccucucccacagcuacgcgggggacgccgcccagcacugcggcacgguggccaacgggguccugcagaccuucaugcgcauggcguggggcggcuccuaccuggcccucgacagcgggcggcgcggcugggacugcaucaucuccagcuaccaguaccugaucauccagaacaccaccugggacgaccacugccaguucucccggcccagccccaucggguaccugggcuucgugagccagaagacgcgcgacaucuacaucucccggcgccuccugggcaccuucaccuggacccugagcgacuccgaggggcacgacaugccgggcggguacugccucacgcgguggaugcugaucgaggccgaccugaagugcuucggcaacaccgccguggccaagugcaacgagaagcacgacgaggaguucugcgacauguggcgccucuucgacuucugcaagcaggcgauccagcggcugaaggcccccgcccagaugaacauccagcugaucaacaaggccgucaacgcccucaucaacgaccagcugaugaugaagaaccaccuccgcgacaucauggggauccccuacugcaacuacagcaaguucugcuaccugaacaacaccaccacgggccggaccucccugccccgcugcugccugaucagcaacggcuccuaccucaacgagacccacuucagcgacgacaucgagcagcaggcggacaacaugaucaccgagaugcugcagaaggaguacauggaccggcaggggaagacgccccugggccucguggaccuguucguguucuccaccagcuucuaccugaucaccaucuuccuccaccuggucaagaucccgacccaccgccacaucguggggaagcccugccccaagccccaccggcugaaccacaugggcaucugcuccugcgggcuguacaagcagccgggcgugcccguccgcuggaagcggugaggacuaguuauaagacugacuagcccgaugggccucccaacgggcccuccuccccuccuugcaccgagauuaaucaaaggcucuuuucagagccaccaaaaaaaaaaaaaaaaaaaaaaaaaaaaaaaaaaaaaaaaaaaaaaaaaaaaaaaaaaaaaaaaagaauu

SEQ ID NO: 34444 - RNA, 1655 nt, Artificial Sequence; identical to SEQ ID NO: 34438
  mRNA product Design i-3 (hSL-A64-N5) comprising derived and/or modified sequence from LASV(Pinneo-NIG-1969;Clade I)__AIT17836__GPCmut8 (opt1)

SEQ ID NO: 34445 - RNA, 1655 nt, Artificial Sequence
  mRNA product Design i-3 (hSL-A64-N5) comprising derived and/or modified sequence from LASV(ISTH0009-NIG-2011;Clade II)__AIT17404__GPCmut8 (opt1)
aggagaaagcuuaccaugggccagaucaucaccuucuuccaggaggugccccacgucaucgaggaggugaugaacaucgugcugaucgcccucagccugcuggccauccucaaggggaucuacaacgucgcgaccugcggccuguucgggcugguguccuuccuccugcugugcggccgcagcugcuccacgaccuacaaggggguguacgagcuccagacccuggagcuggacauggccagccucaacaugugcaugccgcuguccugcacgaagaacaacagccaccacuacaucauggucggcaacgagaccggccuggagcucacccugaccaacacguccaucaucaaccacaaguucugcaaccugagcgacgcccacaagaagaaccucuacgaccacgcccugauguccaucaucagcaccuuccaccuguccauccccaacuucaaccaguacgaggccaugagcugcgacuucaacgggggcaagaucuccgugcaguacaaccucagccacgcguacgccguggacgccgccaaccacugcgggaccaucgcgaacggcguccugcagaccuucaugcggauggccuggggcggguccuacaucgcccuggacagcggcaagggguccugggacugcaucaugacgagcuaccaguaccucaucauccagaacaccaccugggaggaccacugccaguucucccgccccagccccaucggcuaccuggggcugcucagccagcggacccgcgacaucuacaucucccggcgccugcugggcacguucaccuggacccucagcgacuccgagggcaacgagacccccgggggcuacugccugacgcgguggaugcugaucgaggccgagcucaagugcuucgggaacaccgccguggcgaagugcaacgagaagcacgacgaggaguucugcgacaugcugcgccuguucgacuucugcaagcaggccauccggcgccucaagacccccgcccagaugagcauccagcugaucaacaaggccgugaacgcccugaucaacgaccagcucaucaugaagaaccaccuccgggacaucaugggcaucccguacugcaacuacuccaaguacugcuaccugaaccacaccgucacggggaagaccagccugccccgcugcugccugguguccaacggcagcuaccugaacgagacccacuucuccgacgacaucgagcagcaggcggacaacaugaucaccgagcuccugcagaaggaguacauggaccggcagggcaagacgccccuggggcucguggaccuguucgucuucagcaccuccuucuaccugaucagcaucuuccugcaccucaucaagaucccgacccaccgccacaucaccggcaagcccugccccaagccccaccggcugaaccacauggggaucugcuccugcggccuguacaagcacccgggggugcccgugaaguggaagcgcugaggacuaguuauaagacugacuagcccgaugggccucccaacgggcccuccuccccuccuugcaccgagauuaaucaaaggcucuuuucagagccaccaaaaaaaaaaaaaaaaaaaaaaaaaaaaaaaaaaaaaaaaaaaaaaaaaaaaaaaaaaaaaaaaagaauu

SEQ ID NO: 34446 - RNA, 1655 nt, Artificial Sequence
  mRNA product Design i-3 (hSL-A64-N5) comprising derived and/or modified sequence from LASV(ISTH2010-NIG-2012;Clade II)__AIT17482__GPCmut8 (opt1)
aggagaaagcuuaccaugggccagaucaucaccuucuuccaggaggugccccacgucaucgaggaggugaugaacaucgugcugaucgcccucagccugcuggccauccucaaggggaucuacaacgucgcgaccugcggccuguucgggcugguguccuuccuccugcugugcggccgcagcugcuccacgaccuacaaggggguguacgagcuccagacccuggagcuggacauggccagccucaacaugugcaugccgcuguccugcacgaagaacaacagccaccacuacaucauggucggcaacgagaccggccuggagcucacccugaccaacacguccaucaucaaccacaaguucugcaaccugagcgacgcccacaagaagaaccucuacgaccacgcccugauguccaucaucagcaccuuccaccuguccauccccaacuucaaccaguacgaggccaugagcugcgacuucaacgggggcaagaucuccgugcaguacaaccucagccacgcguacgccguggacgccgccaaccacugcgggaccaucgcgaacggcguccugcagaccuucaugcggauggccuggggcggguccuacaucgcccuggacagcggcaagggguccugggacugcaucaugacgagcuaccaguaccucaucauccagaacaucaccugggaggaccacugccaguucucccgccccagccccaucggcuaccuggggcugcucagccagcggacccgcgacaucuacaucucccggcgccugcugggcaccuucacguggacccucagcgacuccgagggcaacgagacccccgggggcuacugccugacccgguggaugcugaucgaggccgagcucaagugcuucgggaacacggccguggcgaagugcaacgagaagcacgacgaggaguucugcgacaugcugcgccuguucgacuucugcaagcaggccauccggcgccucaagacccccgcccagaugagcauccagcugaucaacaaggccgugaacgcccugaucaacgaccagcucaucaugaagaaccaccuccgggacaucaugggcauccccuacugcaacuacuccaaguacugcuaccugaaccacaccgucaccgggaagacgagccugccccgcugcugccugguguccaacggcagcuaccugaacgagacccacuucuccgacgacaucgagcagcaggcggacaacaugaucaccgagcuccugcagaaggaguacaucgaccggcagggcaagaccccgcuggggcucguggaccuguucgucuucagcacguccuucuaccugaucagcaucuuccugcaccucgugaagaucccgacccaccgccacguggucggcaagcccugccccaagccccaccggcugaaccacauggggaucugcuccugcggccuguacaagcacccgggggugcccgugaaguggaagcgcugaggacuaguuauaagacugacuagcccgaugggccucccaacgggcccuccuccccuccuugcaccgagauuaaucaaaggcucuuuucagagccaccaaaaaaaaaaaaaaaaaaaaaaaaaaaaaaaaaaaaaaaaaaaaaaaaaaaaaaaaaaaaaaaaagaauu

SEQ ID NO: 34447 - RNA, 1655 nt, Artificial Sequence
  mRNA product Design i-3 (hSL-A64-N5) comprising derived and/or modified sequence from LASV(Lassa virus/H.sapiens-wt/NGA/2015/ISTH_0543;Clade II)__AVO03639__GPCmut8 (opt1)
aggagaaagcuuaccaugggccagaucaucaccuucuuccaggaggugccccacgucaucgaggaggugaugaacaucgugcugaucgcccucagccugcuggccauccucaaggggaucuacaacgucgcgaccugcggccuguucgggcugguguccuuccuccugcugugcggccgcagcugcuccacgaccuacaaggggguguacgagcuccagacccuggagcuggacauggccaaccucaacaugugcaugccgcugagcugcacgaagaacaacucccaccacuacaucauggucggcaacgagaccggccuggagcucacccugaccaacacgagcaucaucaaccacaaguucugcaaccuguccgacgcccacaagaagaaccucuacgaccacgcccugaugagcaucaucuccaccuuccaccugagcauccccaacuucaaccaguacgaggccauguccugcgacuucaacgggggcaagaucagcgugcaguacaaccucucccacaccuacgcgguggacgccgccaaccacugcgggaccaucgccaacggcguccugcagacguucaugcggauggcguggggcgggagcuacaucgcccuggacuccggcaaggggagcugggacugcaucaugaccuccuaccaguaccucgugauccagaacaccaccugggaggaccacugccaguucagccgccccucccccaucggcuaccuggggcugcucagccagcggacgcgcgacaucuacaucagccggcgccugcugggcaccuucaccuggacccucuccgacagcgagggcaacgagacgcccgggggcuacugccugacccgguggaugcugaucgaggccgagcucaagugcuucgggaacaccgccguggccaagugcaacgagaagcacgacgaggaguucugcgacaugcugcgccuguucgacuucugcaagcaggcgauccggcgccucaagacccccgcccagauguccauccagcugaucaacaaggccgucaacgcccugaucaacgaccagcucaucaugaagaaccaccuccgggacaucaugggcauccccuacugcaacuacagcaaguacugcuaccugaaccacacggugaccgggaagaccucccugccccgcugcugccuggugagcaacggcuccuaccugaacgagacccacuucagcgacgacaucgagcagcaggccgacaacaugaucacggagcuccugcagaaggaguacaucgaccggcagggcaagaccccgcuggggcucgucgaccuguucguguucuccaccagcuucuaccugaucuccaucuuccugcaccucgugaagaucccgacccaccgccacaucacgggcaagcccugccccaagccccaccggcugaaccacauggggaucugcagcugcggccuguacaagcacccggggguccccgugaaguggaagcgcugaggacuaguuauaagacugacuagcccgaugggccucccaacgggcccuccuccccuccuugcaccgagauuaaucaaaggcucuuuucagagccaccaaaaaaaaaaaaaaaaaaaaaaaaaaaaaaaaaaaaaaaaaaaaaaaaaaaaaaaaaaaaaaaaagaauu

SEQ ID NO: 34448 - RNA, 1655 nt, Artificial Sequence
  mRNA product Design i-3 (hSL-A64-N5) comprising derived and/or modified sequence from LASV(Lassa virus/H.sapiens-wt/NGA/2016/ISTH_0009;Clade II)__AVO03571__GPCmut8 (opt1)
aggagaaagcuuaccaugggccagaucaucaccuucuuccaggaggugccccacgucaucgaggaggugaugaacaucgugcugaucgcccucagccugcuggccauccucaaggggaucuacaacgucgcgaccugcggccugcuggggcucguguccuuccugcugcucugcggccgcagcugcuccacgaccuacaaggggguguacgagcugcagacccuggagcucgacauggccagccugaacaugugcaugccgcuguccugcacgaagaacaacagccaccacuacaucauggucggcaacgagaccggccucgagcugacccugaccaacacguccaucaucaaccacaaguucugcaaccucagcgacgcccacaagaagaaccuguacgaccacgcccugauguccaucaucagcaccuuccaccucuccauccccaacuucaaccaguacgaggccaugagcugcgacuucaacgggggccggaucuccgugcaguacaaccugagccacuccuacgcgguggacgccgccaaccacugcgggaccaucgccaacggcguccugcagaccuucaugcgcauggcguggggcgggagcuacaucgcccucgacuccggcaaggggagcugggacugcaucaugacguccuaccaguaccugaucauccagaacaccaccugggaggaccacugccaguucagccggcccagccccaucggcuaccuggggcuccugucccagcgcacccgggacaucuacaucagccgccggcugcucggcacguucaccuggacccuguccgacagcgagggcaacgagacccccgggggcuacugccugacgcgcuggaugcucaucgaggccgagcugaagugcuucgggaacaccgccguggccaagugcaacgagaagcacgacgaggaguucugcgacaugcugcggcuguucgacuucugcaagcaggcgauccgccggcugaagacccccgcccagauguccauccagcugaucaacaaggccgugaacgcccucaucaacgaccagcugaucaugaagaaccaccuccgcgacaucaugggcaucccguacugcaacuacagcaaguacugcuaccucaaccacaccgucacggggaagaccucccugccccggugcugccuggugagcaacggcuccuaccucaacgagacccacuucagcgacgacaucgagcagcaggccgacaacaugaucaccgagcugcugcagaaggaguacaucgaccgccagggcaagacgccccucgggcugguggaccuguucgucuucuccaccagcuucuaccugaucuccaucuuccuccaccuggugaagaucccgacccaccggcacaucaccggcaagcccugccccaagccccaccgccugaaccacauggggaucugcagcugcggccucuacaaccacccgggggugcccgucaaguggaagcggugaggacuaguuauaagacugacuagcccgaugggccucccaacgggcccuccuccccuccuugcaccgagauuaaucaaaggcucuuuucagagccaccaaaaaaaaaaaaaaaaaaaaaaaaaaaaaaaaaaaaaaaaaaaaaaaaaaaaaaaaaaaaaaaaagaauu

SEQ ID NO: 34449 - RNA, 1655 nt, Artificial Sequence
  mRNA product Design i-3 (hSL-A64-N5) comprising derived and/or modified sequence from LASV(Lassa virus/H.sapiens-wt/NGA/2016/ISTH_0017;Clade II)__AVO03567__GPCmut8 (opt1)
aggagaaagcuuaccaugggccagaucaucaccuucuuccaggaggugccccacgucaucgaggaggugaugaacaucgugcugaucgcccucagccugcuggccauccucaaggggaucuacaacgucgcgaccugcggccuguucgggcugguguccuuccuccugcugugcggccgcagcugcuccacgaccuacaaggggguguacgagcuccagacccuggagcuggacauggccagccucaacaugugcaugccgcuguccugcacgaagaacaacagccaccacuacaucauggucggcaacgagaccggccuggagcucacccugaccaacacguccaucaucaaccacaaguucugcaaccugagcgacgcccacaagaagaaccucuacgaccacgcccugauguccaucaucagcaccuuccaccuguccauccccaacuucaaccaguacgaggccaugagcugcgacuucaacgggggcaagaucuccgugcaguacaaccucagccacaccuacgcgaucgacgccgccaaccacugcgggaccaucgccaacggcgugcugcagacguucaugcggauggcguggggcggguccuacaucgcccuggacagcggcaagggguccugggacugcaucaugaccagcuaccaguaccucaucauccagaacaccaccugggaggaccacugccaguucucccgccccagccccaucggcuaccuggggcugcucagccagcggacgcgcgacaucuacaucucccggcgccugcugggcaccuucaccuggacccucagcgacuccgagggcaacgagacgcccgggggcuacugccugacccgguggaugcugaucgaggccgagcucaagugcuucgggaacaccgccgucgccaagugcaacgagaagcacgacgaggaguucugcgacaugcugcgccuguucgacuucugcaagcaggcgauccggcgccucaagacccccgcccagaugagcauccagcugaucaacaaggccgugaacgcccugaucaacgaccagcucaucaugaagaaccaccuccgggacaucaugggcauccccuacugcaacuacuccaaguacugcuaccugaaccacacggugaccgggaagaccagccugccccgcugcugccuggucuccaacggcagcuaccugaacgagacccacuucuccgacgacaucgagcagcaggccgacaacaugaucacggagcuccugcagaaggaguacauggaccggcagggcaagaccccgcuggggcucguggaccuguucguguucagcaccuccuucuaccugaucagcaucuuccugcaccucguccgcaucccgacccaccggcacgugaucggcaagcccugccccaagccccaccgccugaaccacauggggaucugcuccugcggccuguacaagcacccgggggugcccgucaaguggaagcggugaggacuaguuauaagacugacuagcccgaugggccucccaacgggcccuccuccccuccuugcaccgagauuaaucaaaggcucuuuucagagccaccaaaaaaaaaaaaaaaaaaaaaaaaaaaaaaaaaaaaaaaaaaaaaaaaaaaaaaaaaaaaaaaaagaauu

SEQ ID NO: 34450 - RNA, 1655 nt, Artificial Sequence
  mRNA product Design i-3 (hSL-A64-N5) comprising derived and/or modified sequence from LASV(Lassa virus/H.sapiens-wt/NGA/2018/ISTH_0959;Clade II)__AVV65099__GPCmut8 (opt1)
aggagaaagcuuaccaugggccagaucaucaccuucuuccaggaggugccccacgucaucgaggaggugaugaacaucgugcugaucgcccucagccugcuggccauccucaaggggaucuacaacgucgugaccugcggccuguucgggcugguguccuuccuccugcugugcggccgcagcugcuccacgaccuacaagggggucuacgagcuccagacccuggagcuggacauggcgagccucaacaugugcaugccgcuguccugcacgaagaacaacagccaccacuacaucauggugggcaacgagaccggccuggagcucacccugaccaacacguccaucaucaaccacaaguucugcaaccugagcgacgcccacaagaagaaccucuacgaccacgcccugauguccaucaucagcaccuuccaccuguccauccccaacuucaaccaguacgaggccaugagcugcgacuucaacgggggcaagaucuccgugcaguacaaccucagccacgccuacgcgaucgacgccgccaaccacugcgggaccaucgccaacggcguccugcagaccuucaugcggauggcguggggcggguccuacaucgcccuggacagcggcaagggguccugggacugcaucaugacgagcuaccaguaccucaucauccagaacaccaccugggaggaccacugccaguucucccgccccagccccaucggcuaccuggggcugcucagccagcggacccgcgacaucuacaucucccggcgccugcugggcacguucaccuggacccucagcgacuccgagggcaacgagacccccgggggcuacugccugacgcgguggaugcugaucgaggccgagcucaagugcuucgggaacaccgccguggccaagugcaacgagaagcacgacgaggaguucugcgacaugcugcgccuguucgacuucugcaagcaggcgauccggcgccucaagacccccgcccagaugagcauccagcugaucaacaaggccgugaacgcccugaucaacgaccagcucaucaugaagaaccaccuccgggacaucaugggcaucccguacugcaacuacuccaaguacugcuaccugaaccacaccgucacggggaagaccagccugccccgcugcugccugguguccaacggcagcuaccugaacgagacccacuucuccgacgacaucgagcagcaggccgacaacaugaucaccgagcuccugcagaaggaguacaucgaccggcagggcaagacgccccuggggcucguggaccuguucgucuucagcaccuccuucuaccugaucagcaucuuccugcaccucgugaagaucccgacccaccgccacgugaucggcaagcccugccccaagccccaccggcugaaccacauggggaucugcuccugcggccuguacaagcacccggggguccccgugaaguggaagcgcugaggacuaguuauaagacugacuagcccgaugggccucccaacgggcccuccuccccuccuugcaccgagauuaaucaaaggcucuuuucagagccaccaaaaaaaaaaaaaaaaaaaaaaaaaaaaaaaaaaaaaaaaaaaaaaaaaaaaaaaaaaaaaaaaagaauu

SEQ ID NO: 34451 - RNA, 1655 nt, Artificial Sequence
  mRNA product Design i-3 (hSL-A64-N5) comprising derived and/or modified sequence from LASV(LASV003-NIG-2008;Clade II)__AIT17580__GPCmut8 (opt1)
aggagaaagcuuaccaugggccagaucaucaccuucuuccaggaggugccccacgucaucgaggaggugaugaacaucgugcugaucgcccucagccugcuggccauccucaaggggaucuacaacgucgcgaccugcggccuguucgggcugguguccuuccuccugcugugcggccgcagcugcuccacgaccuacaaggggguguacgagcuccagacccuggagcuggacauggccagccucaacaugugcaugccgcuguccugcacgaagaacaacagccaccacuacaucauggucggcaacgagaccggccuggagcucacccugaccaacacguccaucaucaaccacaaguucugcaaccugagcgacgcccacaagaagaaccucuacgaccacgcccugauguccaucaucagcaccuuccaccuguccauccccaacuucaaccaguacgaggccaugagcugcgacuucaacgggggcaagaucuccgugcaguacaaccucagccacaccuacgcgguggacgccgccaaccacugcgggaccaucgccaacggcguccugcagacguucaugcggauggcguggggcggguccuacaucgcccuggacagcggcaagggguccugggacugcaucaugaccagcuaccaguaccucaucauccagaacaccaccugggaggaccacugccaguucucccgccccagccccaucggcuaccuggggcugcucagccagcggacgcgcgacaucuacaucucccggcgccugcugggcaccuucaccuggacccucagcgacuccgagagcaacgagacgccgggcggguacugccugacccgguggaugcugaucgaggccgagcucaagugcuucggcaacaccgccguggccaagugcaacgagaagcacgacgaggaguucugcgacaugcugcgccuguucgacuucugcaagcaggcgauccggcgccucaaggcccccgcccagauguccauccagcugaucaacaaggccgugaacgcccugaucaacgaccagcucaucaugaagaaccaccuccgggacaucauggggauccccuacugcaacuacagcaaguacugcuaccugaaccacaccgucacgggccgcaccucccugccccggugcugccuggugagcaacggguccuaccugaacgagacccacuucagcgacgacaucgagcagcaggcggacaacaugaucaccgagcuccugcagaaggaguacauggaccgccagggcaagacgccccugggccucguggaccuguucgucuucuccaccagcuucuaccugaucuccaucuuccugcaccucgugaagaucccgacccaccggcacgugaucgggaagcccugccccaagccccaccgccugaaccacaugggcaucugcagcugcgggcuguacaagcacccgggcguccccgugaaguggaagcggugaggacuaguuauaagacugacuagcccgaugggccucccaacgggcccuccuccccuccuugcaccgagauuaaucaaaggcucuuuucagagccaccaaaaaaaaaaaaaaaaaaaaaaaaaaaaaaaaaaaaaaaaaaaaaaaaaaaaaaaaaaaaaaaaagaauu

SEQ ID NO: 34452 - RNA, 1655 nt, Artificial Sequence
  mRNA product Design i-3 (hSL-A64-N5) comprising derived and/or modified sequence from LASV(LASV035-NIG-2009;Clade II)__AIT17588__GPCmut8 (opt1)
aggagaaagcuuaccaugggccagaucaucaccuucuuccaggaggugccccacgucaucgaggaggugaugaacaucgugcugaucgcccucagccugcuggccauccucaaggggaucuacaacgucgcgaccugcggccuguucgggcugguguccuuccuccugcugugcggccgcagcugcuccacgaccuacaaggggguguacgagcuccagacccuggagcuggacauggccagccucaacaugugcaugccgcuguccugcacgaagaacaacagccaccacuacaucauggucggcaacgagaccggccuggagcucacccugaccaacacguccaucaucaaccacaaguucugcaaccugagcgacgcccacaagaagaaccucuacgaccacgcccugauguccaucaucagcaccuuccaccuguccauccccaacuucaaccaguacgaggccaugagcugcgacuucaacgggggcaagaucuccgugcaguacaaccucagccacgcguacgccguggacgccgccaaccacugcgggaccaucgcgaacggcguccugcagaccuucaugcggauggccuggggcggguccuacaucgcccuggacagcggcaagggguccugggacugcaucaugacgagcuaccaguaccucaucauccagaacaccaccugggaggaccacugccaguucucccgccccagccccaucggcuaccuggggcugcucagccagcggacccgcgacaucuacaucucccggcgccugcugggcacguucaccuggacccucagcgacuccgagggcaacgagacccccgggggcuacugccugacgcgguggaugcugaucgaggccgagcucaagugcuucgggaacaccgccguggcgaagugcaacgagaagcacgacgaggaguucugcgacaugcugcgccuguucgacuucugcaagcaggccauccggcgccucaaggcccccgcccagaugagcauccagcugaucaacaaggccgugaacgcgcugaucaacgaccagcucaucaugaagaaccaccuccgggacaucaugggcauccccuacugcaacuacuccaaguacugcuaccugaaccacaccgucaccgggaagacgagccugccccgcugcugccugguguccaacggcagcuaccugaacgagacccacuucuccgacgacaucgagcagcaggccgacaacaugaucaccgagcuccugcagaaggaguacaucgaccggcagggcaagaccccgcuggggcucguggaccuguucgucuucagcacguccuucuaccugaucagcaucuuccugcaccucgugaagaucccgacccaccgccacgugaucggcaagcccugccccaagccccaccggcugaaccacauggggaucugcuccugcggccuguacaagcacccggggguccccgugaaguggaagcgcugaggacuaguuauaagacugacuagcccgaugggccucccaacgggcccuccuccccuccuugcaccgagauuaaucaaaggcucuuuucagagccaccaaaaaaaaaaaaaaaaaaaaaaaaaaaaaaaaaaaaaaaaaaaaaaaaaaaaaaaaaaaaaaaaagaauu

SEQ ID NO: 34453 - RNA, 1655 nt, Artificial Sequence
  mRNA product Design i-3 (hSL-A64-N5) comprising derived and/or modified sequence from LASV(LASV1000-NIG-2009;Clade II)__AIT17782__GPCmut8 (opt1)
aggagaaagcuuaccaugggccagaucaucaccuucuuccaggaggugccccacgucaucgaggaggugaugaacaucgugcugaucgcccucagccugcuggccauccucaaggggaucuacaacgucgcgaccugcggccuguucgggcugguguccuuccuccugcugugcggccgcagcugcuccacgaccuacaaggggguguacgagcuccagacccuggagcuggacauggccagccucaacaugugcaugccgcuguccugcacgaagaacaacagccaccacuacaucauggucggcaacgagaccggccuggagcucacccugaccaacacguccaucaucaaccacaaguucugcaaccugagcgacgcccacaagaagaaccucuacgaccacgcccugauguccaucaucagcaccuuccaccuguccauccccaacuucaaccaguacgaggccaugagcugcgacuucaacgggggcaagaucuccgugcaguacaaccucagccacaccuacgcgguggacgccgccaaccacugcgggaccaucgccaacggcguccugcagacguucaugcggauggcguggggcggguccuacaucgcccuggacagcggcaagggguccugggacugcaucaugaccagcuaccaguaccucaucauccagaacaccaccugggaggaccacugccaguucucccgccccagccccaucggcuaccuggggcugcucagccagcggacgcgcgacaucuacaucucccggcgccugcugggcaccuucaccuggacccucagcgacuccgagggcaacgagacgcccgggggcuacugccugacccgguggaugcugaucgaggccgagcucaagugcuucgggaacaccgccguggccaagugcaacgagaagcacgacgaggaguucugcgacaugcugcgccuguucgacuucugcaagcaggcgaucaagcggcucaagacccccgcccagaugagcauccagcugaucaacaaggccgugaacgcccugaucaacgaccagcucaucaugaagaaccaccuccgcgacaucaugggcauccccuacugcaacuacuccaaguacugcuaccugaaccacacggucaccgggaagaccagccugccccggugcugccugguguccaacggcagcuaccugaacgagacccacuucuccgacgacaucgagcagcaggccgacaacaugaucacggagcuccugcagaaggaguacaucgaccgccagggcaagaccccgcuggggcucguggaccuguucgucuucagcaccuccuucuaccugaucagcaucuuccugcaccucgugaagaucccgacccaccggcacguggucggcaagcccugccccaagccccaccgccugaaccacauggggaucugcuccugcggccuguacaagcacccgggggugcccgugaaguggaagcggugaggacuaguuauaagacugacuagcccgaugggccucccaacgggcccuccuccccuccuugcaccgagauuaaucaaaggcucuuuucagagccaccaaaaaaaaaaaaaaaaaaaaaaaaaaaaaaaaaaaaaaaaaaaaaaaaaaaaaaaaaaaaaaaaagaauu

SEQ ID NO: 34454 - RNA, 1655 nt, Artificial Sequence
  mRNA product Design i-3 (hSL-A64-N5) comprising derived and/or modified sequence from LASV(LASV221-NIG-2010;Clade II)__AIT17624__GPCmut8 (opt1)
aggagaaagcuuaccaugggccagaucaucaccuucuuccaggaggugccccacgucaucgaggaggugaugaacaucgugcugaucgcccucagccugcuggccauccucaaggggaucuacaacgucgcgaccugcggccuguucgggcugguguccuuccuccugcugugcggccgcagcugcuccacgaccuacaaggggguguacgagcuccagacccuggagcuggacauggccagccucaacaugugcaugccgcuguccugcacgaagaacaacagccaccacuacaucauggucggcaacgagaccggccuggagcucacccugaccaacacguccaucaucaaccacaaguucugcaaccugagcgacgcccacaagaagaaccucuacgaccacgcccugauguccaucaucagcaccuuccaccuguccauccccaacuucaaccaguacgaggccaugagcugcgacuucaacgggggcaagaucuccgugcaguacaaccucagccacaccuacgcgaucgacgccgccaaccacugcgggaccaucgccaacggcgugcugcagacguucaugcggauggcguggggcggguccuacaucgcccuggacagcggcaagggguccugggacugcaucaugaccagcuaccaguaccucaucauccagaacaccaccugggaggaccacugccaguucucccgccccagccccaucggcuaccuggggcugcucagccagcggacgcgcgacaucuacaucucccggcgccugcugggcaccuucaccuggacccucagcgacuccgagggcaacgagacgcccgggggcuacugccugacccgguggaugcugaucgaggccgagcucaagugcuucgggaacaccgccgucgccaagugcaacgagaagcacgacgaggaguucugcgacaugcugcgccuguucgacuucugcaagcaggcgauccggcgccucaagacccccgcccagaugagcauccagcugaucaacaaggccgugaacgcccugaucaacgaccagcucaucaugaagaaccaccuccgggacaucaugggcauccccuacugcaacuacuccaaguacugcuaccugaaccacacggugaccgggaagaccagccugccccgcugcugccuggucuccaacggcagcuaccugaacgagacccacuucuccgacgacaucgagcagcaggccgacaacaugaucacggagaugcuccagaaggaguacauggaccggcagggcaagaccccgcuggggcugguggaccucuucguguucagcaccuccuucuaccugaucagcaucuuccugcaccuggucaagaucccgacccaccgccacgugaucggcaagcccugccccaagccccaccggcucaaccacauggggaucugcuccugcggccuguacaagcacccgggggugcccgucaaguggaagcgcugaggacuaguuauaagacugacuagcccgaugggccucccaacgggcccuccuccccuccuugcaccgagauuaaucaaaggcucuuuucagagccaccaaaaaaaaaaaaaaaaaaaaaaaaaaaaaaaaaaaaaaaaaaaaaaaaaaaaaaaaaaaaaaaaagaauu

SEQ ID NO: 34455 - RNA, 1655 nt, Artificial Sequence
  mRNA product Design i-3 (hSL-A64-N5) comprising derived and/or modified sequence from LASV(LASV237-NIG-2010;Clade II)__AIT17638__GPCmut8 (opt1)
aggagaaagcuuaccaugggccagaucaucaccuucuuccaggaggugccccacgucaucgaggaggugaugaacaucgugcugaucgcccucagccugcuggccauccucaaggggaucuacaacgucgcgaccugcggccuguucgggcugguguccuuccuccugcugugcggccgcagcugcuccacgaccuacaaggggguguacgagcuccagacccuggagcuggacauggccagccucaacaugugcaugccgcuguccugcacgaagaacaacagccaccacuacaucauggucggcaacgagaccggccuggagcucacccugaccaacacguccaucaucaaccacaaguucugcaaccugagcgacgcccacaagaaggaccucuacgaccacgcccugauguccaucaucagcaccuuccaccuguccauccccaacuucaaccaguacgaggccaugagcugcgacuucaacgggggcaagaucuccgugcaguacaaccucagccacaccuacgcgguggacgccgccaaccacugcgggaccaucgccaacggcguccugcagacguucaugcggauggcguggggcggguccuacaucgcccuggacagcggcaagggguccugggacugcaucaugaccagcuaccaguaccucaucauccagaacaccaccugggaggaccacugccaguucucccgccccagccccaucggcuaccuggggcugcucagccagcggacgcgcgacaucuacaucucccggcgccugcugggcaccuucaccuggacccucagcgacuccgagggcaacgagacgcccgggggcuacugccugacccgguggaugcugaucgaggccgagcucaagugcuucgggaacaccgccguggccaagugcaacgagaagcacgacgaggaguucugcgacaugcugcgccuguucgacuucugcaagcaggcgauccggcgccucaagacccccgcccagaugagcauccagcugaucaacaaggccgugaacgcccugaucaacgaccagcucaucaugaagaaccaccuccgggacaucaugggcauccccuacugcaacuacuccaaguacugcuaccugaaccacacggucaccgggaagaccagccugccccgcugcugccugguguccaacggcagcuaccugaacgagacccacuucuccgacgacaucgagcagcaggccgacaacaugaucacggagcuccugcagaaggaguacauggaccggcagggcaagaccccgcuggggcucguggaccuguucgucuucagcaccuccuucuaccugaucagcaucuuccugcaccucaucaagaucccgacccaccgccacaucacgggcaagcccugccccaagccccaccggcugaaccacauggggaucugcuccugcggccuguacaagcacccgggggugcccgugaaguggaagcgcugaggacuaguuauaagacugacuagcccgaugggccucccaacgggcccuccuccccuccuugcaccgagauuaaucaaaggcucuuuucagagccaccaaaaaaaaaaaaaaaaaaaaaaaaaaaaaaaaaaaaaaaaaaaaaaaaaaaaaaaaaaaaaaaaagaauu

SEQ ID NO: 34456 - RNA, 1655 nt, Artificial Sequence
  mRNA product Design i-3 (hSL-A64-N5) comprising derived and/or modified sequence from LASV(LASV253-NIG-2011;Clade II)__AIT17670__GPCmut8 (opt1)
aggagaaagcuuaccaugggccagaucaucaccuucuuccaggaggugccccacgucaucgaggaggugaugaacaucgugcugaucgcccucagccugcuggccauccucaaggggaucuacaacgucgcgaccugcggccuguucgggcugguguccuuccuccugcugugcggccgcagcugcuccacgaccuacaaggggguguacgagcuccagacccuggagcuggacauggccagccucaacaugugcaugccgcuguccugcacgaagaacaacagccaccacuacaucauggucggcaacgagaccggccuggagcucacccugaccaacacguccaucaucaaccacaaguucugcaaccugagcgacgcccacaagaagaaccucuacgaccacgcccugauguccaucaucagcaccuuccaccuguccauccccaacuucaaccaguacgaggccaugagcugcgacuucaacgggggcaagaucuccgugcaguacaaccucagccacaccuacgcgguggacgccgccaaccacugcgggaccaucgccaacggcguccugcagacguucaugcggauggcguggggcggguccuacaucgcccuggacagcggcaagggguccugggacugcaucaugaccagcuaccaguaccucaucauccagaacaccaccugggaggaccacugccaguucucccgccccagccccaucggcuaccuggggcugcucagccagcggacgcgcgacaucuacaucucccggcgccugcugggcaccuucaccuggacccucagcgacuccgagggcaacgagacgcccgggggcuacugccugacccgguggaugcugaucgaggccgagcucaagugcuucgggaacaccgccguggccaagugcaacgagaagcacgacgaggaguucugcgacaugcugcgccuguucgacuucugcaagcaggcgauccggcgccucaaggcccccgcccagaugagcauccagcugaucaacaaggccgugaacgcccugaucaacgaccagcucaucaugaagaaccaccuccgggacaucaugggcaucccguacugcaacuacuccaaguacugcuaccugaaccacaccgucacggggcgcaccagccugccccggugcugccugguguccaacggcagcuaccugaacgagacccacuucuccgacgacaucgagcagcaggcggacaacaugaucaccgagcuccugcagaaggaguacaucgaccgccagggcaagacgccccuggggcucguggaccuguucgucuucagcaccuccuucuaccugaucagcaucuuccugcaccucgugaagaucccgacccaccggcacaucaucggcaagcccugccccaagccccaccgccugaaccacauggggaucugcuccugcggccuguacaagcacccgggggugcccgucaaguggaagcggugaggacuaguuauaagacugacuagcccgaugggccucccaacgggcccuccuccccuccuugcaccgagauuaaucaaaggcucuuuucagagccaccaaaaaaaaaaaaaaaaaaaaaaaaaaaaaaaaaaaaaaaaaaaaaaaaaaaaaaaaaaaaaaaaagaauu

SEQ ID NO: 34457 - RNA, 1655 nt, Artificial Sequence
  mRNA product Design i-3 (hSL-A64-N5) comprising derived and/or modified sequence from LASV(LASV254-NIG-2011;Clade II)__AIT17674__GPCmut8 (opt1)
aggagaaagcuuaccaugggccagaucaucaccuucuuccaggaggugccccacgucaucgaggaggugaugaacaucgugcugaucgcccucagccugcuggccauccucaaggggaucuacaacgucgcgaccugcggccuguucgggcugguguccuuccuccugcugugcggccgcagcugcuccacgaccuacaaggggguguacgagcuccagacccuggagcuggacaugaccaaccucaacaugugcaugccgcugagcugcaccaagaacaacucccaccacuacaucauggucggcaacgagaccggccuggagcucacccugacgaacaccagcaucaucaaccacaaguucugcaaccuguccgacgcccacaagaagaaccucuacaaccacgcccugaugagcaucaucuccaccuuccaccugagcauccccaacuucaaccaguacgaggccauguccugcgacuucaacgggggcaagaucagcgugcaguacaaccucucccacagcuacgccguggacgcggccaaccacugcgggaccaucgccaacggcguccugcagacguucaugcggauggccuggggcggguccuacaucgcgcuggacagcggcaaggggaacugggacugcaucaugaccuccuaccaguaccucaucauccagaacaccaccugggaggaccacugccaguucagccgccccucccccaucggcuaccuggggcugcucagccagcggacgcgcgacaucuacaucagccggcgccugcugggcaccuucaccuggacccucuccgacagcgagggcaacgagacgcccgggggcuacugccugacccgguggaugcugaucgaggccgagcucaagugcuucgggaacaccgccguggccaagugcaacgagaagcacgacgaggaguucugcgacaugcugcgccuguucgacuucugcaagcaggccauccggcgccucaagacccccgcgcaggccaacauccagcugaucaacaaggccgugaacgcccugaucaacgaccagcucaucaugaagaaccaccuccgggacaucaugggcauccccuacugcaacuacuccaaguacugcuaccugaaccacacggucaccgggaagaccagccugccccgcugcugccugguguccaacggcagcuaccugaacgagacccacuucuccgacgacaucgagcagcaggccgacaacaugaucacggagcuccugcagaaggaguacauggaccggcagggcaagaccccgcuggggcucguggaccuguucgucuucagcaccuccuucuaccugaucagcaucuuccugcaccucgugaagaucccgacccaccgccacgugaucggcaagcccugccccaagccccaccggcugaaccacauggggaucugcuccugcggccuguacaagcacccggggguccccgugaaguggaagcgcugaggacuaguuauaagacugacuagcccgaugggccucccaacgggcccuccuccccuccuugcaccgagauuaaucaaaggcucuuuucagagccaccaaaaaaaaaaaaaaaaaaaaaaaaaaaaaaaaaaaaaaaaaaaaaaaaaaaaaaaaaaaaaaaaagaauu

SEQ ID NO: 34458 - RNA, 1655 nt, Artificial Sequence
  mRNA product Design i-3 (hSL-A64-N5) comprising derived and/or modified sequence from LASV(Nig08-A19;Clade III)__ADU56618__GPCmut8 (opt1)
aggagaaagcuuaccaugggccagaucgugaccuucuuccaggaggucccccacgugaucgaggaggugaugaacaucguccugaucgcccucagcauccuggccauccugaaggggcucuacaacaucgcgaccugcggccugaucgggcuggugacguuccuccugcuguccggccgcagcugcuccaugaccuacaaggggguguacgagcuccagacccuggagcugaacaugaacacccucaacaugugcaugccgcugagcugcaccaagaacaacucccaccacuacaucauggucggcaacgagaccggccuggagcucacccugacgaacaccagccugcuccaccacaaguucugcaaccuguccgacgcccacaagaagaaccuguacgaccacacccucaugagcaucaucuccaccuuccaccugagcauccccaacuucaaccaguacgaggccauguccugcgacuucaacgggggcaagaucacggugcaguacaaccugagccacuccuacgccaucgacgccgcgaaccacugcgggaccguggccaacggcguccuccagaccuucaugcggauggccuggggcgggagcuacaucgcccuggacuccggccgcgggaagugggacugcaucaugaccagcuaccaguaccugaucauccagaacacgaccugggaggaccacugccaguucucccggcccagccccaucggcuaccucgggcugcugucccagcgcacccgggacaucuacaucagccgccggcuccugggcaccuucacguggacccugagcgacuccgagggcaacgagacccccgggggcuacugccucacccgcuggaugcugaucgaggcggagcugaagugcuucgggaacacggccguggccaagugcaacgagaagcacgacgaggaguucugcgacaugcuccggcuguucgacuucugcaagcaggccauccgccggcugaaggcccccgcgcagaugagcauccagcucaucaacaaggccgugaacgcccugaucaacgaccagcugaucaugaagaaccaccuccgcgacaucaugggcauccccuacugcaacuacuccaaguacugcuaccugaaccacaccagcaccgggcggaccucccugccccgcugcugccucgucagcaacggcuccuaccugaacgagacgcacuucagcgacgacaucgagcagcaggccgacaacaugaucaccgagaugcugcagaaggaguaccucgaccggcagggcaagaccccgcuggggcugguggaccuguucguguucuccaccagcuucuaccucaucuccaucuuccugcaccuggucaagaucccgacgcaccgccacaucgugggcaagcccugccccaagccccaccggcucaaccacauggggaucugcagcugcggccuguacaagcagccgggggugcccguccgcuggaagcggugaggacuaguuauaagacugacuagcccgaugggccucccaacgggcccuccuccccuccuugcaccgagauuaaucaaaggcucuuuucagagccaccaaaaaaaaaaaaaaaaaaaaaaaaaaaaaaaaaaaaaaaaaaaaaaaaaaaaaaaaaaaaaaaaagaauu

SEQ ID NO: 34459 - RNA, 1658 nt, Artificial Sequence
  mRNA product Design i-3 (hSL-A64-N5) comprising derived and/or modified sequence from LASV(G1180-SLE-2010;Clade IV)__AIT17168__GPCmut8 (opt1)
aggagaaagcuuaccaugggccagaucgugaccuucuuccaggaggucccccacgugaucgaggaggugaugaacaucguccugaucgcccucagcauccuggccgugcugaaggggcucuacaacuucgcgaccugcggccugguggggcugcucaccuuccugcugcucugcggccgcuccugcaccgccagccgguacaagggggucuacgagcugcagacccuggagcucaacauggagacccugaacaugugcaugccgcuguccugcaccaagaacaacagccaccacuacaucauggugggcaacgagaccggccucgagcugacccugacgaacaccuccaucaucaaccacaaguucugcaaccucagcgacgcccacaagaagaaccuguacgaccacgcccugauguccaucaucagcaccuuccaccucuccauccccaacuucaaccaguacgaggccaugagcugcgacuucaacgggggcaagaucuccgugcaguacaaccugagccacuccuacgcgggggacgccgccaaccacugcggcaccgucgccaacggggugcugcagacguucaugcgcauggcguggggcggcagcuacaucgcccucgacuccgggcacggcagcugggacugcaucaugaccuccuaccaguaccugaucauccagaacaccaccugggaggaccacugccaguucagccggcccucccccaucggguaccugggccuccugagccagcgcacgcgggacaucuacaucagccgccggcugcucggcaccuucaccuggacccuguccgacagcgaggggaaggacacgccgggcggguacugccugacccgcuggaugcucaucgaggccgagcugaagugcuucggcaacaccgccguggccaagugcaacgagaagcacgacgaggaguucugcgacaugcugcggcuguucgacuucugcaagcaggcgauccagcgccugaaggcccccgcccagauguccauccagcugaucaacaaggccgucaacgcccucaucaacgaccagcugaucaugaagaaccaccuccgggacaucauggggauccccuacugcaacuacagcaaguacugcuaccucaaccacaccacgaccggcaagaccucccugcccaagugcugccuggugagcaacggcuccuaccucaacgagacccacuucagcgacgacaucgagcagcaggcggacaacaugaucacggagaugcugcagaaggaguacauggagcgccaggggaagacgccccugggccucguggaccuguucgucuucuccaccagcuucuaccugaucuccaucuuccugcaccucgugaagaucccgacccaccggcacaucgugggcaagagcugccccaagccccaccgccugaaccacauggggaucugcuccugcgggcuguacaagcagcccggcgucccggugaaguggaagcggugaggacuaguuauaagacugacuagcccgaugggccucccaacgggcccuccuccccuccuugcaccgagauuaaucaaaggcucuuuucagagccaccaaaaaaaaaaaaaaaaaaaaaaaaaaaaaaaaaaaaaaaaaaaaaaaaaaaaaaaaaaaaaaaaagaauu

SEQ ID NO: 34460 - RNA, 1658 nt, Artificial Sequence
  mRNA product Design i-3 (hSL-A64-N5) comprising derived and/or modified sequence from LASV(G1442-SLE-2011;Clade IV)__AIT17180__GPCmut8 (opt1)
aggagaaagcuuaccaugggccagaucgugaccuucuuccaggaggucccccacgugaucgaggaggugaugaacaucguccugaucgcccucagcauccuggccgugcugaaggggcucuacaacguggcgaccugcggccugaucgggcuggucacguuccuccugcugugcggccgcuccugcaccaccacccucuacaaggggguguacgagcugcagacgcuggagcucaacauggagacccugaacaugugcaugccgcugagcugcaccaagaacaacucccaccacuacauccgggugggcaacgagacgggccucgagcugacccugaccaacaccagcaucaucaaccacaaguucugcaaccucuccgacgcccacaagaagaaccuguacgaccacgcccugaugagcaucaucuccacguuccaccucagcauccccaacuucaaccaguacgaggccauguccugcgacuucaacgggggcaagaucagcguccaguacaaccugucccacagcuacgccggggacgcggccaaccacugcggcaccguggccaacggggugcugcagaccuucaugcgcauggccuggggcggcuccuacaucgcgcucgacagcgggcggggcaacugggacugcaucaugaccuccuaccaguaccugaucauccagaacacgaccugggacgaccacugccaguucagccgccccucccccaucggguaccugggccuccugagccagcggacccgcgacgucuacaucucccggcgccugcucggcaccuucacguggacccugagcgacagcgaggggaaggacaccccgggcggguacugccugacccgguggaugcucaucgaggccgagcugaagugcuucggcaacacggccguggccaagugcaacgagaagcacgacgaggaguucugcgacaugcugcgccucuucgacuucugcaagcaggccauccagcggcugaaggcgcccgcccagauguccauccagcugaucaacaaggccgugaacgcccucaucaacgaccagcugaucaugaagaaccaccuccgcgacaucauggggauccccuacugcaacuacagcaaguacugcuaccugaacaacaccgccaccggcaagaccucccugcccaagugcugccugaucagcaacggcuccuaccucaacgagacgcacuucagcgacgacaucgagcaggaggcggacaacaugaucaccgagaugcugcagaaggaguacauggagcggcaggggaagacgccccugggccucgucgaccuguucguguucuccaccagcuucuaccugaucuccaucuuccugcaccucgugaagaucccgacccaccgccacaucgucggcaagagcugccccaagccccaccggcugaaccacauggggaucugcuccugcgggcuguacaagcagcccggcgugccggugcgcuggaagcggugaggacuaguuauaagacugacuagcccgaugggccucccaacgggcccuccuccccuccuugcaccgagauuaaucaaaggcucuuuucagagccaccaaaaaaaaaaaaaaaaaaaaaaaaaaaaaaaaaaaaaaaaaaaaaaaaaaaaaaaaaaaaaaaaagaauu

SEQ ID NO: 34461 - RNA, 1658 nt, Artificial Sequence
  mRNA product Design i-3 (hSL-A64-N5) comprising derived and/or modified sequence from LASV(G3010-SLE-2013;Clade IV)__AIT17344__GPCmut8 (opt1)
aggagaaagcuuaccaugggccagaucgugaccuucuuccaggaggucccccacgugaucgaggaggugaugaacaucguccugaucgcccucagcauccuggccgugcugaaggggcucuacaacuucgcgaccugcggccugguggggcuggucacguuccuccugcugugcggccgcuccugcaccaccagccucuacaaggggguguacgagcugcagacccuggagcucaacauggagacgcugaacaugugcaugccgcuguccugcaccaagaacaacagccaccacuacaucauggugggcaacgagaccggccucgagcugacgcugaccaacaccuccaucaucaaccacaaguucugcaaccucagcgacgcccacaagaagaaccuguacaaccacgcccugauguccaucaucagcaccuuccaccucuccauccccaacuucaaccaguacgaggccaugagcugcgacuucaacgggggcaagaucuccguccaguacaaccugagccacuccuacgccggggacgcggccagccacugcggcacgguggccaacggggugcugcagaccuucaugcggauggccuggggcggcuccuacaucgcgcucgacagcggguacggcaagugggacugcaucaugaccuccuaccaguaccugaucauccagaacaccacgugggaggaccacugccaguucagccgccccucccccaucggguaccugggccuccugagccagcggacccgcgacaucuacaucagccggcgccugcucggcaccuucaccuggacgcuguccgacagcgaggggaaggacaccccgggcggguacugccugacccgguggaugcucaucgaggccgagcugaagugcuucggcaacaccgccgucgccaagugcaacgagaagcacgacgaggaguucugcgacaugcugcgccucuucgacuucugcaagcaggccauccagcggcugaagacgcccgcgcagauguccauccagcugaucaacaaggccgugaacgcccucaucaacgaccagcugaucaugaagaaccaccuccgcgacaucauggggauccccuacugcaacuacagcaaguacugcuaccugaaccacaccaccaccggcaagacgucccugcccaagugcugccuggugagcaacggcuccuaccucaacgagacccacuucagcgacgacaucgagcagcaggccgacaacaugaucaccgagaugcugcagaaggaguacauggagcggcaggggaagacgccccugggccucgucgaccuguucguguucuccaccagcuucuaccugaucuccaucuuccugcaccucgugaagaucccgacccaccgccacaucgucggcaagagcugccccaagccccaccggcugaaccacauggggaucugcuccugcgggcuguacaagcagcccggcgugccggugcgcuggaagcggugaggacuaguuauaagacugacuagcccgaugggccucccaacgggcccuccuccccuccuugcaccgagauuaaucaaaggcucuuuucagagccaccaaaaaaaaaaaaaaaaaaaaaaaaaaaaaaaaaaaaaaaaaaaaaaaaaaaaaaaaaaaaaaaaagaauu

SEQ ID NO: 34462 - RNA, 1658 nt, Artificial Sequence
  mRNA product Design i-3 (hSL-A64-N5) comprising derived and/or modified sequence from LASV(G502-SLE-2009;Clade IV)__AIT17126__GPCmut8 (opt1)
aggagaaagcuuaccaugggccagaucgugaccuucuuccaggaggucccccacgugaucgaggaggugaugaacaucguccugaucgcccucagcauccuggccgugcugaaggggcucuacaacuucgcgaccugcggccugguggggcugcucacguuccugcugcucugcggccgcuccugcaccaccgggcuguacaagggcgucuacgagcugcagacccucgagcugaacauggagacgcugaacaugugcaugccgcucagcugcaccaagaacaacucccaccacuacaucauggugggcaacgagaccgggcuggagcugacgcucaccaacaccagcaucaucaaccacaaguucugcaaccuguccgacgcccacaagaagaaccuguacgaccacgcccucaugagcaucaucuccaccuuccaccugagcauccccaacuucaaccaguacgaggccauguccugcgacuucaacggcgggaagaucagcgugcaguacaaccugucccacagcuacgccggcgacgcggccgaccacugcgggacggucgccaacggcgugcuccagaccuucaugcggauggccuggggcggguccuacaucgcgcuggacagcggccgcgggcggugggacugcaucaugaccuccuaccaguaccugaucauccagaacaccacgugggaggaccacugccaguucagccgccccucccccaucggcuaccucggccugcugagccagcggacccgcgacaucuacaucucccggcgccuccuggggaccuucaccuggacgcugagcgacagcgagggcaaggacacccccgggggcuacugccucacccgguggaugcugaucgaggccgagcugaagugcuucgggaacaccgccguggccaagugcaacgagaagcacgacgaggaguucugcgacaugcuccgccuguucgacuucugcaagcaggccauccagcggcugaaggcgcccgcccagauguccauccagcucaucaacaaggccgucaacgcccugaucaacgaccagcuggugaugaagaaccaccuccgcgacaucaugggcauccccuacugcaacuacagccgguacugcuaccugaaccacacgaccaccggccgcaccucccugcccaagugcugccucgugagcaacggguccuaccugaacgagacgcacuucagcgacgacaucgagcagcaggccgacaacaugaucaccgagaugcugcagaaggaguacauggagcggcagggcaagaccccgcucgggcuggucgaccuguucguguucuccaccagcuucuaccugaucuccaucuuccuccaccuggugaagaucccgacgcaccgccacaucgucggcaagagcugccccaagccccaccggcugaaccacauggggaucugcuccugcggccucuacaagcagcccggcgugccggugaaguggaagcgcugaggacuaguuauaagacugacuagcccgaugggccucccaacgggcccuccuccccuccuugcaccgagauuaaucaaaggcucuuuucagagccaccaaaaaaaaaaaaaaaaaaaaaaaaaaaaaaaaaaaaaaaaaaaaaaaaaaaaaaaaaaaaaaaaagaauu

SEQ ID NO: 34463 - RNA, 1658 nt, Artificial Sequence
  mRNA product Design i-3 (hSL-A64-N5) comprising derived and/or modified sequence from LASV(G733-SLE-2010;Clade IV)__AIT17154__GPCmut8 (opt1)
aggagaaagcuuaccaugggccagaucgugaccuucuuccaggaggucccccacgugaucgaggaggugaugaacaucguccugaucgcccucagcauccuggccgugcugaaggggcucuacaacuucgcgaccugcggcaucguggggcuggucuccuuccugcuccugugcggccgcagcugcacgaccucccuguacaaggggguguacgagcuccagacccuggagcugaacauggagacccucaacaugugcaugccgcugagcugcaccaagaacaacucccaccacuacaucauggugggcaacgagaccggccuggagcucacccugacgaacaccagcaucaucaaccacaaguucugcaaccuguccgacgcccacaagaagaaccucuacgaccacgcccugaugagcaucaucuccaccuuccaccugagcauccccaacuucaaccaguacgaggccauguccugcgacuucaacgggggcaagaucagcguccaguacaaccucucccacagcuacgccggggacgcggccaaccacugcggcaccaucgccaacggggugcugcagacguucaugcggauggccuggggcggcuccuacaucgcgcuggacagcgggcgcgaccggugggacugcaucaugaccuccuaccaguaccucaucauccagaacaccaccugggaggaccacugccaguucagccgccccucccccaucggcuaccuggggcugcucagccagcggacgcgcgacaucuacaucagccggcgccugcugggcaccuucaccuggacccucuccgacagcgagggcaaggacacgcccgggggcuacugccugacccgguggaugcugaucgaggccgagcucaagugcuucgggaacaccgccguggccaagugcaacgagaagcacgacgaggaguucugcgacaugcugcgccuguucgacuucugcaagcaggccauccagcggcucaaggcgcccgcccagauguccauccagcugaucaacaaggccgucaacgcccugaucaacgaccagcucaucaugaagaaccaccuccgcgacaucaugggcauccccuacugcaacuacagcaaguacugcuaccugaaccacaccacgaccgggaagaccucccugcccaagugcugccuggugagcaacggcuccuaccugaacgagacccacuucagcgacgacaucgagcagcaggccgacaacaugaucacggagaugcuccagaaggaguacauggagcggcagggcaagaccccgcuggggcugguggaccucuucgucuucuccaccagcuucuaccugaucuccaucuuccugcaccuggugaagaucccgacccaccgccacguggucggcaagagcugccccaagccccaccggcucaaccacauggggaucugcuccugcggccuguacgggcagcccggcgugccggugaaguggaagcgcugaggacuaguuauaagacugacuagcccgaugggccucccaacgggcccuccuccccuccuugcaccgagauuaaucaaaggcucuuuucagagccaccaaaaaaaaaaaaaaaaaaaaaaaaaaaaaaaaaaaaaaaaaaaaaaaaaaaaaaaaaaaaaaaaagaauu

SEQ ID NO: 34464 - RNA, 1658 nt, Artificial Sequence
  mRNA product Design i-3 (hSL-A64-N5) comprising derived and/or modified sequence from MOPV/LASV reassortant(IGS-1;Clade IV)__AFY05576__GPCmut8 (opt1)
aggagaaagcuuaccaugggccagaucgugaccuucuuccaggaggucccccacgugaucgaggaggugaugaacaucguccugaucgcccucagcgugcuggccgugcugaaggggcucuacaacuucgcgaccugcggccuggucgggcuggugacguuccuccugcugugcggccgcuccugcaccaccagccucuacaaggggguguacgagcugcagacccuggagcucaacauggagacgcugaacaugugcaugccgcuguccugcaccaagaacaacagccaccacuacaucauggucggcaacgagaccggccucgagcugacgcugaccaacaccuccaucaucaaccacaaguucugcaaccucagcgacgcccacaagaagaaccuguacgaccacgcccugauguccaucaucagcaccuuccaccucuccauccccaacuucaaccaguacgaggccaugagcugcgacuucaacgggggcaagaucuccgugcaguacaaccugagccacuccuacgccggggacgcggccaaccacugcggcacgguggccaacgggguccugcagaccuucaugcggauggccuggggcggcagcuacaucgcgcucgacuccgggcgcggcaacugggacugcaucaugaccagcuaccaguaccugaucauccagaacaccacgugggaggaccacugccaguucucccggcccagccccaucggguaccugggccuccugucccagcgcacccgggacaucuacaucagccgccggcugcucggcaccuucaccuggacgcugagcgacuccgagggggaggacaccccgggcggguacugccugacccgcuggaugcucaucgaggccgagcugaagugcuucggcaacaccgccguggccaagugcaacgagaagcacgacgaggaguucugcgacaugcugcggcuguucgacuucugcaagcaggccauccagcgccugaaggcgcccgcccagaugagcauccagcugaucaacaaggccgugaacgcccucaucaacgaccagcugaucaugaagaaccaccuccgggacaucauggggauccccuacugcaacuacuccaaguacugcuaccucaaccacacgaccaccggccgcaccagccugcccaagugcugccuggucuccaacggcagcuaccucaacgagacgcacuucuccgacgacaucgagcagcaggccgacaacaugaucaccgagaugcugcagaaggaguacauggagcggcaggggaagacgccccugggccucguggaccuguucguguucagcaccuccuucuaccugaucagcaucuuccugcaccucgucaagaucccgacccaccgccacaucguggggaaguccugccccaagccccaccggcugaaccacaugggcaucugcagcugcgggcuguacaagcagcccggcgugccggucaaguggaagcgcugaggacuaguuauaagacugacuagcccgaugggccucccaacgggcccuccuccccuccuugcaccgagauuaaucaaaggcucuuuucagagccaccaaaaaaaaaaaaaaaaaaaaaaaaaaaaaaaaaaaaaaaaaaaaaaaaaaaaaaaaaaaaaaaaagaauu

SEQ ID NO: 34465 - RNA, 1658 nt, Artificial Sequence
  mRNA product Design i-3 (hSL-A64-N5) comprising derived and/or modified sequence from LASV(LM765-SLE-2012;Clade IV)__AIT17814__GPCmut8 (opt1)
aggagaaagcuuaccaugggccagaucgugaccuucuuccaggaggucccccacgugaucgaggaggugaugaacaucguccugaucgcccucagcauccuggccgugcugaaggggcucuacaacuucgcgaccugcggccugguggggcuggucacguuccuccugcugugcggccgcuccugcaccaccagccucuacaaggggguguacgagcugcagacccuggagcucaacauggagacgcugaacaugugcaugccgcuguccugcaccaagaacaacagccaccacuacaucauggugggcaacgagaccggccucgagcugacgcugaccaacaccuccaucaucgaccacaaguucugcaaccucagcgacgcccaccggaagaaccuguacgaccacgcccugauguccaucaucagcaccuuccaccucuccauccccaacuucaaccaguacgaggccaugagcugcgacuucaacgggggcaagaucuccguccaguacaaccugagccacuccuacgccaaggacgcggccgaccacugcgggacgguggccaacggcgugcugcagaccuucaugcgcauggccuggggcgggagcuacaucgcgcucgacuccggccgggggcgcugggacugcaucaugaccagcuaccaguaccugaucauccagaacaccacgugggaggaccacugccaguucucccggcccagccccaucggcuaccuggggcuccugucccagcgcacccgggacaucuacaucagccgccggcugcucggcaccuucaccuggacgcugagcgacuccgagggcaaggacacccccgggggcuacugccugacccgcuggaugcucaucgaggccgagcugaagugcuucgggaacaccgccgucgccaagugcaacgagaagcacgacgaggaguucugcgacaugcugcggcuguucgacuucugcaagcaggccauccagcgccugaaggcgcccgcccagaugagcauccagcugaucaacaaggccgugaacgcccucaucaacgaccagcugaucaugaagaaccaccuccgggacaucaugggcauccccuacugcaacuacuccaaguacugcuaccucaaccacacgaccaccgggaagaccagccugcccaagugcugccugguguccaacggcagcuaccucaacgagacgcacuucuccgacgacaucgagcagcaggccgacaacaugaucaccgagaugcugcagaaggaguacauggagcgccagggcaagaccccgcuggggcucgucgaccuguucguguucagcaccuccuucuaccugaucagcaucuuccugcaccucgugaagaucccgacgcaccggcacaucgucggcaagcccugccccaagccccaccgccugaaccacauggggaucugcuccugcggccuguacaagcagccgggggugcccgugaaguggaagcggugaggacuaguuauaagacugacuagcccgaugggccucccaacgggcccuccuccccuccuugcaccgagauuaaucaaaggcucuuuucagagccaccaaaaaaaaaaaaaaaaaaaaaaaaaaaaaaaaaaaaaaaaaaaaaaaaaaaaaaaaaaaaaaaaagaauu

SEQ ID NO: 34466 - RNA, 1658 nt, Artificial Sequence
  mRNA product Design i-3 (hSL-A64-N5) comprising derived and/or modified sequence from LASV(LM776-SLE-2012;Clade IV)__AIT17824__GPCmut8 (opt1)
aggagaaagcuuaccaugggccagaucgugaccuucuuccaggaggucccccacgugaucgaggaggugaugaacaucguccugaucgcccucagcauccuggccgugcugaaggggcucuacaacuucgcgaccugcggccugguggggcuggucacguuccuccugcugugcggccgcuccugcaccaccagcguguacaaggggguguacgagcuccagacccuggagcugaacauggagacgcucaacaugugcaugccgcuguccugcaccaagaacaacagccaccacuacaucauggucggcaacgagaccggccuggagcucacgcugaccaacaccuccaucaucaaccacaaguucugcaaccugagcgacgcccacaagaagaaccucuacgaccacgcccugauguccaucaucagcaccuuccaccuguccauccccaacuucaaccaguacgaggccaugagcugcgacuucaacgggggcaagaucuccgugcaguacaaccucagccacuccuacgccggggacgcggccaaccacugcggcacgguggccaacgggguccugcagaccuucaugcggauggccuggggcggcagcuacaucgcgcuggacuccgggcacggcaagugggacugcaucaugaccagcuaccaguaccucaucauccagaacaccacgugggaggaccacugccaguucucccgccccagccccaucggguaccugggccugcucucccagcggacccgcgacaucuacaucagccggcgccugcugggcaccuucaccuggacgcucagcgacuccgaggggaaggacaccccgggcggguacugccugacccgguggaugcugaucgaggccgagcucaagugcuucggcaacaccgccguggccaagugcaacgagaagcacgacgaggaguucugcgacaugcugcgccuguucgacuucugcaagcaggccauccagcggcucaaggcgcccgcccagaugagcauccagcugaucaacaaggccgugaacgcccugaucaacgaccagcucaucaugaagaaccaccuccgcgacaucauggggauccccuacugcaacuacuccaaguacugcuaccugaaccacacgaccaccggcaagaccagccugcccaagugcugccuggucuccaacggcagcuaccugaacgagacgcacuucuccgacgacaucgagcagcaggccgacaacaugaucaccgagaugcuccagaaggaguacauggagcggcaggggaagacgccccugggccugguggaccucuucguguucagcaccuccuucuaccugaucagcaucuuccugcaccuggucaagaucccgacccaccgccacaucguggggaaguccugccccaagccccaccggcucaaccacaugggcaucugcagcugcgggcuguacaagcagcccggcgugccgguccgcuggaagcggugaggacuaguuauaagacugacuagcccgaugggccucccaacgggcccuccuccccuccuugcaccgagauuaaucaaaggcucuuuucagagccaccaaaaaaaaaaaaaaaaaaaaaaaaaaaaaaaaaaaaaaaaaaaaaaaaaaaaaaaaaaaaaaaaagaauu

SEQ ID NO: 34467 - RNA, 1658 nt, Artificial Sequence
  mRNA product Design i-3 (hSL-A64-N5) comprising derived and/or modified sequence from LASV(Mad39;Clade IV)__ANH09722__GPCmut8 (opt1)
aggagaaagcuuaccaugggccagaucgugaccuucuuccaggaggucccccacgugaucgaggaggugaugaacaucguccugaucgcccucagcauccuggccgugcugaaggggcucuacaacguggcgaccugcggccugaucgggcuggucacguuccuccugcugugcggccgcuccugcaccaccacccucuacaaggggguguacgagcugcaggcccuggagcucaacauggagacgcugaacaugugcaugccgcugagcugcaccaagaacaacucccaccacuacauccgggugggcaacgagaccggccucgagcugacgcugaccaacaccagccucaucaaccacaaguucugcaaccuguccgacgcccacaagaagaaccuguacgaccacgcccucaugagcaucaucuccaccuuccaccugagcauccccaacuucaaccaguacgaggccauguccugcgacuucaacgacgggaagaucagcguccaguacaaccugucccacacguacgcgggcgacaccgccaaccacugcgggaccguggccaacggcgugcuccagaccuucaugcgcauggccuggggcgggagcuacaucgcgcuggacuccggccgcgggggcugggacugcaucaugacgagcuaccaguaccugaucauccagaacaccaccugggaggaccacugccaguucucccggcccagccccaucggguaccucggccugcugucccagcggacccgcgacaucuacaucagccggcgccuccugggcacguucaccuggacccuguccgacagcgaggggaaggacaccccgggcggguacugccucacgcgguggaugcugaucgaggccgagcugaagugcuucggcaacaccgccgucgccaagugcaacgagaagcacgacgaggaguucugcgacaugcuccgccuguucgacuucugcaagcaggccauccagcggcugaaggcgcccgcccagaugagcauccagcucaucaacaaggccgugaacgcccugaucaacgaccagcugaucaugaagaaccaccuccgcgacaucauggggauccccuacugcaacuacuccaaguacugcuaccugaaccacaccgugaccggcaagacgagccugcccaagugcugccucgucuccaacggcagcuaccugaacgagacccacuucuccgacgacaucgagcagcaggccgacaacaugaucaccgagaugcugcagaaggaguacauggagcggcaggggaagacgccccucggccugguggaccuguucguguucagcaccuccuucuaccugaucagcaucuuccuccaccuggucaagaucccgacccaccgccacgugguggggaagcccugccccaagccccaccggcugaaccacaugggcaucugcuccugcggguucuacaagcagccgggcguccccgugcgcuggaagcggugaggacuaguuauaagacugacuagcccgaugggccucccaacgggcccuccuccccuccuugcaccgagauuaaucaaaggcucuuuucagagccaccaaaaaaaaaaaaaaaaaaaaaaaaaaaaaaaaaaaaaaaaaaaaaaaaaaaaaaaaaaaaaaaaagaauu

SEQ ID NO: 34468 - RNA, 1658 nt, Artificial Sequence
  mRNA product Design i-3 (hSL-A64-N5) comprising derived and/or modified sequence from LASV(Z0947-SLE-2011;Clade IV)__AIT17840__GPCmut8 (opt1)
aggagaaagcuuaccaugggccagaucgugaccuucuuccaggaggucccccacgugaucgaggaggugaugaacaucguccugaucgcccucagcauccuggccgugcugaaggggcucuacaacuucgcgaccugcggccugguggggcuggucacguuccuccugcugugcggccgcuccugcaccaucagccucuacaaggggguguacgagcugcagacccuggagcucaacauggagacccugaacaugugcaugccgcuguccugcaccaagaacaacagccaccacuacaucauggugggcaacgagaccggccucgagcugacccugacgaacaccuccaucaucaaccacaaguucugcaaccucagcgacgcccacaagaagaaccuguacgaccacgcccugauguccaucaucagcaccuuccaccucuccauccccaacuucaaccaguacgaggccaugagcugcgacuucaacgggggcaagaucuccguccaguacaaccugagccacuccuacgccggggacgcggccaaccacugcggcaccguggccaacggggugcugcagacguucaugcggauggccuggggcggcagcuacaucgcgcucgacuccgggcgcgaccggugggacugcaucaugaccagcuaccaguaccugaucauccagaacaccaccugggaggaccacugccaguucucccgccccagccccaucggcuaccuggggcuccugucccagcggacgcgcgacaucuacaucagccggcgccugcucggcaccuucaccuggacccugagcgacuccgagggcaaggacacgcccgggggcuacugccugacccgguggaugcucaucgaggccgagcugaagugcuucgggaacaccgccgucgccaagugcaacgagaagcacgacgaggaguucugcgacaugcugcgccucuucgacuucugcaagcaggccauccagcggcugaaggcgcccgcccagaugagcauccagcugaucaacaaggccgugaacgcccucaucaacgaccagcugaucaugaagaaccaccuccgcgacaucaugggcauccccuacugcaacuacuccaaguacugcuaccugaaccacaccacgaccgggaagaccagccugcccaagugcugccugguguccaacggcagcuaccucaacgagacccacuucuccgacgacaucgagcagcaggccgacaacaugaucacggagaugcugcagaaggaguacauggagcggcagggcaagaccccgcuggggcucgucgaccuguucguguucagcaccuccuucuaccugaucagcaucuuccugcaccucgugaagaucccgacccaccgccacaucgucggcaagcccugccccaagccccaccggcugaaccacauggggaucugcuccugcggccuguacaagcagccgggggugcccgugaaguggaagcgcugaggacuaguuauaagacugacuagcccgaugggccucccaacgggcccuccuccccuccuugcaccgagauuaaucaaaggcucuuuucagagccaccaaaaaaaaaaaaaaaaaaaaaaaaaaaaaaaaaaaaaaaaaaaaaaaaaaaaaaaaaaaaaaaaagaauu

SEQ ID NO: 34469 - RNA, 1658 nt, Artificial Sequence
  mRNA product Design i-3 (hSL-A64-N5) comprising derived and/or modified sequence from LASV(Josiah;Clade IV)__NP_694870__GPCmut8 (opt1)
aggagaaagcuuaccaugggccagaucgugaccuucuuccaggaggucccccacgugaucgaggaggugaugaacaucguccugaucgcccucagcgugcuggccgugcugaaggggcucuacaacuucgcgaccugcggccuggucgggcuggugacguuccuccugcugugcggccgcuccugcaccaccagccucuacaaggggguguacgagcugcagacccuggagcucaacauggagacgcugaacaugugcaugccgcuguccugcaccaagaacaacagccaccacuacaucauggucggcaacgagaccggccucgagcugacccugacgaacaccuccaucaucaaccacaaguucugcaaccucagcgacgcccacaagaagaaccuguacgaccacgcccugauguccaucaucagcaccuuccaccucuccauccccaacuucaaccaguacgaggccaugagcugcgacuucaacgggggcaagaucuccgugcaguacaaccugagccacuccuacgccggggacgcggccaaccacugcggcaccguggccaacgggguccugcagacguucaugcggauggccuggggcggcagcuacaucgcgcucgacuccgggcgcggcaacugggacugcaucaugaccagcuaccaguaccugaucauccagaacaccaccugggaggaccacugccaguucucccggcccagccccaucggguaccugggccuccugucccagcgcacgcgggacaucuacaucagccgccggcugcucggcaccuucaccuggacccugagcgacuccgaggggaaggacacgccgggcggguacugccugacccgcuggaugcucaucgaggccgagcugaagugcuucggcaacaccgccguggccaagugcaacgagaagcacgacgaggaguucugcgacaugcugcggcuguucgacuucugcaagcaggccauccagcgccugaaggcgcccgcccagaugagcauccagcugaucaacaaggccgugaacgcccucaucaacgaccagcugaucaugaagaaccaccuccgggacaucauggggauccccuacugcaacuacuccaaguacugcuaccucaaccacaccacgaccggccgcaccagccugcccaagugcugccuggucuccaacggcagcuaccucaacgagacccacuucuccgacgacaucgagcagcaggccgacaacaugaucacggagaugcugcagaaggaguacauggagcggcaggggaagaccccgcugggccugguggaccucuucguguucagcaccuccuucuaccugaucagcaucuuccugcaccucgucaagauccccacccaccgccacaucguggggaaguccugccccaagccccaccggcugaaccacaugggcaucugcagcugcgggcuguacaagcagccgggcgugcccgucaaguggaagcgcugaggacuaguuauaagacugacuagcccgaugggccucccaacgggcccuccuccccuccuugcaccgagauuaaucaaaggcucuuuucagagccaccaaaaaaaaaaaaaaaaaaaaaaaaaaaaaaaaaaaaaaaaaaaaaaaaaaaaaaaaaaaaaaaaagaauu

SEQ ID NO: 34470 - RNA, 1655 nt, Artificial Sequence
  mRNA product Design i-3 (hSL-A64-N5) comprising derived and/or modified sequence from LASV(LP;Clade I)__AAF86701__GPCmut8 (opt1)
aggagaaagcuuaccaugggccagaucaucaccuucuuccaggaggugccccacgucaucgaggaggugaugaacaucgugcugaucgcccucagccugcuggccauccucaaggggcuguacaacaucgcgaccugcggcaucaucgggcuggucgccuuccucuuccugugcggcaaguccugcagccugacgcucaagggcggguacgagcugcagacccuggagcucaacauggagacccugaacaugugcaugccgcuguccugcaccaagaacagcucccaccacuacauccgcgugggcaacgagacggggcucgagcugacccugaccaacaccagcaucaucaaccacaaguucugcaaccucuccgacgcccacaagaagaaccuguacgaccacgcccugaugagcaucaucuccacguuccaccucagcauccccaacuucaaccaguacgaggccauguccugcgacuucaacggcgggaagaucagcgugcaguacaaccugucccacagcuacgcgggcgacgccgccgagcacugcgggaccgucgccaacggcgugcugcagaccuucaugcggauggcguggggcgggcgcuacaucgcccucgacuccggcaaggggaacugggacugcaucaugaccagcuaccaguaccugaucauccagaacacgaccugggaggaccacugccaguucucccggcccagccccaucggcuaccugggccuccugucccagcgcacccgggacaucuacaucagccgccggcugcucgggaccuucacguggacccugagcgacuccgagggcaacgagacccccgggggcuacugccugacccgcuggaugcucaucgaggccgagcugaagugcuucgggaacacggccguggccaagugcaacgagaagcacgacgaggaguucugcgacaugcugcggcuguucgacuucugcaagcaggcgauccgccggcugaaggccccggcccagaugagcauccagcugaucaacaaggccgucaacgcccucaucaacgaccagcugaucaugaagaaccaccuccgcgacaucaugggcauccccuacugcaacuacuccaaguacugcuaccucaaccacaccagcuccggccggaccagccugcccaagugcugccugaucuccaacgggagcuaccucaacgagacccaguucuccgacgacaucgagcagcaggcggacaacaugaucacggagaugcugcagaaggaguacaucgagcgccagggcaagaccccgcuggggcugguggacaucuucaucuucagcaccuccuucuaccucaucagcaucuuccugcaccugaucaagauccccacccaccggcacaucgugggcaagcccugccccaagccgcaccgccucaaccacaugggggucugcuccugcggccuguacaagcaccccggcgugcccacgaaguggaagcggugaggacuaguuauaagacugacuagcccgaugggccucccaacgggcccuccuccccuccuugcaccgagauuaaucaaaggcucuuuucagagccaccaaaaaaaaaaaaaaaaaaaaaaaaaaaaaaaaaaaaaaaaaaaaaaaaaaaaaaaaaaaaaaaaagaauu

SEQ ID NO: 34471 - RNA, 1655 nt, Artificial Sequence
  mRNA product Design i-3 (hSL-A64-N5) comprising derived and/or modified sequence from LASV(803213;Clade II)__AAF86703__GPCmut8 (opt1)
aggagaaagcuuaccaugggccagaucaucaccuucuuccaggaggugccccacgucaucgaggaggugaugaacaucgugcugaucgcccucagccugcuggccauccucaaggggaucuacaacgucgcgaccugcggccuguucgggcugaucuccuuccuccugcugugcggccgcagcugcuccgugacguacaaggggguguacgagcuccagacccuggagcugaacauggccaaccucaacaugugcaugccgcugagcugcaccaagaacaacucccaccacuacaucauggucggcaacgagaccggccuggagcucacgcugaccaacaccagcaucaucaaccacaaguucugcaaccuguccgacgcccacaagaagaaccucuacgaccacgcccugaugagcaucaucuccaccuuccaccugagcauccccaacuucaaccaguacgaggccauguccugcgacuucaacgggggcaagaucagcgugcaguacaaccucucccacagcuucgcgguggacgccgccaaccacugcgggacgaucgccaacggcguccugcagaccuucaugcggauggcguggggcggguccuacaucgcccuggacagcggcaaggggaacugggacugcaucaugaccuccuaccaguaccucaucauccagaacaccacgugggaggaccacugccaguucagccgccccucccccaucggcuaccuggggcugcucagccagcggacccgcgacaucuacaucagccggcgccugcugggcaccuucaccuggacgcucuccgacagcgagggcaacgaggcccccgggggcuacugccugacccgguggaugcugaucgaggccgagcucaagugcuucgggaacaccgccguggcgaagugcaacgagaagcacgacgaggaguucugcgacaugcugcgccuguucgacuucugcaagcaggccaucaagcggcucaagaccccggcccagauguccauccagcugaucaacaaggccgugaacgcccugaucaacgaccagcucaucaugaagaaccaccuccgcgacaucaugggcauccccuacugcaacuacagccgguacugcuaccugaaccacacggucaccgggaagaccucccugccccgcugcugccuggugagcaacggcuccuaccugaacgagacccacuucagcgacgacaucgagcagcaggcggacaacaugaucacggagaugcuccagaaggaguacauggaccggcagggcaagaccccgcuggggcugguggaccuguucgucuucuccaccagcuucuaccucaucuccaucuuccugcaccuggugaagauccccacccaccgccacaucgugggcaagcccugccccaagccgcaccggcucaaccacauggggaucugcagcugcggccuguacaagcaccccgggguccccgugaaguggaagcgcugaggacuaguuauaagacugacuagcccgaugggccucccaacgggcccuccuccccuccuugcaccgagauuaaucaaaggcucuuuucagagccaccaaaaaaaaaaaaaaaaaaaaaaaaaaaaaaaaaaaaaaaaaaaaaaaaaaaaaaaaaaaaaaaaagaauu

SEQ ID NO: 34472 - RNA, 1655 nt, Artificial Sequence
  mRNA product Design i-3 (hSL-A64-N5) comprising derived and/or modified sequence from LASV(GA391;Clade III)__CAA36645__GPCmut8 (opt1)
aggagaaagcuuaccaugggccagaucgugaccuucuuccaggaggucccccacgugaucgaggaggugaugaacaucguccugaucgcccucagcauccuggccauccugaaggggcucuacaacguggcgaccugcggccugaucgggcuggugacguuccuccugcuguccggccgcagcugcucccucaucuacaaggggaccuacgagcugcagacccuggagcucaacauggagacccugaacaugugcaugccgcugagcugcacgaagaacaacucccaccacuacauccgggucggcaacgagaccggccucgagcugacccugaccaacacgagcauccucaaccacaaguucugcaaccuguccgacgcccacaagcgcaaccuguacgaccacagccucauguccaucaucagcaccuuccaccuguccauccccaacuucaaccaguacgaggccaugagcugcgacuucaacgggggcaagaucaccgugcaguacaaccugucccacagcuucgccguggacgccgcggggcacugcggcacccucgccaacgggguccugcagacguucaugcggauggccuggggcggcuccuacaucgcccuggacagcgggcgcggcaacugggacugcaucaugaccuccuaccaguaccucaucauccagaacaccaccugggacgaccacugccaguucagccggcccucccccaucggguaccugggccugcucagccagcgcacgcgggacaucuacaucagccgccggcugcugggcaccuucaccuggacccucuccgacagcgaggggaacgagacgccgggcggguacugccugacccgcuggaugcugaucgaggcggagcucaagugcuucggcaacaccgccguggccaagugcaacgagaagcacgacgaggaguucugcgacaugcugcggcuguucgacuucugcaagcaggccauccgccggcucaagacccccgcccagauguccauccagcugaucaacaaggcggugaacgcccugaucaacgaccagcucaucaugaagaaccaccuccgcgacaucauggggauccccuacugcaacuacagccgguacugcuaccugaaccacacguccaccggcaagaccagccugccccgcugcugccugaucuccaacggcagcuaccugaacgagaccaaguucuccgacgacaucgagcagcaggccgacaacaugaucacggagaugcugcagaaggaguacaucgaccggcaggggaagaccccgcucggccuggucgaccuguucguguucagcaccuccuucuaccucaucagcaucuuccugcaccuggugaagauccccacccaccgccacaucgucgggaagcccugccccaagccgcaccggcucaaccacaugggcaucugcuccugcgggcuguacaagcagcccggcgugcccgugcgcuggaagcggugaggacuaguuauaagacugacuagcccgaugggccucccaacgggcccuccuccccuccuugcaccgagauuaaucaaaggcucuuuucagagccaccaaaaaaaaaaaaaaaaaaaaaaaaaaaaaaaaaaaaaaaaaaaaaaaaaaaaaaaaaaaaaaaaagaauu

SEQ ID NO: 34473 - RNA, 1658 nt, Artificial Sequence
  mRNA product Design i-3 (hSL-A64-N5) comprising derived and/or modified sequence from LASV(AV;Clade V)__CCA30314__GPCmut8 (opt1)
aggagaaagcuuaccaugggccagaucgugaccuucuuccaggaggucccccacgugaucgaggaggugaugaacaucguccugaucgcccucagcauccuggccgugcugaaggggcucuacaacaucgcgaccugcggccugaucgggcugaucacguuccuccugcugugcggccgcuccugcagcuccaaccucuacaaggggguguacgagcugcagagccuggaccucaacauggagacccugaacaugugcaugccgcuguccugcaccaagaacaacagccaccacuacauccgggucggcaacgacaccggccucgagcugacgcugaccaacaccuccauccucaaccacaaguucugcaaccugagcgacgcccacaagaaggaccuguacgaccacgcccucauguccaucaucagcaccuuccaccuguccauccccaacuucaaccaguacgaggccaugagcugcgacuucaacgggggcaagaucuccgugcaguacaaccugagccacuccuacgccaucgacgcggccaaccacugcgggacgguggccaacggcauccuccagaccuucaugcgcauggccuggggcgggagcuacaucgcgcuggacuccggccgggggaacugggacugcaucaugaccagcuaccaguaccugaucauccagaacaccacgugggagaaccacugccaguucucccgccccagccccaucggcuaccucgggcugcugagccagcggacccgcgacaucuacaucucccggcgccuccugggcaccuucaccuggacgcugagcgacuccgagggcaacgccacccccgggggcuacugccucacccgguggaugcugaucgaggccgagcugaagugcuucgggaacaccgccgucgccaagugcaacgagaagcacgacgaggaguucugcgacaugcuccgccuguucgacuucugcaagcaggcgaucagccggcugaaguccccggcccagaugagcauccagcucaucaacaaggccgugaacgcccugaucaacgaccagcugaucaugaagaaccaccuccgcgacaucaugggcauccccuacugcaacuacuccaaguacugcuaccugaaccacacgaucaccgggaagaccagccugcccaagugcugccucguguccaacggcagcuaccugaacgagacccacuucuccgacgacaucgagcagcaggccgacaacaugaucacggagaugcugcagaaggaguacauggagcggcagggcaagaccccgcuggggcucgucgaccuguucguguucagcaccuccuucuaccugaucagcaucuuccuccgccuggugaagauccccacccaccggcacaucgucggcaagcccugccccaagccgcaccgccugaaccacauggggaucugcuccugcggccucuacaagcagcccggggugcccgugcgguggaagcgcugaggacuaguuauaagacugacuagcccgaugggccucccaacgggcccuccuccccuccuugcaccgagauuaaucaaaggcucuuuucagagccaccaaaaaaaaaaaaaaaaaaaaaaaaaaaaaaaaaaaaaaaaaaaaaaaaaaaaaaaaaaaaaaaaagaauu

SEQ ID NO: 34474 - RNA, 1655 nt, Artificial Sequence
  mRNA product Design i-3 (hSL-A64-N5) comprising derived and/or modified sequence from LASV(Togo/2016/7082;Clade VI)__AMR44577__GPCmut8 (opt1)
aggagaaagcuuaccaugggccagaucaucaccuucuuccaggaggugccccacgucaucgaggaggugaugaacaucgugcugaucgcccucagccugcuggccauccucaagggggucuacaacguggcgaccugcggcaucaucgggcuggugacguuccuguuccucugcggccgcuccugcagccugaucuacaagggguccuacgagcugcagacccucgagcugaacauggagacccugaacaugugcaugccgcucagcugcaccaagaacuccagccaccacuacauccgggucggcaacgagacgggccuggagcugacccucaccaacaccuccaucaucaaccacaaguucugcaaccugagcgacgcccacaagcgcaaccuguacgaccacgcccucauguccauccugagcacguuccaccuguccauccccaacuucaaccaguacgaggccaugagcugcgacuucaacgggggcaagaucuccgugcaguacaaccucagccacgccuacgcgguggacgccgccgagcacugcgggaccgucgccaacggcgugcugcagaccuucaugcggauggcguggggcggguccuacaucgcccuggacagcggccgcgggaacugggacugcaucaugaccuccuaccaguaccucaucauccagaacacgaccugggaggaccacugccaguucagccggcccucccccaucggcuaccuggggcugcucagccagcgcacccgggacaucuacaucagccgccggcugcugggcaccuucacguggacccucuccgacagcgagggcaacgagacccccgggggcuacugccugacccgcuggaugcugaucgaggccgagcucaagugcuucgggaacacggccguggccaagugcaacgagaagcacgacgaggaguucugcgacaugcugcggcuguucgacuucugcaagcaggcgauccagcgccucaaguccccggcccagaugagcauccagcugaucaacaaggccgucaacgcccugaucaacgaccagcucaucaugaagaaccaccuccgggacaugaugggcauccccuacugcaacuacuccaaguacugcuaccugaaccacaccagcuccgggcgcaccagccugcccaagugcugccugguguccaacggcagcuaccugaacgagacccacuucuccgacgacaucgagcagcaggccgacaacaugaucacggagaugcuccagaaggaguacaucgaccggcagggcaagaccccgcuggggcugguggaccuguucgucuucagcaccuccuucuaccucaucagcaucuuccugcaccugaucaagauccccacccaccgccacaucgugggcaagcccugccccaagccgcaccggcucaaccacauggggaucugcuccugcggccuguacaagcagcccggggugcccacgcgcuggaagcggugaggacuaguuauaagacugacuagcccgaugggccucccaacgggcccuccuccccuccuugcaccgagauuaaucaaaggcucuuuucagagccaccaaaaaaaaaaaaaaaaaaaaaaaaaaaaaaaaaaaaaaaaaaaaaaaaaaaaaaaaaaaaaaaaagaauu

SEQ ID NO: 34475 - RNA, 1655 nt, Artificial Sequence
  mRNA product Design i-3 (hSL-A64-N5) comprising derived and/or modified sequence from LASV(KAK-428;Clade n.d. (VII))__ANH09740__GPCmut8 (opt1)
aggagaaagcuuaccaugggccagaucgugaccuucuuccaggaggucccccacgugaucgaggaggugaugaacaucguccugaucgcccucagccugcuggccauccucaaggggcuguacaacuucgcgaccugcggcgugaucgggcugaucacguuccuccugcugugcggccgcuccugcagcgccaccuacaaggggcaguacgagcuccagacccuggagcugaacauggagucccucaacaugugcaugccgcugagcugcaccaagaacaacucccaccacuacauccgggccggcaacaacacgggccuggagcucacccugaccaacaccagcaucaucucccacaaguucugcaaccugagcgacgcccacaagaagaaccucuacgaccacacgcugauguccaucaucaccaccuuccaccugagcauccccaacuucaaccaguacgaggccauguccugcgacuucaacgggggcaagaucagcauccaguacaaccucucccacagcuacgcgggggacgccgcccagcacugcggcaccguggccaacgggguccugcagacguucaugcgcauggcguggggcggcuccuaccuggcccucgacagcgggcggcgcggcugggacugcaucaucuccagcuaccaguaccugaucauccagaacaccaccugggacgaccacugccaguucucccggcccagccccaucggguaccugggcuucgugagccagaagacccgcgacaucuacaucucccggcgccuccugggcacguucaccuggacccugagcgacuccgaggggcacgacaugccgggcggguacugccucacccgguggaugcugaucgaggccgaccugaagugcuucggcaacacggccguggccaagugcaacgagaagcacgacgaggaguucugcgacauguggcgccucuucgacuucugcaagcaggcgauccagcggcugaaggcccccgcccagaugaacauccagcugaucaacaaggccgucaacgcccucaucaacgaccagcugaugaugaagaaccaccuccgcgacaucauggggauccccuacugcaacuacagcaaguucugcuaccugaacaacaccaccaccggccggacgucccugccccgcugcugccugaucagcaacggcuccuaccucaacgagacccacuucagcgacgacaucgagcagcaggcggacaacaugaucaccgagaugcugcagaaggaguacauggaccggcaggggaagaccccgcugggccucguggaccuguucguguucuccacgagcuucuaccugaucaccaucuuccugcaccucgucaagauccccacccaccgccacaucguggggaagcccugccccaagccgcaccggcugaaccacaugggcaucugcuccugcgggcuguacaagcagcccggcgugcccguccgcuggaagcggugaggacuaguuauaagacugacuagcccgaugggccucccaacgggcccuccuccccuccuugcaccgagauuaaucaaaggcucuuuucagagccaccaaaaaaaaaaaaaaaaaaaaaaaaaaaaaaaaaaaaaaaaaaaaaaaaaaaaaaaaaaaaaaaaagaauu

SEQ ID NO: 34476 - RNA, 1655 nt, Artificial Sequence; identical to SEQ ID NO: 34470
  mRNA product Design i-3 (hSL-A64-N5) comprising derived and/or modified sequence from LASV(Pinneo-NIG-1969;Clade I)__AIT17836__GPCmut8 (opt1)

SEQ ID NO: 34477 - RNA, 1655 nt, Artificial Sequence
  mRNA product Design i-3 (hSL-A64-N5) comprising derived and/or modified sequence from LASV(ISTH0009-NIG-2011;Clade II)__AIT17404__GPCmut8 (opt1)
aggagaaagcuuaccaugggccagaucaucaccuucuuccaggaggugccccacgucaucgaggaggugaugaacaucgugcugaucgcccucagccugcuggccauccucaaggggaucuacaacgucgcgaccugcggccuguucgggcugguguccuuccuccugcugugcggccgcagcugcuccacgaccuacaaggggguguacgagcuccagacccuggagcuggacauggccagccucaacaugugcaugccgcuguccugcaccaagaacaacagccaccacuacaucauggucggcaacgagacgggccuggagcucacccugaccaacaccuccaucaucaaccacaaguucugcaaccugagcgacgcccacaagaagaaccucuacgaccacgcccugauguccaucaucagcacguuccaccuguccauccccaacuucaaccaguacgaggccaugagcugcgacuucaacgggggcaagaucuccgugcaguacaaccucagccacgcguacgccguggacgccgccaaccacugcgggaccaucgcgaacggcguccugcagaccuucaugcggauggccuggggcggguccuacaucgcccuggacagcggcaagggguccugggacugcaucaugaccagcuaccaguaccucaucauccagaacacgaccugggaggaccacugccaguucucccgccccagccccaucggcuaccuggggcugcucagccagcggacccgcgacaucuacaucucccggcgccugcugggcaccuucacguggacccucagcgacuccgagggcaacgagacccccgggggcuacugccugacccgguggaugcugaucgaggccgagcucaagugcuucgggaacacggccguggcgaagugcaacgagaagcacgacgaggaguucugcgacaugcugcgccuguucgacuucugcaagcaggccauccggcgccucaagaccccggcccagaugagcauccagcugaucaacaaggccgugaacgcccugaucaacgaccagcucaucaugaagaaccaccuccgggacaucaugggcauccccuacugcaacuacuccaaguacugcuaccugaaccacaccgucaccgggaagacgagccugccccgcugcugccugguguccaacggcagcuaccugaacgagacccacuucuccgacgacaucgagcagcaggcggacaacaugaucaccgagcuccugcagaaggaguacauggaccggcagggcaagaccccgcuggggcugguggaccucuucgucuucagcacguccuucuaccugaucagcaucuuccugcaccucaucaagauccccacccaccgccacaucaccggcaagcccugccccaagccgcaccggcugaaccacauggggaucugcuccugcggccuguacaagcaccccggggugcccgugaaguggaagcgcugaggacuaguuauaagacugacuagcccgaugggccucccaacgggcccuccuccccuccuugcaccgagauuaaucaaaggcucuuuucagagccaccaaaaaaaaaaaaaaaaaaaaaaaaaaaaaaaaaaaaaaaaaaaaaaaaaaaaaaaaaaaaaaaaagaauu

SEQ ID NO: 34478 - RNA, 1655 nt, Artificial Sequence
  mRNA product Design i-3 (hSL-A64-N5) comprising derived and/or modified sequence from LASV(ISTH2010-NIG-2012;Clade II)__AIT17482__GPCmut8 (opt1)
aggagaaagcuuaccaugggccagaucaucaccuucuuccaggaggugccccacgucaucgaggaggugaugaacaucgugcugaucgcccucagccugcuggccauccucaaggggaucuacaacgucgcgaccugcggccuguucgggcugguguccuuccuccugcugugcggccgcagcugcuccacgaccuacaaggggguguacgagcuccagacccuggagcuggacauggccagccucaacaugugcaugccgcuguccugcaccaagaacaacagccaccacuacaucauggucggcaacgagacgggccuggagcucacccugaccaacaccuccaucaucaaccacaaguucugcaaccugagcgacgcccacaagaagaaccucuacgaccacgcccugauguccaucaucagcacguuccaccuguccauccccaacuucaaccaguacgaggccaugagcugcgacuucaacgggggcaagaucuccgugcaguacaaccucagccacgcguacgccguggacgccgccaaccacugcgggaccaucgcgaacggcguccugcagaccuucaugcggauggccuggggcggguccuacaucgcccuggacagcggcaagggguccugggacugcaucaugaccagcuaccaguaccucaucauccagaacaucacgugggaggaccacugccaguucucccgccccagccccaucggcuaccuggggcugcucagccagcggacccgcgacaucuacaucucccggcgccugcugggcaccuucaccuggacgcucagcgacuccgagggcaacgagacccccgggggcuacugccugacccgguggaugcugaucgaggccgagcucaagugcuucgggaacaccgccguggcgaagugcaacgagaagcacgacgaggaguucugcgacaugcugcgccuguucgacuucugcaagcaggccauccggcgccucaagacgccggcccagaugagcauccagcugaucaacaaggccgugaacgcccugaucaacgaccagcucaucaugaagaaccaccuccgggacaucaugggcauccccuacugcaacuacuccaaguacugcuaccugaaccacaccgucaccgggaagaccagccugccccgcugcugccugguguccaacggcagcuaccugaacgagacgcacuucuccgacgacaucgagcagcaggcggacaacaugaucaccgagcuccugcagaaggaguacaucgaccggcagggcaagaccccgcuggggcugguggaccucuucgucuucagcaccuccuucuaccugaucagcaucuuccugcaccucgugaagauccccacgcaccgccacguggucggcaagcccugccccaagccgcaccggcugaaccacauggggaucugcuccugcggccuguacaagcaccccggggugcccgugaaguggaagcgcugaggacuaguuauaagacugacuagcccgaugggccucccaacgggcccuccuccccuccuugcaccgagauuaaucaaaggcucuuuucagagccaccaaaaaaaaaaaaaaaaaaaaaaaaaaaaaaaaaaaaaaaaaaaaaaaaaaaaaaaaaaaaaaaaagaauu

SEQ ID NO: 34479 - RNA, 1655 nt, Artificial Sequence
  mRNA product Design i-3 (hSL-A64-N5) comprising derived and/or modified sequence from LASV(Lassa virus/H.sapiens-wt/NGA/2015/ISTH_0543;Clade II)__AVO03639__GPCmut8 (opt1)
aggagaaagcuuaccaugggccagaucaucaccuucuuccaggaggugccccacgucaucgaggaggugaugaacaucgugcugaucgcccucagccugcuggccauccucaaggggaucuacaacgucgcgaccugcggccuguucgggcugguguccuuccuccugcugugcggccgcagcugcuccacgaccuacaaggggguguacgagcuccagacccuggagcuggacauggccaaccucaacaugugcaugccgcugagcugcaccaagaacaacucccaccacuacaucauggucggcaacgagacgggccuggagcucacccugaccaacaccagcaucaucaaccacaaguucugcaaccuguccgacgcccacaagaagaaccucuacgaccacgcccugaugagcaucaucuccacguuccaccugagcauccccaacuucaaccaguacgaggccauguccugcgacuucaacgggggcaagaucagcgugcaguacaaccucucccacaccuacgcgguggacgccgccaaccacugcgggaccaucgccaacggcguccugcagaccuucaugcggauggcguggggcgggagcuacaucgcccuggacuccggcaaggggagcugggacugcaucaugacguccuaccaguaccucgugauccagaacaccaccugggaggaccacugccaguucagccgccccucccccaucggcuaccuggggcugcucagccagcggacccgcgacaucuacaucagccggcgccugcugggcacguucaccuggacccucuccgacagcgagggcaacgagacccccgggggcuacugccugacgcgguggaugcugaucgaggccgagcucaagugcuucgggaacaccgccguggccaagugcaacgagaagcacgacgaggaguucugcgacaugcugcgccuguucgacuucugcaagcaggcgauccggcgccucaagaccccggcccagauguccauccagcugaucaacaaggccgucaacgcccugaucaacgaccagcucaucaugaagaaccaccuccgggacaucaugggcauccccuacugcaacuacagcaaguacugcuaccugaaccacaccgugacggggaagaccucccugccccgcugcugccuggugagcaacggcuccuaccugaacgagacccacuucagcgacgacaucgagcagcaggccgacaacaugaucaccgagcuccugcagaaggaguacaucgaccggcagggcaagacgccgcuggggcuggucgaccucuucguguucuccaccagcuucuaccugaucuccaucuuccugcaccucgugaagauccccacccaccgccacaucaccggcaagcccugccccaagccgcaccggcugaaccacauggggaucugcagcugcggccuguacaagcaccccgggguccccgugaaguggaagcgcugaggacuaguuauaagacugacuagcccgaugggccucccaacgggcccuccuccccuccuugcaccgagauuaaucaaaggcucuuuucagagccaccaaaaaaaaaaaaaaaaaaaaaaaaaaaaaaaaaaaaaaaaaaaaaaaaaaaaaaaaaaaaaaaaagaauu

SEQ ID NO: 34480 - RNA, 1655 nt, Artificial Sequence
  mRNA product Design i-3 (hSL-A64-N5) comprising derived and/or modified sequence from LASV(Lassa virus/H.sapiens-wt/NGA/2016/ISTH_0009;Clade II)__AVO03571__GPCmut8 (opt1)
aggagaaagcuuaccaugggccagaucaucaccuucuuccaggaggugccccacgucaucgaggaggugaugaacaucgugcugaucgcccucagccugcuggccauccucaaggggaucuacaacgucgcgaccugcggccugcuggggcucguguccuuccugcugcucugcggccgcagcugcuccacgaccuacaaggggguguacgagcugcagacccuggagcucgacauggccagccugaacaugugcaugccgcuguccugcaccaagaacaacagccaccacuacaucauggucggcaacgagacgggccucgagcugacccugaccaacaccuccaucaucaaccacaaguucugcaaccucagcgacgcccacaagaagaaccuguacgaccacgcccugauguccaucaucagcacguuccaccucuccauccccaacuucaaccaguacgaggccaugagcugcgacuucaacgggggccggaucuccgugcaguacaaccugagccacuccuacgcgguggacgccgccaaccacugcgggaccaucgccaacggcguccugcagaccuucaugcgcauggcguggggcgggagcuacaucgcccucgacuccggcaaggggagcugggacugcaucaugaccuccuaccaguaccugaucauccagaacacgaccugggaggaccacugccaguucagccggcccagccccaucggcuaccuggggcuccugucccagcgcacccgggacaucuacaucagccgccggcugcucggcaccuucacguggacccuguccgacagcgagggcaacgagacccccgggggcuacugccugacccgcuggaugcucaucgaggccgagcugaagugcuucgggaacacggccguggccaagugcaacgagaagcacgacgaggaguucugcgacaugcugcggcuguucgacuucugcaagcaggcgauccgccggcugaagaccccggcccagauguccauccagcugaucaacaaggccgugaacgcccucaucaacgaccagcugaucaugaagaaccaccuccgcgacaucaugggcauccccuacugcaacuacagcaaguacugcuaccucaaccacaccgucaccgggaagacgucccugccccggugcugccuggugagcaacggcuccuaccucaacgagacccacuucagcgacgacaucgagcagcaggccgacaacaugaucaccgagcugcugcagaaggaguacaucgaccgccagggcaagaccccgcuggggcucguggaccuguucgucuucuccacgagcuucuaccugaucuccaucuuccuccaccuggugaagauccccacccaccggcacaucaccggcaagcccugccccaagccgcaccgccugaaccacauggggaucugcagcugcggccucuacaaccaccccggggugcccgucaaguggaagcggugaggacuaguuauaagacugacuagcccgaugggccucccaacgggcccuccuccccuccuugcaccgagauuaaucaaaggcucuuuucagagccaccaaaaaaaaaaaaaaaaaaaaaaaaaaaaaaaaaaaaaaaaaaaaaaaaaaaaaaaaaaaaaaaaagaauu

SEQ ID NO: 34481 - RNA, 1655 nt, Artificial Sequence
  mRNA product Design i-3 (hSL-A64-N5) comprising derived and/or modified sequence from LASV(Lassa virus/H.sapiens-wt/NGA/2016/ISTH_0017;Clade II)__AVO03567__GPCmut8 (opt1)
aggagaaagcuuaccaugggccagaucaucaccuucuuccaggaggugccccacgucaucgaggaggugaugaacaucgugcugaucgcccucagccugcuggccauccucaaggggaucuacaacgucgcgaccugcggccuguucgggcugguguccuuccuccugcugugcggccgcagcugcuccacgaccuacaaggggguguacgagcuccagacccuggagcuggacauggccagccucaacaugugcaugccgcuguccugcaccaagaacaacagccaccacuacaucauggucggcaacgagacgggccuggagcucacccugaccaacaccuccaucaucaaccacaaguucugcaaccugagcgacgcccacaagaagaaccucuacgaccacgcccugauguccaucaucagcacguuccaccuguccauccccaacuucaaccaguacgaggccaugagcugcgacuucaacgggggcaagaucuccgugcaguacaaccucagccacaccuacgcgaucgacgccgccaaccacugcgggaccaucgccaacggcgugcugcagaccuucaugcggauggcguggggcggguccuacaucgcccuggacagcggcaagggguccugggacugcaucaugacgagcuaccaguaccucaucauccagaacaccaccugggaggaccacugccaguucucccgccccagccccaucggcuaccuggggcugcucagccagcggacccgcgacaucuacaucucccggcgccugcugggcacguucaccuggacccucagcgacuccgagggcaacgagacccccgggggcuacugccugacgcgguggaugcugaucgaggccgagcucaagugcuucgggaacaccgccgucgccaagugcaacgagaagcacgacgaggaguucugcgacaugcugcgccuguucgacuucugcaagcaggcgauccggcgccucaagaccccggcccagaugagcauccagcugaucaacaaggccgugaacgcccugaucaacgaccagcucaucaugaagaaccaccuccgggacaucaugggcauccccuacugcaacuacuccaaguacugcuaccugaaccacaccgugacggggaagaccagccugccccgcugcugccuggucuccaacggcagcuaccugaacgagacccacuucuccgacgacaucgagcagcaggccgacaacaugaucaccgagcuccugcagaaggaguacauggaccggcagggcaagacgccgcuggggcugguggaccucuucguguucagcaccuccuucuaccugaucagcaucuuccugcaccucguccgcauccccacccaccggcacgugaucggcaagcccugccccaagccgcaccgccugaaccacauggggaucugcuccugcggccuguacaagcaccccggggugcccgucaaguggaagcggugaggacuaguuauaagacugacuagcccgaugggccucccaacgggcccuccuccccuccuugcaccgagauuaaucaaaggcucuuuucagagccaccaaaaaaaaaaaaaaaaaaaaaaaaaaaaaaaaaaaaaaaaaaaaaaaaaaaaaaaaaaaaaaaaagaauu

SEQ ID NO: 34482 - RNA, 1655 nt, Artificial Sequence
  mRNA product Design i-3 (hSL-A64-N5) comprising derived and/or modified sequence from LASV(Lassa virus/H.sapiens-wt/NGA/2018/ISTH_0959;Clade II)__AVV65099__GPCmut8 (opt1)
aggagaaagcuuaccaugggccagaucaucaccuucuuccaggaggugccccacgucaucgaggaggugaugaacaucgugcugaucgcccucagccugcuggccauccucaaggggaucuacaacgucgugaccugcggccuguucgggcugguguccuuccuccugcugugcggccgcagcugcuccacgaccuacaagggggucuacgagcuccagacccuggagcuggacauggcgagccucaacaugugcaugccgcuguccugcaccaagaacaacagccaccacuacaucauggugggcaacgagacgggccuggagcucacccugaccaacaccuccaucaucaaccacaaguucugcaaccugagcgacgcccacaagaagaaccucuacgaccacgcccugauguccaucaucagcacguuccaccuguccauccccaacuucaaccaguacgaggccaugagcugcgacuucaacgggggcaagaucuccgugcaguacaaccucagccacgccuacgcgaucgacgccgccaaccacugcgggaccaucgccaacggcguccugcagaccuucaugcggauggcguggggcggguccuacaucgcccuggacagcggcaagggguccugggacugcaucaugaccagcuaccaguaccucaucauccagaacacgaccugggaggaccacugccaguucucccgccccagccccaucggcuaccuggggcugcucagccagcggacccgcgacaucuacaucucccggcgccugcugggcaccuucacguggacccucagcgacuccgagggcaacgagacccccgggggcuacugccugacccgguggaugcugaucgaggccgagcucaagugcuucgggaacacggccguggccaagugcaacgagaagcacgacgaggaguucugcgacaugcugcgccuguucgacuucugcaagcaggcgauccggcgccucaagaccccggcccagaugagcauccagcugaucaacaaggccgugaacgcccugaucaacgaccagcucaucaugaagaaccaccuccgggacaucaugggcauccccuacugcaacuacuccaaguacugcuaccugaaccacaccgucaccgggaagacgagccugccccgcugcugccugguguccaacggcagcuaccugaacgagacccacuucuccgacgacaucgagcagcaggccgacaacaugaucaccgagcuccugcagaaggaguacaucgaccggcagggcaagaccccgcuggggcugguggaccucuucgucuucagcacguccuucuaccugaucagcaucuuccugcaccucgugaagauccccacccaccgccacgugaucggcaagcccugccccaagccgcaccggcugaaccacauggggaucugcuccugcggccuguacaagcaccccgggguccccgugaaguggaagcgcugaggacuaguuauaagacugacuagcccgaugggccucccaacgggcccuccuccccuccuugcaccgagauuaaucaaaggcucuuuucagagccaccaaaaaaaaaaaaaaaaaaaaaaaaaaaaaaaaaaaaaaaaaaaaaaaaaaaaaaaaaaaaaaaaagaauu

SEQ ID NO: 34483 - RNA, 1655 nt, Artificial Sequence
  mRNA product Design i-3 (hSL-A64-N5) comprising derived and/or modified sequence from LASV(LASV003-NIG-2008;Clade II)__AIT17580__GPCmut8 (opt1)
aggagaaagcuuaccaugggccagaucaucaccuucuuccaggaggugccccacgucaucgaggaggugaugaacaucgugcugaucgcccucagccugcuggccauccucaaggggaucuacaacgucgcgaccugcggccuguucgggcugguguccuuccuccugcugugcggccgcagcugcuccacgaccuacaaggggguguacgagcuccagacccuggagcuggacauggccagccucaacaugugcaugccgcuguccugcaccaagaacaacagccaccacuacaucauggucggcaacgagacgggccuggagcucacccugaccaacaccuccaucaucaaccacaaguucugcaaccugagcgacgcccacaagaagaaccucuacgaccacgcccugauguccaucaucagcacguuccaccuguccauccccaacuucaaccaguacgaggccaugagcugcgacuucaacgggggcaagaucuccgugcaguacaaccucagccacaccuacgcgguggacgccgccaaccacugcgggaccaucgccaacggcguccugcagaccuucaugcggauggcguggggcggguccuacaucgcccuggacagcggcaagggguccugggacugcaucaugacgagcuaccaguaccucaucauccagaacaccaccugggaggaccacugccaguucucccgccccagccccaucggcuaccuggggcugcucagccagcggacccgcgacaucuacaucucccggcgccugcugggcacguucaccuggacccucagcgacuccgagagcaacgagaccccgggcggguacugccugacgcgguggaugcugaucgaggccgagcucaagugcuucggcaacaccgccguggccaagugcaacgagaagcacgacgaggaguucugcgacaugcugcgccuguucgacuucugcaagcaggcgauccggcgccucaaggcccccgcccagauguccauccagcugaucaacaaggccgugaacgcccugaucaacgaccagcucaucaugaagaaccaccuccgggacaucauggggauccccuacugcaacuacagcaaguacugcuaccugaaccacaccgucaccggccgcacgucccugccccggugcugccuggugagcaacggguccuaccugaacgagacccacuucagcgacgacaucgagcagcaggcggacaacaugaucaccgagcuccugcagaaggaguacauggaccgccagggcaagaccccgcugggccugguggaccucuucgucuucuccacgagcuucuaccugaucuccaucuuccugcaccucgugaagauccccacccaccggcacgugaucgggaagcccugccccaagccgcaccgccugaaccacaugggcaucugcagcugcgggcuguacaagcaccccggcguccccgugaaguggaagcggugaggacuaguuauaagacugacuagcccgaugggccucccaacgggcccuccuccccuccuugcaccgagauuaaucaaaggcucuuuucagagccaccaaaaaaaaaaaaaaaaaaaaaaaaaaaaaaaaaaaaaaaaaaaaaaaaaaaaaaaaaaaaaaaaagaauu

SEQ ID NO: 34484 - RNA, 1655 nt, Artificial Sequence
  mRNA product Design i-3 (hSL-A64-N5) comprising derived and/or modified sequence from LASV(LASV035-NIG-2009;Clade II)__AIT17588__GPCmut8 (opt1)
aggagaaagcuuaccaugggccagaucaucaccuucuuccaggaggugccccacgucaucgaggaggugaugaacaucgugcugaucgcccucagccugcuggccauccucaaggggaucuacaacgucgcgaccugcggccuguucgggcugguguccuuccuccugcugugcggccgcagcugcuccacgaccuacaaggggguguacgagcuccagacccuggagcuggacauggccagccucaacaugugcaugccgcuguccugcaccaagaacaacagccaccacuacaucauggucggcaacgagacgggccuggagcucacccugaccaacaccuccaucaucaaccacaaguucugcaaccugagcgacgcccacaagaagaaccucuacgaccacgcccugauguccaucaucagcacguuccaccuguccauccccaacuucaaccaguacgaggccaugagcugcgacuucaacgggggcaagaucuccgugcaguacaaccucagccacgcguacgccguggacgccgccaaccacugcgggaccaucgcgaacggcguccugcagaccuucaugcggauggccuggggcggguccuacaucgcccuggacagcggcaagggguccugggacugcaucaugaccagcuaccaguaccucaucauccagaacacgaccugggaggaccacugccaguucucccgccccagccccaucggcuaccuggggcugcucagccagcggacccgcgacaucuacaucucccggcgccugcugggcaccuucacguggacccucagcgacuccgagggcaacgagacccccgggggcuacugccugacccgguggaugcugaucgaggccgagcucaagugcuucgggaacacggccguggcgaagugcaacgagaagcacgacgaggaguucugcgacaugcugcgccuguucgacuucugcaagcaggccauccggcgccucaaggccccggcccagaugagcauccagcugaucaacaaggccgugaacgcgcugaucaacgaccagcucaucaugaagaaccaccuccgggacaucaugggcauccccuacugcaacuacuccaaguacugcuaccugaaccacaccgucaccgggaagaccagccugccccgcugcugccugguguccaacggcagcuaccugaacgagacgcacuucuccgacgacaucgagcagcaggccgacaacaugaucaccgagcuccugcagaaggaguacaucgaccggcagggcaagaccccgcuggggcugguggaccucuucgucuucagcaccuccuucuaccugaucagcaucuuccugcaccucgugaagauccccacgcaccgccacgugaucggcaagcccugccccaagccgcaccggcugaaccacauggggaucugcuccugcggccuguacaagcaccccgggguccccgugaaguggaagcgcugaggacuaguuauaagacugacuagcccgaugggccucccaacgggcccuccuccccuccuugcaccgagauuaaucaaaggcucuuuucagagccaccaaaaaaaaaaaaaaaaaaaaaaaaaaaaaaaaaaaaaaaaaaaaaaaaaaaaaaaaaaaaaaaaagaauu

SEQ ID NO: 34485 - RNA, 1655 nt, Artificial Sequence
  mRNA product Design i-3 (hSL-A64-N5) comprising derived and/or modified sequence from LASV(LASV1000-NIG-2009;Clade II)__AIT17782__GPCmut8 (opt1)
aggagaaagcuuaccaugggccagaucaucaccuucuuccaggaggugccccacgucaucgaggaggugaugaacaucgugcugaucgcccucagccugcuggccauccucaaggggaucuacaacgucgcgaccugcggccuguucgggcugguguccuuccuccugcugugcggccgcagcugcuccacgaccuacaaggggguguacgagcuccagacccuggagcuggacauggccagccucaacaugugcaugccgcuguccugcaccaagaacaacagccaccacuacaucauggucggcaacgagacgggccuggagcucacccugaccaacaccuccaucaucaaccacaaguucugcaaccugagcgacgcccacaagaagaaccucuacgaccacgcccugauguccaucaucagcacguuccaccuguccauccccaacuucaaccaguacgaggccaugagcugcgacuucaacgggggcaagaucuccgugcaguacaaccucagccacaccuacgcgguggacgccgccaaccacugcgggaccaucgccaacggcguccugcagaccuucaugcggauggcguggggcggguccuacaucgcccuggacagcggcaagggguccugggacugcaucaugacgagcuaccaguaccucaucauccagaacaccaccugggaggaccacugccaguucucccgccccagccccaucggcuaccuggggcugcucagccagcggacccgcgacaucuacaucucccggcgccugcugggcacguucaccuggacccucagcgacuccgagggcaacgagacccccgggggcuacugccugacgcgguggaugcugaucgaggccgagcucaagugcuucgggaacaccgccguggccaagugcaacgagaagcacgacgaggaguucugcgacaugcugcgccuguucgacuucugcaagcaggcgaucaagcggcucaagaccccggcccagaugagcauccagcugaucaacaaggccgugaacgcccugaucaacgaccagcucaucaugaagaaccaccuccgcgacaucaugggcauccccuacugcaacuacuccaaguacugcuaccugaaccacaccgucacggggaagaccagccugccccggugcugccugguguccaacggcagcuaccugaacgagacccacuucuccgacgacaucgagcagcaggccgacaacaugaucaccgagcuccugcagaaggaguacaucgaccgccagggcaagacgccgcuggggcugguggaccucuucgucuucagcaccuccuucuaccugaucagcaucuuccugcaccucgugaagauccccacccaccggcacguggucggcaagcccugccccaagccgcaccgccugaaccacauggggaucugcuccugcggccuguacaagcaccccggggugcccgugaaguggaagcggugaggacuaguuauaagacugacuagcccgaugggccucccaacgggcccuccuccccuccuugcaccgagauuaaucaaaggcucuuuucagagccaccaaaaaaaaaaaaaaaaaaaaaaaaaaaaaaaaaaaaaaaaaaaaaaaaaaaaaaaaaaaaaaaaagaauu

SEQ ID NO: 34486 - RNA, 1655 nt, Artificial Sequence
  mRNA product Design i-3 (hSL-A64-N5) comprising derived and/or modified sequence from LASV(LASV221-NIG-2010;Clade II)__AIT17624__GPCmut8 (opt1)
aggagaaagcuuaccaugggccagaucaucaccuucuuccaggaggugccccacgucaucgaggaggugaugaacaucgugcugaucgcccucagccugcuggccauccucaaggggaucuacaacgucgcgaccugcggccuguucgggcugguguccuuccuccugcugugcggccgcagcugcuccacgaccuacaaggggguguacgagcuccagacccuggagcuggacauggccagccucaacaugugcaugccgcuguccugcaccaagaacaacagccaccacuacaucauggucggcaacgagacgggccuggagcucacccugaccaacaccuccaucaucaaccacaaguucugcaaccugagcgacgcccacaagaagaaccucuacgaccacgcccugauguccaucaucagcacguuccaccuguccauccccaacuucaaccaguacgaggccaugagcugcgacuucaacgggggcaagaucuccgugcaguacaaccucagccacaccuacgcgaucgacgccgccaaccacugcgggaccaucgccaacggcgugcugcagaccuucaugcggauggcguggggcggguccuacaucgcccuggacagcggcaagggguccugggacugcaucaugacgagcuaccaguaccucaucauccagaacaccaccugggaggaccacugccaguucucccgccccagccccaucggcuaccuggggcugcucagccagcggacccgcgacaucuacaucucccggcgccugcugggcacguucaccuggacccucagcgacuccgagggcaacgagacccccgggggcuacugccugacgcgguggaugcugaucgaggccgagcucaagugcuucgggaacaccgccgucgccaagugcaacgagaagcacgacgaggaguucugcgacaugcugcgccuguucgacuucugcaagcaggcgauccggcgccucaagaccccggcccagaugagcauccagcugaucaacaaggccgugaacgcccugaucaacgaccagcucaucaugaagaaccaccuccgggacaucaugggcauccccuacugcaacuacuccaaguacugcuaccugaaccacaccgugacggggaagaccagccugccccgcugcugccuggucuccaacggcagcuaccugaacgagacccacuucuccgacgacaucgagcagcaggccgacaacaugaucaccgagaugcuccagaaggaguacauggaccggcagggcaagacgccgcuggggcugguggaccuguucguguucagcaccuccuucuaccucaucagcaucuuccugcaccuggucaagauccccacccaccgccacgugaucggcaagcccugccccaagccgcaccggcucaaccacauggggaucugcuccugcggccuguacaagcaccccggggugcccgucaaguggaagcgcugaggacuaguuauaagacugacuagcccgaugggccucccaacgggcccuccuccccuccuugcaccgagauuaaucaaaggcucuuuucagagccaccaaaaaaaaaaaaaaaaaaaaaaaaaaaaaaaaaaaaaaaaaaaaaaaaaaaaaaaaaaaaaaaaagaauu

SEQ ID NO: 34487 - RNA, 1655 nt, Artificial Sequence
  mRNA product Design i-3 (hSL-A64-N5) comprising derived and/or modified sequence from LASV(LASV237-NIG-2010;Clade II)__AIT17638__GPCmut8 (opt1)
aggagaaagcuuaccaugggccagaucaucaccuucuuccaggaggugccccacgucaucgaggaggugaugaacaucgugcugaucgcccucagccugcuggccauccucaaggggaucuacaacgucgcgaccugcggccuguucgggcugguguccuuccuccugcugugcggccgcagcugcuccacgaccuacaaggggguguacgagcuccagacccuggagcuggacauggccagccucaacaugugcaugccgcuguccugcaccaagaacaacagccaccacuacaucauggucggcaacgagacgggccuggagcucacccugaccaacaccuccaucaucaaccacaaguucugcaaccugagcgacgcccacaagaaggaccucuacgaccacgcccugauguccaucaucagcacguuccaccuguccauccccaacuucaaccaguacgaggccaugagcugcgacuucaacgggggcaagaucuccgugcaguacaaccucagccacaccuacgcgguggacgccgccaaccacugcgggaccaucgccaacggcguccugcagaccuucaugcggauggcguggggcggguccuacaucgcccuggacagcggcaagggguccugggacugcaucaugacgagcuaccaguaccucaucauccagaacaccaccugggaggaccacugccaguucucccgccccagccccaucggcuaccuggggcugcucagccagcggacccgcgacaucuacaucucccggcgccugcugggcacguucaccuggacccucagcgacuccgagggcaacgagacccccgggggcuacugccugacgcgguggaugcugaucgaggccgagcucaagugcuucgggaacaccgccguggccaagugcaacgagaagcacgacgaggaguucugcgacaugcugcgccuguucgacuucugcaagcaggcgauccggcgccucaagaccccggcccagaugagcauccagcugaucaacaaggccgugaacgcccugaucaacgaccagcucaucaugaagaaccaccuccgggacaucaugggcauccccuacugcaacuacuccaaguacugcuaccugaaccacaccgucacggggaagaccagccugccccgcugcugccugguguccaacggcagcuaccugaacgagacccacuucuccgacgacaucgagcagcaggccgacaacaugaucaccgagcuccugcagaaggaguacauggaccggcagggcaagacgccgcuggggcugguggaccucuucgucuucagcaccuccuucuaccugaucagcaucuuccugcaccucaucaagauccccacccaccgccacaucaccggcaagcccugccccaagccgcaccggcugaaccacauggggaucugcuccugcggccuguacaagcaccccggggugcccgugaaguggaagcgcugaggacuaguuauaagacugacuagcccgaugggccucccaacgggcccuccuccccuccuugcaccgagauuaaucaaaggcucuuuucagagccaccaaaaaaaaaaaaaaaaaaaaaaaaaaaaaaaaaaaaaaaaaaaaaaaaaaaaaaaaaaaaaaaaagaauu

SEQ ID NO: 34488 - RNA, 1655 nt, Artificial Sequence
  mRNA product Design i-3 (hSL-A64-N5) comprising derived and/or modified sequence from LASV(LASV253-NIG-2011;Clade II)__AIT17670__GPCmut8 (opt1)
aggagaaagcuuaccaugggccagaucaucaccuucuuccaggaggugccccacgucaucgaggaggugaugaacaucgugcugaucgcccucagccugcuggccauccucaaggggaucuacaacgucgcgaccugcggccuguucgggcugguguccuuccuccugcugugcggccgcagcugcuccacgaccuacaaggggguguacgagcuccagacccuggagcuggacauggccagccucaacaugugcaugccgcuguccugcaccaagaacaacagccaccacuacaucauggucggcaacgagacgggccuggagcucacccugaccaacaccuccaucaucaaccacaaguucugcaaccugagcgacgcccacaagaagaaccucuacgaccacgcccugauguccaucaucagcacguuccaccuguccauccccaacuucaaccaguacgaggccaugagcugcgacuucaacgggggcaagaucuccgugcaguacaaccucagccacaccuacgcgguggacgccgccaaccacugcgggaccaucgccaacggcguccugcagaccuucaugcggauggcguggggcggguccuacaucgcccuggacagcggcaagggguccugggacugcaucaugacgagcuaccaguaccucaucauccagaacaccaccugggaggaccacugccaguucucccgccccagccccaucggcuaccuggggcugcucagccagcggacccgcgacaucuacaucucccggcgccugcugggcacguucaccuggacccucagcgacuccgagggcaacgagacccccgggggcuacugccugacgcgguggaugcugaucgaggccgagcucaagugcuucgggaacaccgccguggccaagugcaacgagaagcacgacgaggaguucugcgacaugcugcgccuguucgacuucugcaagcaggcgauccggcgccucaaggccccggcccagaugagcauccagcugaucaacaaggccgugaacgcccugaucaacgaccagcucaucaugaagaaccaccuccgggacaucaugggcauccccuacugcaacuacuccaaguacugcuaccugaaccacaccgucaccgggcgcacgagccugccccggugcugccugguguccaacggcagcuaccugaacgagacccacuucuccgacgacaucgagcagcaggcggacaacaugaucaccgagcuccugcagaaggaguacaucgaccgccagggcaagaccccgcuggggcugguggaccucuucgucuucagcacguccuucuaccugaucagcaucuuccugcaccucgugaagauccccacccaccggcacaucaucggcaagcccugccccaagccgcaccgccugaaccacauggggaucugcuccugcggccuguacaagcaccccggggugcccgucaaguggaagcggugaggacuaguuauaagacugacuagcccgaugggccucccaacgggcccuccuccccuccuugcaccgagauuaaucaaaggcucuuuucagagccaccaaaaaaaaaaaaaaaaaaaaaaaaaaaaaaaaaaaaaaaaaaaaaaaaaaaaaaaaaaaaaaaaagaauu

SEQ ID NO: 34489 - RNA, 1655 nt, Artificial Sequence
  mRNA product Design i-3 (hSL-A64-N5) comprising derived and/or modified sequence from LASV(LASV254-NIG-2011;Clade II)__AIT17674__GPCmut8 (opt1)
aggagaaagcuuaccaugggccagaucaucaccuucuuccaggaggugccccacgucaucgaggaggugaugaacaucgugcugaucgcccucagccugcuggccauccucaaggggaucuacaacgucgcgaccugcggccuguucgggcugguguccuuccuccugcugugcggccgcagcugcuccacgaccuacaaggggguguacgagcuccagacccuggagcuggacaugaccaaccucaacaugugcaugccgcugagcugcacgaagaacaacucccaccacuacaucauggucggcaacgagaccggccuggagcucacccugaccaacacgagcaucaucaaccacaaguucugcaaccuguccgacgcccacaagaagaaccucuacaaccacgcccugaugagcaucaucuccaccuuccaccugagcauccccaacuucaaccaguacgaggccauguccugcgacuucaacgggggcaagaucagcgugcaguacaaccucucccacagcuacgccguggacgcggccaaccacugcgggaccaucgccaacggcguccugcagaccuucaugcggauggccuggggcggguccuacaucgcgcuggacagcggcaaggggaacugggacugcaucaugacguccuaccaguaccucaucauccagaacaccaccugggaggaccacugccaguucagccgccccucccccaucggcuaccuggggcugcucagccagcggacccgcgacaucuacaucagccggcgccugcugggcacguucaccuggacccucuccgacagcgagggcaacgagacccccgggggcuacugccugacgcgguggaugcugaucgaggccgagcucaagugcuucgggaacaccgccguggccaagugcaacgagaagcacgacgaggaguucugcgacaugcugcgccuguucgacuucugcaagcaggccauccggcgccucaagaccccggcgcaggccaacauccagcugaucaacaaggccgugaacgcccugaucaacgaccagcucaucaugaagaaccaccuccgggacaucaugggcauccccuacugcaacuacuccaaguacugcuaccugaaccacaccgucacggggaagaccagccugccccgcugcugccugguguccaacggcagcuaccugaacgagacccacuucuccgacgacaucgagcagcaggccgacaacaugaucaccgagcuccugcagaaggaguacauggaccggcagggcaagacgccgcuggggcugguggaccucuucgucuucagcaccuccuucuaccugaucagcaucuuccugcaccucgugaagauccccacccaccgccacgugaucggcaagcccugccccaagccgcaccggcugaaccacauggggaucugcuccugcggccuguacaagcaccccgggguccccgugaaguggaagcgcugaggacuaguuauaagacugacuagcccgaugggccucccaacgggcccuccuccccuccuugcaccgagauuaaucaaaggcucuuuucagagccaccaaaaaaaaaaaaaaaaaaaaaaaaaaaaaaaaaaaaaaaaaaaaaaaaaaaaaaaaaaaaaaaaagaauu

SEQ ID NO: 34490 - RNA, 1655 nt, Artificial Sequence
  mRNA product Design i-3 (hSL-A64-N5) comprising derived and/or modified sequence from LASV(Nig08-A19;Clade III)__ADU56618__GPCmut8 (opt1)
aggagaaagcuuaccaugggccagaucgugaccuucuuccaggaggucccccacgugaucgaggaggugaugaacaucguccugaucgcccucagcauccuggccauccugaaggggcucuacaacaucgcgaccugcggccugaucgggcuggugacguuccuccugcuguccggccgcagcugcuccaugaccuacaaggggguguacgagcuccagacccuggagcugaacaugaacacccucaacaugugcaugccgcugagcugcacgaagaacaacucccaccacuacaucauggucggcaacgagaccggccuggagcucacccugaccaacacgagccugcuccaccacaaguucugcaaccuguccgacgcccacaagaagaaccuguacgaccacacccucaugagcaucaucuccaccuuccaccugagcauccccaacuucaaccaguacgaggccauguccugcgacuucaacgggggcaagaucaccgugcaguacaaccugagccacuccuacgccaucgacgccgcgaaccacugcgggacgguggccaacggcguccuccagaccuucaugcggauggccuggggcgggagcuacaucgcccuggacuccggccgcgggaagugggacugcaucaugaccagcuaccaguaccugaucauccagaacaccacgugggaggaccacugccaguucucccggcccagccccaucggcuaccucgggcugcugucccagcgcacccgggacaucuacaucagccgccggcuccugggcaccuucaccuggacgcugagcgacuccgagggcaacgagacccccgggggcuacugccucacccgcuggaugcugaucgaggcggagcugaagugcuucgggaacaccgccguggccaagugcaacgagaagcacgacgaggaguucugcgacaugcuccggcuguucgacuucugcaagcaggccauccgccggcugaaggccccggcgcagaugagcauccagcucaucaacaaggccgugaacgcccugaucaacgaccagcugaucaugaagaaccaccuccgcgacaucaugggcauccccuacugcaacuacuccaaguacugcuaccugaaccacacgagcaccgggcggaccucccugccccgcugcugccucgucagcaacggcuccuaccugaacgagacccacuucagcgacgacaucgagcagcaggccgacaacaugaucacggagaugcugcagaaggaguaccuggaccggcagggcaagaccccgcucgggcugguggaccuguucguguucuccaccagcuucuaccucaucuccaucuuccugcaccuggucaagauccccacccaccgccacaucgugggcaagcccugccccaagccgcaccggcucaaccacauggggaucugcagcugcggccuguacaagcagcccggggugcccguccgcuggaagcggugaggacuaguuauaagacugacuagcccgaugggccucccaacgggcccuccuccccuccuugcaccgagauuaaucaaaggcucuuuucagagccaccaaaaaaaaaaaaaaaaaaaaaaaaaaaaaaaaaaaaaaaaaaaaaaaaaaaaaaaaaaaaaaaaagaauu

SEQ ID NO: 34491 - RNA, 1658 nt, Artificial Sequence
  mRNA product Design i-3 (hSL-A64-N5) comprising derived and/or modified sequence from LASV(G1180-SLE-2010;Clade IV)__AIT17168__GPCmut8 (opt1)
aggagaaagcuuaccaugggccagaucgugaccuucuuccaggaggucccccacgugaucgaggaggugaugaacaucguccugaucgcccucagcauccuggccgugcugaaggggcucuacaacuucgcgaccugcggccugguggggcugcucacguuccugcugcucugcggccgcuccugcaccgccagccgguacaagggggucuacgagcugcagacccuggagcucaacauggagacccugaacaugugcaugccgcuguccugcacgaagaacaacagccaccacuacaucauggugggcaacgagaccggccucgagcugacccugaccaacacguccaucaucaaccacaaguucugcaaccucagcgacgcccacaagaagaaccuguacgaccacgcccugauguccaucaucagcaccuuccaccucuccauccccaacuucaaccaguacgaggccaugagcugcgacuucaacgggggcaagaucuccgugcaguacaaccugagccacuccuacgcgggggacgccgccaaccacugcggcaccgucgccaacggggugcugcagaccuucaugcgcauggcguggggcggcagcuacaucgcccucgacuccgggcacggcagcugggacugcaucaugacguccuaccaguaccugaucauccagaacaccaccugggaggaccacugccaguucagccggcccucccccaucggguaccugggccuccugagccagcgcacccgggacaucuacaucagccgccggcugcucggcacguucaccuggacccuguccgacagcgaggggaaggacaccccgggcggguacugccugacgcgcuggaugcucaucgaggccgagcugaagugcuucggcaacaccgccguggccaagugcaacgagaagcacgacgaggaguucugcgacaugcugcggcuguucgacuucugcaagcaggcgauccagcgccugaaggcccccgcccagauguccauccagcugaucaacaaggccgucaacgcccucaucaacgaccagcugaucaugaagaaccaccuccgggacaucauggggauccccuacugcaacuacagcaaguacugcuaccucaaccacaccaccacgggcaagaccucccugcccaagugcugccuggugagcaacggcuccuaccucaacgagacccacuucagcgacgacaucgagcagcaggcggacaacaugaucaccgagaugcugcagaaggaguacauggagcgccaggggaagacgccgcugggccugguggaccucuucgucuucuccaccagcuucuaccugaucuccaucuuccugcaccucgugaagauccccacccaccggcacaucgugggcaagagcugccccaagccccaccgccugaaccacauggggaucugcuccugcgggcuguacaagcagccgggcguccccgugaaguggaagcggugaggacuaguuauaagacugacuagcccgaugggccucccaacgggcccuccuccccuccuugcaccgagauuaaucaaaggcucuuuucagagccaccaaaaaaaaaaaaaaaaaaaaaaaaaaaaaaaaaaaaaaaaaaaaaaaaaaaaaaaaaaaaaaaaagaauu

SEQ ID NO: 34492 - RNA, 1658 nt, Artificial Sequence
  mRNA product Design i-3 (hSL-A64-N5) comprising derived and/or modified sequence from LASV(G1442-SLE-2011;Clade IV)__AIT17180__GPCmut8 (opt1)
aggagaaagcuuaccaugggccagaucgugaccuucuuccaggaggucccccacgugaucgaggaggugaugaacaucguccugaucgcccucagcauccuggccgugcugaaggggcucuacaacguggcgaccugcggccugaucgggcuggucacguuccuccugcugugcggccgcuccugcaccaccacccucuacaaggggguguacgagcugcagacgcuggagcucaacauggagacccugaacaugugcaugccgcugagcugcaccaagaacaacucccaccacuacauccgggugggcaacgagaccggccucgagcugacgcugaccaacaccagcaucaucaaccacaaguucugcaaccucuccgacgcccacaagaagaaccuguacgaccacgcccugaugagcaucaucuccaccuuccaccucagcauccccaacuucaaccaguacgaggccauguccugcgacuucaacgggggcaagaucagcguccaguacaaccugucccacagcuacgccggggacgcggccaaccacugcggcacgguggccaacggggugcugcagaccuucaugcgcauggccuggggcggcuccuacaucgcgcucgacagcgggcggggcaacugggacugcaucaugaccuccuaccaguaccugaucauccagaacaccacgugggacgaccacugccaguucagccgccccucccccaucggguaccugggccuccugagccagcggacccgcgacgucuacaucucccggcgccugcucggcaccuucaccuggacgcugagcgacagcgaggggaaggacaccccgggcggguacugccugacccgguggaugcucaucgaggccgagcugaagugcuucggcaacaccgccguggccaagugcaacgagaagcacgacgaggaguucugcgacaugcugcgccucuucgacuucugcaagcaggccauccagcggcugaaggcgcccgcccagauguccauccagcugaucaacaaggccgugaacgcccucaucaacgaccagcugaucaugaagaaccaccuccgcgacaucauggggauccccuacugcaacuacagcaaguacugcuaccugaacaacacggccaccggcaagaccucccugcccaagugcugccugaucagcaacggcuccuaccucaacgagacccacuucagcgacgacaucgagcaggaggcggacaacaugaucacggagaugcugcagaaggaguacauggagcggcaggggaagaccccgcugggccuggucgaccucuucguguucuccaccagcuucuaccugaucuccaucuuccugcaccucgugaagauccccacccaccgccacaucgucggcaagagcugccccaagccccaccggcugaaccacauggggaucugcuccugcgggcuguacaagcagccgggcgugcccgugcgcuggaagcggugaggacuaguuauaagacugacuagcccgaugggccucccaacgggcccuccuccccuccuugcaccgagauuaaucaaaggcucuuuucagagccaccaaaaaaaaaaaaaaaaaaaaaaaaaaaaaaaaaaaaaaaaaaaaaaaaaaaaaaaaaaaaaaaaagaauu

SEQ ID NO: 34493 - RNA, 1658 nt, Artificial Sequence
  mRNA product Design i-3 (hSL-A64-N5) comprising derived and/or modified sequence from LASV(G3010-SLE-2013;Clade IV)__AIT17344__GPCmut8 (opt1)
aggagaaagcuuaccaugggccagaucgugaccuucuuccaggaggucccccacgugaucgaggaggugaugaacaucguccugaucgcccucagcauccuggccgugcugaaggggcucuacaacuucgcgaccugcggccugguggggcuggucacguuccuccugcugugcggccgcuccugcaccaccagccucuacaaggggguguacgagcugcagacccuggagcucaacauggagacgcugaacaugugcaugccgcuguccugcaccaagaacaacagccaccacuacaucauggugggcaacgagaccggccucgagcugacccugacgaacaccuccaucaucaaccacaaguucugcaaccucagcgacgcccacaagaagaaccuguacaaccacgcccugauguccaucaucagcaccuuccaccucuccauccccaacuucaaccaguacgaggccaugagcugcgacuucaacgggggcaagaucuccguccaguacaaccugagccacuccuacgccggggacgcggccagccacugcggcaccguggccaacggggugcugcagacguucaugcggauggccuggggcggcuccuacaucgcgcucgacagcggguacggcaagugggacugcaucaugaccuccuaccaguaccugaucauccagaacaccaccugggaggaccacugccaguucagccgccccucccccaucggguaccugggccuccugagccagcggacgcgcgacaucuacaucagccggcgccugcucggcaccuucaccuggacccuguccgacagcgaggggaaggacacgccgggcggguacugccugacccgguggaugcucaucgaggccgagcugaagugcuucggcaacaccgccgucgccaagugcaacgagaagcacgacgaggaguucugcgacaugcugcgccucuucgacuucugcaagcaggccauccagcggcugaagacccccgcgcagauguccauccagcugaucaacaaggccgugaacgcccucaucaacgaccagcugaucaugaagaaccaccuccgcgacaucauggggauccccuacugcaacuacagcaaguacugcuaccugaaccacacgaccaccggcaagaccucccugcccaagugcugccuggugagcaacggcuccuaccucaacgagacgcacuucagcgacgacaucgagcagcaggccgacaacaugaucaccgagaugcugcagaaggaguacauggagcggcaggggaagaccccgcugggccuggucgaccucuucguguucuccaccagcuucuaccugaucuccaucuuccugcaccucgugaagauccccacgcaccgccacaucgucggcaagagcugccccaagccccaccggcugaaccacauggggaucugcuccugcgggcuguacaagcagccgggcgugcccgugcgcuggaagcggugaggacuaguuauaagacugacuagcccgaugggccucccaacgggcccuccuccccuccuugcaccgagauuaaucaaaggcucuuuucagagccaccaaaaaaaaaaaaaaaaaaaaaaaaaaaaaaaaaaaaaaaaaaaaaaaaaaaaaaaaaaaaaaaaagaauu

SEQ ID NO: 34494 - RNA, 1658 nt, Artificial Sequence
  mRNA product Design i-3 (hSL-A64-N5) comprising derived and/or modified sequence from LASV(G502-SLE-2009;Clade IV)__AIT17126__GPCmut8 (opt1)
aggagaaagcuuaccaugggccagaucgugaccuucuuccaggaggucccccacgugaucgaggaggugaugaacaucguccugaucgcccucagcauccuggccgugcugaaggggcucuacaacuucgcgaccugcggccugguggggcugcucacguuccugcugcucugcggccgcuccugcaccaccgggcuguacaagggcgucuacgagcugcagacccucgagcugaacauggagacgcugaacaugugcaugccgcucagcugcaccaagaacaacucccaccacuacaucauggugggcaacgagaccgggcuggagcugacccucacgaacaccagcaucaucaaccacaaguucugcaaccuguccgacgcccacaagaagaaccuguacgaccacgcccucaugagcaucaucuccaccuuccaccugagcauccccaacuucaaccaguacgaggccauguccugcgacuucaacggcgggaagaucagcgugcaguacaaccugucccacagcuacgccggcgacgcggccgaccacugcgggaccgucgccaacggcgugcuccagacguucaugcggauggccuggggcggguccuacaucgcgcuggacagcggccgcgggcggugggacugcaucaugaccuccuaccaguaccugaucauccagaacaccaccugggaggaccacugccaguucagccgccccucccccaucggcuaccucggccugcugagccagcggacgcgcgacaucuacaucucccggcgccuccuggggaccuucaccuggacccugagcgacagcgagggcaaggacacgcccgggggcuacugccucacccgguggaugcugaucgaggccgagcugaagugcuucgggaacaccgccguggccaagugcaacgagaagcacgacgaggaguucugcgacaugcuccgccuguucgacuucugcaagcaggccauccagcggcugaaggcgccggcccagauguccauccagcucaucaacaaggccgucaacgcccugaucaacgaccagcuggugaugaagaaccaccuccgcgacaucaugggcauccccuacugcaacuacagccgguacugcuaccugaaccacaccacgaccggccgcaccucccugcccaagugcugccucgugagcaacggguccuaccugaacgagacccacuucagcgacgacaucgagcagcaggccgacaacaugaucacggagaugcugcagaaggaguacauggagcggcagggcaagaccccgcuggggcucgucgaccuguucguguucuccaccagcuucuaccugaucuccaucuuccuccaccuggugaagauccccacccaccgccacaucgucggcaagagcugccccaagccccaccggcugaaccacauggggaucugcuccugcggccucuacaagcagccgggcgugcccgugaaguggaagcgcugaggacuaguuauaagacugacuagcccgaugggccucccaacgggcccuccuccccuccuugcaccgagauuaaucaaaggcucuuuucagagccaccaaaaaaaaaaaaaaaaaaaaaaaaaaaaaaaaaaaaaaaaaaaaaaaaaaaaaaaaaaaaaaaaagaauu

SEQ ID NO: 34495 - RNA, 1658 nt, Artificial Sequence
  mRNA product Design i-3 (hSL-A64-N5) comprising derived and/or modified sequence from LASV(G733-SLE-2010;Clade IV)__AIT17154__GPCmut8 (opt1)
aggagaaagcuuaccaugggccagaucgugaccuucuuccaggaggucccccacgugaucgaggaggugaugaacaucguccugaucgcccucagcauccuggccgugcugaaggggcucuacaacuucgcgaccugcggcaucguggggcuggucuccuuccugcuccugugcggccgcagcugcacgaccucccuguacaaggggguguacgagcuccagacccuggagcugaacauggagacccucaacaugugcaugccgcugagcugcacgaagaacaacucccaccacuacaucauggugggcaacgagaccggccuggagcucacccugaccaacacgagcaucaucaaccacaaguucugcaaccuguccgacgcccacaagaagaaccucuacgaccacgcccugaugagcaucaucuccaccuuccaccugagcauccccaacuucaaccaguacgaggccauguccugcgacuucaacgggggcaagaucagcguccaguacaaccucucccacagcuacgccggggacgcggccaaccacugcggcaccaucgccaacggggugcugcagaccuucaugcggauggccuggggcggcuccuacaucgcgcuggacagcgggcgcgaccggugggacugcaucaugacguccuaccaguaccucaucauccagaacaccaccugggaggaccacugccaguucagccgccccucccccaucggcuaccuggggcugcucagccagcggacccgcgacaucuacaucagccggcgccugcugggcacguucaccuggacccucuccgacagcgagggcaaggacacccccgggggcuacugccugacgcgguggaugcugaucgaggccgagcucaagugcuucgggaacaccgccguggccaagugcaacgagaagcacgacgaggaguucugcgacaugcugcgccuguucgacuucugcaagcaggccauccagcggcucaaggcgccggcccagauguccauccagcugaucaacaaggccgucaacgcccugaucaacgaccagcucaucaugaagaaccaccuccgcgacaucaugggcauccccuacugcaacuacagcaaguacugcuaccugaaccacaccaccacggggaagaccucccugcccaagugcugccuggugagcaacggcuccuaccugaacgagacccacuucagcgacgacaucgagcagcaggccgacaacaugaucaccgagaugcuccagaaggaguacauggagcggcagggcaagacgccgcuggggcugguggaccuguucgucuucuccaccagcuucuaccucaucuccaucuuccugcaccuggugaagauccccacccaccgccacguggucggcaagagcugccccaagccccaccggcucaaccacauggggaucugcuccugcggccuguacgggcagccgggcgugcccgugaaguggaagcgcugaggacuaguuauaagacugacuagcccgaugggccucccaacgggcccuccuccccuccuugcaccgagauuaaucaaaggcucuuuucagagccaccaaaaaaaaaaaaaaaaaaaaaaaaaaaaaaaaaaaaaaaaaaaaaaaaaaaaaaaaaaaaaaaaagaauu

SEQ ID NO: 34496 - RNA, 1658 nt, Artificial Sequence
  mRNA product Design i-3 (hSL-A64-N5) comprising derived and/or modified sequence from MOPV/LASV reassortant(IGS-1;Clade IV)__AFY05576__GPCmut8 (opt1)
aggagaaagcuuaccaugggccagaucgugaccuucuuccaggaggucccccacgugaucgaggaggugaugaacaucguccugaucgcccucagcgugcuggccgugcugaaggggcucuacaacuucgcgaccugcggccuggucgggcuggugacguuccuccugcugugcggccgcuccugcaccaccagccucuacaaggggguguacgagcugcagacccuggagcucaacauggagacgcugaacaugugcaugccgcuguccugcaccaagaacaacagccaccacuacaucauggucggcaacgagaccggccucgagcugacccugacgaacaccuccaucaucaaccacaaguucugcaaccucagcgacgcccacaagaagaaccuguacgaccacgcccugauguccaucaucagcaccuuccaccucuccauccccaacuucaaccaguacgaggccaugagcugcgacuucaacgggggcaagaucuccgugcaguacaaccugagccacuccuacgccggggacgcggccaaccacugcggcaccguggccaacgggguccugcagacguucaugcggauggccuggggcggcagcuacaucgcgcucgacuccgggcgcggcaacugggacugcaucaugaccagcuaccaguaccugaucauccagaacaccaccugggaggaccacugccaguucucccggcccagccccaucggguaccugggccuccugucccagcgcacgcgggacaucuacaucagccgccggcugcucggcaccuucaccuggacccugagcgacuccgagggggaggacacgccgggcggguacugccugacccgcuggaugcucaucgaggccgagcugaagugcuucggcaacaccgccguggccaagugcaacgagaagcacgacgaggaguucugcgacaugcugcggcuguucgacuucugcaagcaggccauccagcgccugaaggcgcccgcccagaugagcauccagcugaucaacaaggccgugaacgcccucaucaacgaccagcugaucaugaagaaccaccuccgggacaucauggggauccccuacugcaacuacuccaaguacugcuaccucaaccacaccacgaccggccgcaccagccugcccaagugcugccuggucuccaacggcagcuaccucaacgagacccacuucuccgacgacaucgagcagcaggccgacaacaugaucacggagaugcugcagaaggaguacauggagcggcaggggaagaccccgcugggccugguggaccucuucguguucagcaccuccuucuaccugaucagcaucuuccugcaccucgucaagauccccacccaccgccacaucguggggaaguccugccccaagccccaccggcugaaccacaugggcaucugcagcugcgggcuguacaagcagccgggcgugcccgucaaguggaagcgcugaggacuaguuauaagacugacuagcccgaugggccucccaacgggcccuccuccccuccuugcaccgagauuaaucaaaggcucuuuucagagccaccaaaaaaaaaaaaaaaaaaaaaaaaaaaaaaaaaaaaaaaaaaaaaaaaaaaaaaaaaaaaaaaaagaauu

SEQ ID NO: 34497 - RNA, 1658 nt, Artificial Sequence
  mRNA product Design i-3 (hSL-A64-N5) comprising derived and/or modified sequence from LASV(LM765-SLE-2012;Clade IV)__AIT17814__GPCmut8 (opt1)
aggagaaagcuuaccaugggccagaucgugaccuucuuccaggaggucccccacgugaucgaggaggugaugaacaucguccugaucgcccucagcauccuggccgugcugaaggggcucuacaacuucgcgaccugcggccugguggggcuggucacguuccuccugcugugcggccgcuccugcaccaccagccucuacaaggggguguacgagcugcagacccuggagcucaacauggagacgcugaacaugugcaugccgcuguccugcaccaagaacaacagccaccacuacaucauggugggcaacgagaccggccucgagcugacccugacgaacaccuccaucaucgaccacaaguucugcaaccucagcgacgcccaccggaagaaccuguacgaccacgcccugauguccaucaucagcaccuuccaccucuccauccccaacuucaaccaguacgaggccaugagcugcgacuucaacgggggcaagaucuccguccaguacaaccugagccacuccuacgccaaggacgcggccgaccacugcgggaccguggccaacggcgugcugcagacguucaugcgcauggccuggggcgggagcuacaucgcgcucgacuccggccgggggcgcugggacugcaucaugaccagcuaccaguaccugaucauccagaacaccaccugggaggaccacugccaguucucccggcccagccccaucggcuaccuggggcuccugucccagcgcacgcgggacaucuacaucagccgccggcugcucggcaccuucaccuggacccugagcgacuccgagggcaaggacacgcccgggggcuacugccugacccgcuggaugcucaucgaggccgagcugaagugcuucgggaacaccgccgucgccaagugcaacgagaagcacgacgaggaguucugcgacaugcugcggcuguucgacuucugcaagcaggccauccagcgccugaaggcgccggcccagaugagcauccagcugaucaacaaggccgugaacgcccucaucaacgaccagcugaucaugaagaaccaccuccgggacaucaugggcauccccuacugcaacuacuccaaguacugcuaccucaaccacaccacgaccgggaagaccagccugcccaagugcugccugguguccaacggcagcuaccucaacgagacccacuucuccgacgacaucgagcagcaggccgacaacaugaucacggagaugcugcagaaggaguacauggagcgccagggcaagaccccgcuggggcuggucgaccucuucguguucagcaccuccuucuaccugaucagcaucuuccugcaccucgugaagauccccacccaccggcacaucgucggcaagcccugccccaagccgcaccgccugaaccacauggggaucugcuccugcggccuguacaagcagcccggggugcccgugaaguggaagcggugaggacuaguuauaagacugacuagcccgaugggccucccaacgggcccuccuccccuccuugcaccgagauuaaucaaaggcucuuuucagagccaccaaaaaaaaaaaaaaaaaaaaaaaaaaaaaaaaaaaaaaaaaaaaaaaaaaaaaaaaaaaaaaaaagaauu

SEQ ID NO: 34498 - RNA, 1658 nt, Artificial Sequence
  mRNA product Design i-3 (hSL-A64-N5) comprising derived and/or modified sequence from LASV(LM776-SLE-2012;Clade IV)__AIT17824__GPCmut8 (opt1)
aggagaaagcuuaccaugggccagaucgugaccuucuuccaggaggucccccacgugaucgaggaggugaugaacaucguccugaucgcccucagcauccuggccgugcugaaggggcucuacaacuucgcgaccugcggccugguggggcuggucacguuccuccugcugugcggccgcuccugcaccaccagcguguacaaggggguguacgagcuccagacccuggagcugaacauggagacgcucaacaugugcaugccgcuguccugcaccaagaacaacagccaccacuacaucauggucggcaacgagaccggccuggagcucacccugacgaacaccuccaucaucaaccacaaguucugcaaccugagcgacgcccacaagaagaaccucuacgaccacgcccugauguccaucaucagcaccuuccaccuguccauccccaacuucaaccaguacgaggccaugagcugcgacuucaacgggggcaagaucuccgugcaguacaaccucagccacuccuacgccggggacgcggccaaccacugcggcaccguggccaacgggguccugcagacguucaugcggauggccuggggcggcagcuacaucgcgcuggacuccgggcacggcaagugggacugcaucaugaccagcuaccaguaccucaucauccagaacaccaccugggaggaccacugccaguucucccgccccagccccaucggguaccugggccugcucucccagcggacgcgcgacaucuacaucagccggcgccugcugggcaccuucaccuggacccucagcgacuccgaggggaaggacacgccgggcggguacugccugacccgguggaugcugaucgaggccgagcucaagugcuucggcaacaccgccguggccaagugcaacgagaagcacgacgaggaguucugcgacaugcugcgccuguucgacuucugcaagcaggccauccagcggcucaaggcgcccgcccagaugagcauccagcugaucaacaaggccgugaacgcccugaucaacgaccagcucaucaugaagaaccaccuccgcgacaucauggggauccccuacugcaacuacuccaaguacugcuaccugaaccacaccacgaccggcaagaccagccugcccaagugcugccuggucuccaacggcagcuaccugaacgagacccacuucuccgacgacaucgagcagcaggccgacaacaugaucacggagaugcuccagaaggaguacauggagcggcaggggaagaccccgcugggccugguggaccuguucguguucagcaccuccuucuaccucaucagcaucuuccugcaccuggucaagauccccacccaccgccacaucguggggaaguccugccccaagccccaccggcucaaccacaugggcaucugcagcugcgggcuguacaagcagccgggcgugcccguccgcuggaagcggugaggacuaguuauaagacugacuagcccgaugggccucccaacgggcccuccuccccuccuugcaccgagauuaaucaaaggcucuuuucagagccaccaaaaaaaaaaaaaaaaaaaaaaaaaaaaaaaaaaaaaaaaaaaaaaaaaaaaaaaaaaaaaaaaagaauu

SEQ ID NO: 34499 - RNA, 1658 nt, Artificial Sequence
  mRNA product Design i-3 (hSL-A64-N5) comprising derived and/or modified sequence from LASV(Mad39;Clade IV)__ANH09722__GPCmut8 (opt1)
aggagaaagcuuaccaugggccagaucgugaccuucuuccaggaggucccccacgugaucgaggaggugaugaacaucguccugaucgcccucagcauccuggccgugcugaaggggcucuacaacguggcgaccugcggccugaucgggcuggucacguuccuccugcugugcggccgcuccugcaccaccacccucuacaaggggguguacgagcugcaggcccuggagcucaacauggagacgcugaacaugugcaugccgcugagcugcaccaagaacaacucccaccacuacauccgggugggcaacgagaccggccucgagcugacccugacgaacaccagccucaucaaccacaaguucugcaaccuguccgacgcccacaagaagaaccuguacgaccacgcccucaugagcaucaucuccaccuuccaccugagcauccccaacuucaaccaguacgaggccauguccugcgacuucaacgacgggaagaucagcguccaguacaaccugucccacaccuacgcgggcgacacggccaaccacugcgggaccguggccaacggcgugcuccagaccuucaugcgcauggccuggggcgggagcuacaucgcgcuggacuccggccgcgggggcugggacugcaucaugaccagcuaccaguaccugaucauccagaacacgaccugggaggaccacugccaguucucccggcccagccccaucggguaccucggccugcugucccagcggacccgcgacaucuacaucagccggcgccuccugggcaccuucacguggacccuguccgacagcgaggggaaggacaccccgggcggguacugccucacccgguggaugcugaucgaggccgagcugaagugcuucggcaacacggccgucgccaagugcaacgagaagcacgacgaggaguucugcgacaugcuccgccuguucgacuucugcaagcaggccauccagcggcugaaggcgcccgcccagaugagcauccagcucaucaacaaggccgugaacgcccugaucaacgaccagcugaucaugaagaaccaccuccgcgacaucauggggauccccuacugcaacuacuccaaguacugcuaccugaaccacaccgugaccggcaagaccagccugcccaagugcugccucgucuccaacggcagcuaccugaacgagacgcacuucuccgacgacaucgagcagcaggccgacaacaugaucaccgagaugcugcagaaggaguacauggagcggcaggggaagaccccgcugggccucguggaccuguucguguucagcaccuccuucuaccugaucagcaucuuccuccaccuggucaagauccccacgcaccgccacgugguggggaagcccugccccaagccgcaccggcugaaccacaugggcaucugcuccugcggguucuacaagcagcccggcguccccgugcgcuggaagcggugaggacuaguuauaagacugacuagcccgaugggccucccaacgggcccuccuccccuccuugcaccgagauuaaucaaaggcucuuuucagagccaccaaaaaaaaaaaaaaaaaaaaaaaaaaaaaaaaaaaaaaaaaaaaaaaaaaaaaaaaaaaaaaaaagaauu

SEQ ID NO: 34500 - RNA, 1658 nt, Artificial Sequence
  mRNA product Design i-3 (hSL-A64-N5) comprising derived and/or modified sequence from LASV(Z0947-SLE-2011;Clade IV)__AIT17840__GPCmut8 (opt1)
aggagaaagcuuaccaugggccagaucgugaccuucuuccaggaggucccccacgugaucgaggaggugaugaacaucguccugaucgcccucagcauccuggccgugcugaaggggcucuacaacuucgcgaccugcggccugguggggcuggucacguuccuccugcugugcggccgcuccugcaccaucagccucuacaaggggguguacgagcugcagacccuggagcucaacauggagacccugaacaugugcaugccgcuguccugcacgaagaacaacagccaccacuacaucauggugggcaacgagaccggccucgagcugacccugaccaacacguccaucaucaaccacaaguucugcaaccucagcgacgcccacaagaagaaccuguacgaccacgcccugauguccaucaucagcaccuuccaccucuccauccccaacuucaaccaguacgaggccaugagcugcgacuucaacgggggcaagaucuccguccaguacaaccugagccacuccuacgccggggacgcggccaaccacugcggcaccguggccaacggggugcugcagaccuucaugcggauggccuggggcggcagcuacaucgcgcucgacuccgggcgcgaccggugggacugcaucaugacgagcuaccaguaccugaucauccagaacaccaccugggaggaccacugccaguucucccgccccagccccaucggcuaccuggggcuccugucccagcggacccgcgacaucuacaucagccggcgccugcucggcacguucaccuggacccugagcgacuccgagggcaaggacacccccgggggcuacugccugacgcgguggaugcucaucgaggccgagcugaagugcuucgggaacaccgccgucgccaagugcaacgagaagcacgacgaggaguucugcgacaugcugcgccucuucgacuucugcaagcaggccauccagcggcugaaggcgccggcccagaugagcauccagcugaucaacaaggccgugaacgcccucaucaacgaccagcugaucaugaagaaccaccuccgcgacaucaugggcauccccuacugcaacuacuccaaguacugcuaccugaaccacaccaccacggggaagaccagccugcccaagugcugccugguguccaacggcagcuaccucaacgagacccacuucuccgacgacaucgagcagcaggccgacaacaugaucaccgagaugcugcagaaggaguacauggagcggcagggcaagacgccgcuggggcuggucgaccucuucguguucagcaccuccuucuaccugaucagcaucuuccugcaccucgugaagauccccacccaccgccacaucgucggcaagcccugccccaagccgcaccggcugaaccacauggggaucugcuccugcggccuguacaagcagcccggggugcccgugaaguggaagcgcugaggacuaguuauaagacugacuagcccgaugggccucccaacgggcccuccuccccuccuugcaccgagauuaaucaaaggcucuuuucagagccaccaaaaaaaaaaaaaaaaaaaaaaaaaaaaaaaaaaaaaaaaaaaaaaaaaaaaaaaaaaaaaaaaagaauu

SEQ ID NO: 34501 - RNA, 1658 nt, Artificial Sequence
  mRNA product Design i-3 (hSL-A64-N5) comprising derived and/or modified sequence from LASV(Josiah;Clade IV)__NP_694870__GPCmut8 (opt4)
aggagaaagcuuaccaugggccagaucgugaccuucuuccaggaggugccccacgugaucgaggaggugaugaacaucgugcugaucgcccugagcgugcuggccgugcugaagggccuguacaacuucgccaccugcggccuggugggccuggugaccuuccugcugcugugcggcagaagcugcaccaccagccuguacaagggcguguacgagcugcagacccuggagcugaacauggagacccugaacaugugcaugccccugagcugcaccaagaacaacagccaccacuacaucauggugggcaacgagaccggccuggagcugacccugaccaacaccagcaucaucaaccacaaguucugcaaccugagcgacgcccacaagaagaaccuguacgaccacgcccugaugagcaucaucagcaccuuccaccugagcauccccaacuucaaccaguacgaggccaugagcugcgacuucaacggcggcaagaucagcgugcaguacaaccugagccacagcuacgccggcgacgccgccaaccacugcggcaccguggccaacggcgugcugcagaccuucaugagaauggccuggggcggcagcuacaucgcccuggacagcggcagaggcaacugggacugcaucaugaccagcuaccaguaccugaucauccagaacaccaccugggaggaccacugccaguucagcagacccagccccaucggcuaccugggccugcugagccagagaaccagagacaucuacaucagcagaagacugcugggcaccuucaccuggacccugagcgacagcgagggcaaggacacccccggcggcuacugccugaccagauggaugcugaucgaggccgagcugaagugcuucggcaacaccgccguggccaagugcaacgagaagcacgacgaggaguucugcgacaugcugagacuguucgacuucugcaagcaggccauccagagacugaaggcccccgcccagaugagcauccagcugaucaacaaggccgugaacgcccugaucaacgaccagcugaucaugaagaaccaccugagagacaucaugggcauccccuacugcaacuacagcaaguacugcuaccugaaccacaccaccaccggcagaaccagccugcccaagugcugccuggugagcaacggcagcuaccugaacgagacccacuucagcgacgacaucgagcagcaggccgacaacaugaucaccgagaugcugcagaaggaguacauggagagacagggcaagaccccccugggccugguggaccuguucguguucagcaccagcuucuaccugaucagcaucuuccugcaccuggugaagauccccacccacagacacaucgugggcaagagcugccccaagccccacagacugaaccacaugggcaucugcagcugcggccuguacaagcagcccggcgugcccgugaaguggaagagaugaggacuaguuauaagacugacuagcccgaugggccucccaacgggcccuccuccccuccuugcaccgagauuaaucaaaggcucuuuucagagccaccaaaaaaaaaaaaaaaaaaaaaaaaaaaaaaaaaaaaaaaaaaaaaaaaaaaaaaaaaaaaaaaaagaauu

SEQ ID NO: 34502 - RNA, 1655 nt, Artificial Sequence
  mRNA product Design i-3 (hSL-A64-N5) comprising derived and/or modified sequence from LASV(LP;Clade I)__AAF86701__GPCmut8 (opt4)
aggagaaagcuuaccaugggccagaucaucaccuucuuccaggaggugccccacgugaucgaggaggugaugaacaucgugcugaucgcccugagccugcuggccauccugaagggccuguacaacaucgccaccugcggcaucaucggccugguggccuuccuguuccugugcggcaagagcugcagccugacccugaagggcggcuacgagcugcagacccuggagcugaacauggagacccugaacaugugcaugccccugagcugcaccaagaacagcagccaccacuacaucagagugggcaacgagaccggccuggagcugacccugaccaacaccagcaucaucaaccacaaguucugcaaccugagcgacgcccacaagaagaaccuguacgaccacgcccugaugagcaucaucagcaccuuccaccugagcauccccaacuucaaccaguacgaggccaugagcugcgacuucaacggcggcaagaucagcgugcaguacaaccugagccacagcuacgccggcgacgccgccgagcacugcggcaccguggccaacggcgugcugcagaccuucaugagaauggccuggggcggcagauacaucgcccuggacagcggcaagggcaacugggacugcaucaugaccagcuaccaguaccugaucauccagaacaccaccugggaggaccacugccaguucagcagacccagccccaucggcuaccugggccugcugagccagagaaccagagacaucuacaucagcagaagacugcugggcaccuucaccuggacccugagcgacagcgagggcaacgagacccccggcggcuacugccugaccagauggaugcugaucgaggccgagcugaagugcuucggcaacaccgccguggccaagugcaacgagaagcacgacgaggaguucugcgacaugcugagacuguucgacuucugcaagcaggccaucagaagacugaaggcccccgcccagaugagcauccagcugaucaacaaggccgugaacgcccugaucaacgaccagcugaucaugaagaaccaccugagagacaucaugggcauccccuacugcaacuacagcaaguacugcuaccugaaccacaccagcagcggcagaaccagccugcccaagugcugccugaucagcaacggcagcuaccugaacgagacccaguucagcgacgacaucgagcagcaggccgacaacaugaucaccgagaugcugcagaaggaguacaucgagagacagggcaagaccccccugggccugguggacaucuucaucuucagcaccagcuucuaccugaucagcaucuuccugcaccugaucaagauccccacccacagacacaucgugggcaagcccugccccaagccccacagacugaaccacaugggcgugugcagcugcggccuguacaagcaccccggcgugcccaccaaguggaagagaugaggacuaguuauaagacugacuagcccgaugggccucccaacgggcccuccuccccuccuugcaccgagauuaaucaaaggcucuuuucagagccaccaaaaaaaaaaaaaaaaaaaaaaaaaaaaaaaaaaaaaaaaaaaaaaaaaaaaaaaaaaaaaaaaagaauu

SEQ ID NO: 34503 - RNA, 1655 nt, Artificial Sequence
  mRNA product Design i-3 (hSL-A64-N5) comprising derived and/or modified sequence from LASV(803213;Clade II)__AAF86703__GPCmut8 (opt4)
aggagaaagcuuaccaugggccagaucaucaccuucuuccaggaggugccccacgugaucgaggaggugaugaacaucgugcugaucgcccugagccugcuggccauccugaagggcaucuacaacguggccaccugcggccuguucggccugaucagcuuccugcugcugugcggcagaagcugcagcgugaccuacaagggcguguacgagcugcagacccuggagcugaacauggccaaccugaacaugugcaugccccugagcugcaccaagaacaacagccaccacuacaucauggugggcaacgagaccggccuggagcugacccugaccaacaccagcaucaucaaccacaaguucugcaaccugagcgacgcccacaagaagaaccuguacgaccacgcccugaugagcaucaucagcaccuuccaccugagcauccccaacuucaaccaguacgaggccaugagcugcgacuucaacggcggcaagaucagcgugcaguacaaccugagccacagcuucgccguggacgccgccaaccacugcggcaccaucgccaacggcgugcugcagaccuucaugagaauggccuggggcggcagcuacaucgcccuggacagcggcaagggcaacugggacugcaucaugaccagcuaccaguaccugaucauccagaacaccaccugggaggaccacugccaguucagcagacccagccccaucggcuaccugggccugcugagccagagaaccagagacaucuacaucagcagaagacugcugggcaccuucaccuggacccugagcgacagcgagggcaacgaggcccccggcggcuacugccugaccagauggaugcugaucgaggccgagcugaagugcuucggcaacaccgccguggccaagugcaacgagaagcacgacgaggaguucugcgacaugcugagacuguucgacuucugcaagcaggccaucaagagacugaagacccccgcccagaugagcauccagcugaucaacaaggccgugaacgcccugaucaacgaccagcugaucaugaagaaccaccugagagacaucaugggcauccccuacugcaacuacagcagauacugcuaccugaaccacaccgugaccggcaagaccagccugcccagaugcugccuggugagcaacggcagcuaccugaacgagacccacuucagcgacgacaucgagcagcaggccgacaacaugaucaccgagaugcugcagaaggaguacauggacagacagggcaagaccccccugggccugguggaccuguucguguucagcaccagcuucuaccugaucagcaucuuccugcaccuggugaagauccccacccacagacacaucgugggcaagcccugccccaagccccacagacugaaccacaugggcaucugcagcugcggccuguacaagcaccccggcgugcccgugaaguggaagagaugaggacuaguuauaagacugacuagcccgaugggccucccaacgggcccuccuccccuccuugcaccgagauuaaucaaaggcucuuuucagagccaccaaaaaaaaaaaaaaaaaaaaaaaaaaaaaaaaaaaaaaaaaaaaaaaaaaaaaaaaaaaaaaaaagaauu

SEQ ID NO: 34504 - RNA, 1655 nt, Artificial Sequence
  mRNA product Design i-3 (hSL-A64-N5) comprising derived and/or modified sequence from LASV(GA391;Clade III)__CAA36645__GPCmut8 (opt4)
aggagaaagcuuaccaugggccagaucgugaccuucuuccaggaggugccccacgugaucgaggaggugaugaacaucgugcugaucgcccugagcauccuggccauccugaagggccuguacaacguggccaccugcggccugaucggccuggugaccuuccugcugcugagcggcagaagcugcagccugaucuacaagggcaccuacgagcugcagacccuggagcugaacauggagacccugaacaugugcaugccccugagcugcaccaagaacaacagccaccacuacaucagagugggcaacgagaccggccuggagcugacccugaccaacaccagcauccugaaccacaaguucugcaaccugagcgacgcccacaagagaaaccuguacgaccacagccugaugagcaucaucagcaccuuccaccugagcauccccaacuucaaccaguacgaggccaugagcugcgacuucaacggcggcaagaucaccgugcaguacaaccugagccacagcuucgccguggacgccgccggccacugcggcacccuggccaacggcgugcugcagaccuucaugagaauggccuggggcggcagcuacaucgcccuggacagcggcagaggcaacugggacugcaucaugaccagcuaccaguaccugaucauccagaacaccaccugggacgaccacugccaguucagcagacccagccccaucggcuaccugggccugcugagccagagaaccagagacaucuacaucagcagaagacugcugggcaccuucaccuggacccugagcgacagcgagggcaacgagacccccggcggcuacugccugaccagauggaugcugaucgaggccgagcugaagugcuucggcaacaccgccguggccaagugcaacgagaagcacgacgaggaguucugcgacaugcugagacuguucgacuucugcaagcaggccaucagaagacugaagacccccgcccagaugagcauccagcugaucaacaaggccgugaacgcccugaucaacgaccagcugaucaugaagaaccaccugagagacaucaugggcauccccuacugcaacuacagcagauacugcuaccugaaccacaccagcaccggcaagaccagccugcccagaugcugccugaucagcaacggcagcuaccugaacgagaccaaguucagcgacgacaucgagcagcaggccgacaacaugaucaccgagaugcugcagaaggaguacaucgacagacagggcaagaccccccugggccugguggaccuguucguguucagcaccagcuucuaccugaucagcaucuuccugcaccuggugaagauccccacccacagacacaucgugggcaagcccugccccaagccccacagacugaaccacaugggcaucugcagcugcggccuguacaagcagcccggcgugcccgugagauggaagagaugaggacuaguuauaagacugacuagcccgaugggccucccaacgggcccuccuccccuccuugcaccgagauuaaucaaaggcucuuuucagagccaccaaaaaaaaaaaaaaaaaaaaaaaaaaaaaaaaaaaaaaaaaaaaaaaaaaaaaaaaaaaaaaaaagaauu

SEQ ID NO: 34505 - RNA, 1658 nt, Artificial Sequence
  mRNA product Design i-3 (hSL-A64-N5) comprising derived and/or modified sequence from LASV(AV;Clade V)__CCA30314__GPCmut8 (opt4)
aggagaaagcuuaccaugggccagaucgugaccuucuuccaggaggugccccacgugaucgaggaggugaugaacaucgugcugaucgcccugagcauccuggccgugcugaagggccuguacaacaucgccaccugcggccugaucggccugaucaccuuccugcugcugugcggcagaagcugcagcagcaaccuguacaagggcguguacgagcugcagagccuggaccugaacauggagacccugaacaugugcaugccccugagcugcaccaagaacaacagccaccacuacaucagagugggcaacgacaccggccuggagcugacccugaccaacaccagcauccugaaccacaaguucugcaaccugagcgacgcccacaagaaggaccuguacgaccacgcccugaugagcaucaucagcaccuuccaccugagcauccccaacuucaaccaguacgaggccaugagcugcgacuucaacggcggcaagaucagcgugcaguacaaccugagccacagcuacgccaucgacgccgccaaccacugcggcaccguggccaacggcauccugcagaccuucaugagaauggccuggggcggcagcuacaucgcccuggacagcggcagaggcaacugggacugcaucaugaccagcuaccaguaccugaucauccagaacaccaccugggagaaccacugccaguucagcagacccagccccaucggcuaccugggccugcugagccagagaaccagagacaucuacaucagcagaagacugcugggcaccuucaccuggacccugagcgacagcgagggcaacgccacccccggcggcuacugccugaccagauggaugcugaucgaggccgagcugaagugcuucggcaacaccgccguggccaagugcaacgagaagcacgacgaggaguucugcgacaugcugagacuguucgacuucugcaagcaggccaucagcagacugaagagccccgcccagaugagcauccagcugaucaacaaggccgugaacgcccugaucaacgaccagcugaucaugaagaaccaccugagagacaucaugggcauccccuacugcaacuacagcaaguacugcuaccugaaccacaccaucaccggcaagaccagccugcccaagugcugccuggugagcaacggcagcuaccugaacgagacccacuucagcgacgacaucgagcagcaggccgacaacaugaucaccgagaugcugcagaaggaguacauggagagacagggcaagaccccccugggccugguggaccuguucguguucagcaccagcuucuaccugaucagcaucuuccugagacuggugaagauccccacccacagacacaucgugggcaagcccugccccaagccccacagacugaaccacaugggcaucugcagcugcggccuguacaagcagcccggcgugcccgugagauggaagagaugaggacuaguuauaagacugacuagcccgaugggccucccaacgggcccuccuccccuccuugcaccgagauuaaucaaaggcucuuuucagagccaccaaaaaaaaaaaaaaaaaaaaaaaaaaaaaaaaaaaaaaaaaaaaaaaaaaaaaaaaaaaaaaaaagaauu

SEQ ID NO: 34506 - RNA, 1655 nt, Artificial Sequence
  mRNA product Design i-3 (hSL-A64-N5) comprising derived and/or modified sequence from LASV(Togo/2016/7082;Clade VI)__AMR44577__GPCmut8 (opt4)
aggagaaagcuuaccaugggccagaucaucaccuucuuccaggaggugccccacgugaucgaggaggugaugaacaucgugcugaucgcccugagccugcuggccauccugaagggcguguacaacguggccaccugcggcaucaucggccuggugaccuuccuguuccugugcggcagaagcugcagccugaucuacaagggcagcuacgagcugcagacccuggagcugaacauggagacccugaacaugugcaugccccugagcugcaccaagaacagcagccaccacuacaucagagugggcaacgagaccggccuggagcugacccugaccaacaccagcaucaucaaccacaaguucugcaaccugagcgacgcccacaagagaaaccuguacgaccacgcccugaugagcauccugagcaccuuccaccugagcauccccaacuucaaccaguacgaggccaugagcugcgacuucaacggcggcaagaucagcgugcaguacaaccugagccacgccuacgccguggacgccgccgagcacugcggcaccguggccaacggcgugcugcagaccuucaugagaauggccuggggcggcagcuacaucgcccuggacagcggcagaggcaacugggacugcaucaugaccagcuaccaguaccugaucauccagaacaccaccugggaggaccacugccaguucagcagacccagccccaucggcuaccugggccugcugagccagagaaccagagacaucuacaucagcagaagacugcugggcaccuucaccuggacccugagcgacagcgagggcaacgagacccccggcggcuacugccugaccagauggaugcugaucgaggccgagcugaagugcuucggcaacaccgccguggccaagugcaacgagaagcacgacgaggaguucugcgacaugcugagacuguucgacuucugcaagcaggccauccagagacugaagagccccgcccagaugagcauccagcugaucaacaaggccgugaacgcccugaucaacgaccagcugaucaugaagaaccaccugagagacaugaugggcauccccuacugcaacuacagcaaguacugcuaccugaaccacaccagcagcggcagaaccagccugcccaagugcugccuggugagcaacggcagcuaccugaacgagacccacuucagcgacgacaucgagcagcaggccgacaacaugaucaccgagaugcugcagaaggaguacaucgacagacagggcaagaccccccugggccugguggaccuguucguguucagcaccagcuucuaccugaucagcaucuuccugcaccugaucaagauccccacccacagacacaucgugggcaagcccugccccaagccccacagacugaaccacaugggcaucugcagcugcggccuguacaagcagcccggcgugcccaccagauggaagagaugaggacuaguuauaagacugacuagcccgaugggccucccaacgggcccuccuccccuccuugcaccgagauuaaucaaaggcucuuuucagagccaccaaaaaaaaaaaaaaaaaaaaaaaaaaaaaaaaaaaaaaaaaaaaaaaaaaaaaaaaaaaaaaaaagaauu

SEQ ID NO: 34507 - RNA, 1655 nt, Artificial Sequence
  mRNA product Design i-3 (hSL-A64-N5) comprising derived and/or modified sequence from LASV(KAK-428;Clade n.d. (VII))__ANH09740__GPCmut8 (opt4)
aggagaaagcuuaccaugggccagaucgugaccuucuuccaggaggugccccacgugaucgaggaggugaugaacaucgugcugaucgcccugagccugcuggccauccugaagggccuguacaacuucgccaccugcggcgugaucggccugaucaccuuccugcugcugugcggcagaagcugcagcgccaccuacaagggccaguacgagcugcagacccuggagcugaacauggagagccugaacaugugcaugccccugagcugcaccaagaacaacagccaccacuacaucagagccggcaacaacaccggccuggagcugacccugaccaacaccagcaucaucagccacaaguucugcaaccugagcgacgcccacaagaagaaccuguacgaccacacccugaugagcaucaucaccaccuuccaccugagcauccccaacuucaaccaguacgaggccaugagcugcgacuucaacggcggcaagaucagcauccaguacaaccugagccacagcuacgccggcgacgccgcccagcacugcggcaccguggccaacggcgugcugcagaccuucaugagaauggccuggggcggcagcuaccuggcccuggacagcggcagaagaggcugggacugcaucaucagcagcuaccaguaccugaucauccagaacaccaccugggacgaccacugccaguucagcagacccagccccaucggcuaccugggcuucgugagccagaagaccagagacaucuacaucagcagaagacugcugggcaccuucaccuggacccugagcgacagcgagggccacgacaugcccggcggcuacugccugaccagauggaugcugaucgaggccgaccugaagugcuucggcaacaccgccguggccaagugcaacgagaagcacgacgaggaguucugcgacauguggagacuguucgacuucugcaagcaggccauccagagacugaaggcccccgcccagaugaacauccagcugaucaacaaggccgugaacgcccugaucaacgaccagcugaugaugaagaaccaccugagagacaucaugggcauccccuacugcaacuacagcaaguucugcuaccugaacaacaccaccaccggcagaaccagccugcccagaugcugccugaucagcaacggcagcuaccugaacgagacccacuucagcgacgacaucgagcagcaggccgacaacaugaucaccgagaugcugcagaaggaguacauggacagacagggcaagaccccccugggccugguggaccuguucguguucagcaccagcuucuaccugaucaccaucuuccugcaccuggugaagauccccacccacagacacaucgugggcaagcccugccccaagccccacagacugaaccacaugggcaucugcagcugcggccuguacaagcagcccggcgugcccgugagauggaagagaugaggacuaguuauaagacugacuagcccgaugggccucccaacgggcccuccuccccuccuugcaccgagauuaaucaaaggcucuuuucagagccaccaaaaaaaaaaaaaaaaaaaaaaaaaaaaaaaaaaaaaaaaaaaaaaaaaaaaaaaaaaaaaaaaagaauu

SEQ ID NO: 34508 - RNA, 1655 nt, Artificial Sequence; identical to SEQ ID NO: 34502
  mRNA product Design i-3 (hSL-A64-N5) comprising derived and/or modified sequence from LASV(Pinneo-NIG-1969;Clade I)__AIT17836__GPCmut8 (opt4)

SEQ ID NO: 34509 - RNA, 1655 nt, Artificial Sequence
  mRNA product Design i-3 (hSL-A64-N5) comprising derived and/or modified sequence from LASV(ISTH0009-NIG-2011;Clade II)__AIT17404__GPCmut8 (opt4)
aggagaaagcuuaccaugggccagaucaucaccuucuuccaggaggugccccacgugaucgaggaggugaugaacaucgugcugaucgcccugagccugcuggccauccugaagggcaucuacaacguggccaccugcggccuguucggccuggugagcuuccugcugcugugcggcagaagcugcagcaccaccuacaagggcguguacgagcugcagacccuggagcuggacauggccagccugaacaugugcaugccccugagcugcaccaagaacaacagccaccacuacaucauggugggcaacgagaccggccuggagcugacccugaccaacaccagcaucaucaaccacaaguucugcaaccugagcgacgcccacaagaagaaccuguacgaccacgcccugaugagcaucaucagcaccuuccaccugagcauccccaacuucaaccaguacgaggccaugagcugcgacuucaacggcggcaagaucagcgugcaguacaaccugagccacgccuacgccguggacgccgccaaccacugcggcaccaucgccaacggcgugcugcagaccuucaugagaauggccuggggcggcagcuacaucgcccuggacagcggcaagggcagcugggacugcaucaugaccagcuaccaguaccugaucauccagaacaccaccugggaggaccacugccaguucagcagacccagccccaucggcuaccugggccugcugagccagagaaccagagacaucuacaucagcagaagacugcugggcaccuucaccuggacccugagcgacagcgagggcaacgagacccccggcggcuacugccugaccagauggaugcugaucgaggccgagcugaagugcuucggcaacaccgccguggccaagugcaacgagaagcacgacgaggaguucugcgacaugcugagacuguucgacuucugcaagcaggccaucagaagacugaagacccccgcccagaugagcauccagcugaucaacaaggccgugaacgcccugaucaacgaccagcugaucaugaagaaccaccugagagacaucaugggcauccccuacugcaacuacagcaaguacugcuaccugaaccacaccgugaccggcaagaccagccugcccagaugcugccuggugagcaacggcagcuaccugaacgagacccacuucagcgacgacaucgagcagcaggccgacaacaugaucaccgagcugcugcagaaggaguacauggacagacagggcaagaccccccugggccugguggaccuguucguguucagcaccagcuucuaccugaucagcaucuuccugcaccugaucaagauccccacccacagacacaucaccggcaagcccugccccaagccccacagacugaaccacaugggcaucugcagcugcggccuguacaagcaccccggcgugcccgugaaguggaagagaugaggacuaguuauaagacugacuagcccgaugggccucccaacgggcccuccuccccuccuugcaccgagauuaaucaaaggcucuuuucagagccaccaaaaaaaaaaaaaaaaaaaaaaaaaaaaaaaaaaaaaaaaaaaaaaaaaaaaaaaaaaaaaaaaagaauu

SEQ ID NO: 34510 - RNA, 1655 nt, Artificial Sequence
  mRNA product Design i-3 (hSL-A64-N5) comprising derived and/or modified sequence from LASV(ISTH2010-NIG-2012;Clade II)__AIT17482__GPCmut8 (opt4)
aggagaaagcuuaccaugggccagaucaucaccuucuuccaggaggugccccacgugaucgaggaggugaugaacaucgugcugaucgcccugagccugcuggccauccugaagggcaucuacaacguggccaccugcggccuguucggccuggugagcuuccugcugcugugcggcagaagcugcagcaccaccuacaagggcguguacgagcugcagacccuggagcuggacauggccagccugaacaugugcaugccccugagcugcaccaagaacaacagccaccacuacaucauggugggcaacgagaccggccuggagcugacccugaccaacaccagcaucaucaaccacaaguucugcaaccugagcgacgcccacaagaagaaccuguacgaccacgcccugaugagcaucaucagcaccuuccaccugagcauccccaacuucaaccaguacgaggccaugagcugcgacuucaacggcggcaagaucagcgugcaguacaaccugagccacgccuacgccguggacgccgccaaccacugcggcaccaucgccaacggcgugcugcagaccuucaugagaauggccuggggcggcagcuacaucgcccuggacagcggcaagggcagcugggacugcaucaugaccagcuaccaguaccugaucauccagaacaucaccugggaggaccacugccaguucagcagacccagccccaucggcuaccugggccugcugagccagagaaccagagacaucuacaucagcagaagacugcugggcaccuucaccuggacccugagcgacagcgagggcaacgagacccccggcggcuacugccugaccagauggaugcugaucgaggccgagcugaagugcuucggcaacaccgccguggccaagugcaacgagaagcacgacgaggaguucugcgacaugcugagacuguucgacuucugcaagcaggccaucagaagacugaagacccccgcccagaugagcauccagcugaucaacaaggccgugaacgcccugaucaacgaccagcugaucaugaagaaccaccugagagacaucaugggcauccccuacugcaacuacagcaaguacugcuaccugaaccacaccgugaccggcaagaccagccugcccagaugcugccuggugagcaacggcagcuaccugaacgagacccacuucagcgacgacaucgagcagcaggccgacaacaugaucaccgagcugcugcagaaggaguacaucgacagacagggcaagaccccccugggccugguggaccuguucguguucagcaccagcuucuaccugaucagcaucuuccugcaccuggugaagauccccacccacagacacguggugggcaagcccugccccaagccccacagacugaaccacaugggcaucugcagcugcggccuguacaagcaccccggcgugcccgugaaguggaagagaugaggacuaguuauaagacugacuagcccgaugggccucccaacgggcccuccuccccuccuugcaccgagauuaaucaaaggcucuuuucagagccaccaaaaaaaaaaaaaaaaaaaaaaaaaaaaaaaaaaaaaaaaaaaaaaaaaaaaaaaaaaaaaaaaagaauu

SEQ ID NO: 34511 - RNA, 1655 nt, Artificial Sequence
  mRNA product Design i-3 (hSL-A64-N5) comprising derived and/or modified sequence from LASV(Lassa virus/H.sapiens-wt/NGA/2015/ISTH_0543;Clade II)__AVO03639__GPCmut8 (opt4)
aggagaaagcuuaccaugggccagaucaucaccuucuuccaggaggugccccacgugaucgaggaggugaugaacaucgugcugaucgcccugagccugcuggccauccugaagggcaucuacaacguggccaccugcggccuguucggccuggugagcuuccugcugcugugcggcagaagcugcagcaccaccuacaagggcguguacgagcugcagacccuggagcuggacauggccaaccugaacaugugcaugccccugagcugcaccaagaacaacagccaccacuacaucauggugggcaacgagaccggccuggagcugacccugaccaacaccagcaucaucaaccacaaguucugcaaccugagcgacgcccacaagaagaaccuguacgaccacgcccugaugagcaucaucagcaccuuccaccugagcauccccaacuucaaccaguacgaggccaugagcugcgacuucaacggcggcaagaucagcgugcaguacaaccugagccacaccuacgccguggacgccgccaaccacugcggcaccaucgccaacggcgugcugcagaccuucaugagaauggccuggggcggcagcuacaucgcccuggacagcggcaagggcagcugggacugcaucaugaccagcuaccaguaccuggugauccagaacaccaccugggaggaccacugccaguucagcagacccagccccaucggcuaccugggccugcugagccagagaaccagagacaucuacaucagcagaagacugcugggcaccuucaccuggacccugagcgacagcgagggcaacgagacccccggcggcuacugccugaccagauggaugcugaucgaggccgagcugaagugcuucggcaacaccgccguggccaagugcaacgagaagcacgacgaggaguucugcgacaugcugagacuguucgacuucugcaagcaggccaucagaagacugaagacccccgcccagaugagcauccagcugaucaacaaggccgugaacgcccugaucaacgaccagcugaucaugaagaaccaccugagagacaucaugggcauccccuacugcaacuacagcaaguacugcuaccugaaccacaccgugaccggcaagaccagccugcccagaugcugccuggugagcaacggcagcuaccugaacgagacccacuucagcgacgacaucgagcagcaggccgacaacaugaucaccgagcugcugcagaaggaguacaucgacagacagggcaagaccccccugggccugguggaccuguucguguucagcaccagcuucuaccugaucagcaucuuccugcaccuggugaagauccccacccacagacacaucaccggcaagcccugccccaagccccacagacugaaccacaugggcaucugcagcugcggccuguacaagcaccccggcgugcccgugaaguggaagagaugaggacuaguuauaagacugacuagcccgaugggccucccaacgggcccuccuccccuccuugcaccgagauuaaucaaaggcucuuuucagagccaccaaaaaaaaaaaaaaaaaaaaaaaaaaaaaaaaaaaaaaaaaaaaaaaaaaaaaaaaaaaaaaaaagaauu

SEQ ID NO: 34512 - RNA, 1655 nt, Artificial Sequence
  mRNA product Design i-3 (hSL-A64-N5) comprising derived and/or modified sequence from LASV(Lassa virus/H.sapiens-wt/NGA/2016/ISTH_0009;Clade II)__AVO03571__GPCmut8 (opt4)
aggagaaagcuuaccaugggccagaucaucaccuucuuccaggaggugccccacgugaucgaggaggugaugaacaucgugcugaucgcccugagccugcuggccauccugaagggcaucuacaacguggccaccugcggccugcugggccuggugagcuuccugcugcugugcggcagaagcugcagcaccaccuacaagggcguguacgagcugcagacccuggagcuggacauggccagccugaacaugugcaugccccugagcugcaccaagaacaacagccaccacuacaucauggugggcaacgagaccggccuggagcugacccugaccaacaccagcaucaucaaccacaaguucugcaaccugagcgacgcccacaagaagaaccuguacgaccacgcccugaugagcaucaucagcaccuuccaccugagcauccccaacuucaaccaguacgaggccaugagcugcgacuucaacggcggcagaaucagcgugcaguacaaccugagccacagcuacgccguggacgccgccaaccacugcggcaccaucgccaacggcgugcugcagaccuucaugagaauggccuggggcggcagcuacaucgcccuggacagcggcaagggcagcugggacugcaucaugaccagcuaccaguaccugaucauccagaacaccaccugggaggaccacugccaguucagcagacccagccccaucggcuaccugggccugcugagccagagaaccagagacaucuacaucagcagaagacugcugggcaccuucaccuggacccugagcgacagcgagggcaacgagacccccggcggcuacugccugaccagauggaugcugaucgaggccgagcugaagugcuucggcaacaccgccguggccaagugcaacgagaagcacgacgaggaguucugcgacaugcugagacuguucgacuucugcaagcaggccaucagaagacugaagacccccgcccagaugagcauccagcugaucaacaaggccgugaacgcccugaucaacgaccagcugaucaugaagaaccaccugagagacaucaugggcauccccuacugcaacuacagcaaguacugcuaccugaaccacaccgugaccggcaagaccagccugcccagaugcugccuggugagcaacggcagcuaccugaacgagacccacuucagcgacgacaucgagcagcaggccgacaacaugaucaccgagcugcugcagaaggaguacaucgacagacagggcaagaccccccugggccugguggaccuguucguguucagcaccagcuucuaccugaucagcaucuuccugcaccuggugaagauccccacccacagacacaucaccggcaagcccugccccaagccccacagacugaaccacaugggcaucugcagcugcggccuguacaaccaccccggcgugcccgugaaguggaagagaugaggacuaguuauaagacugacuagcccgaugggccucccaacgggcccuccuccccuccuugcaccgagauuaaucaaaggcucuuuucagagccaccaaaaaaaaaaaaaaaaaaaaaaaaaaaaaaaaaaaaaaaaaaaaaaaaaaaaaaaaaaaaaaaaagaauu

SEQ ID NO: 34513 - RNA, 1655 nt, Artificial Sequence
  mRNA product Design i-3 (hSL-A64-N5) comprising derived and/or modified sequence from LASV(Lassa virus/H.sapiens-wt/NGA/2016/ISTH_0017;Clade II)__AVO03567__GPCmut8 (opt4)
aggagaaagcuuaccaugggccagaucaucaccuucuuccaggaggugccccacgugaucgaggaggugaugaacaucgugcugaucgcccugagccugcuggccauccugaagggcaucuacaacguggccaccugcggccuguucggccuggugagcuuccugcugcugugcggcagaagcugcagcaccaccuacaagggcguguacgagcugcagacccuggagcuggacauggccagccugaacaugugcaugccccugagcugcaccaagaacaacagccaccacuacaucauggugggcaacgagaccggccuggagcugacccugaccaacaccagcaucaucaaccacaaguucugcaaccugagcgacgcccacaagaagaaccuguacgaccacgcccugaugagcaucaucagcaccuuccaccugagcauccccaacuucaaccaguacgaggccaugagcugcgacuucaacggcggcaagaucagcgugcaguacaaccugagccacaccuacgccaucgacgccgccaaccacugcggcaccaucgccaacggcgugcugcagaccuucaugagaauggccuggggcggcagcuacaucgcccuggacagcggcaagggcagcugggacugcaucaugaccagcuaccaguaccugaucauccagaacaccaccugggaggaccacugccaguucagcagacccagccccaucggcuaccugggccugcugagccagagaaccagagacaucuacaucagcagaagacugcugggcaccuucaccuggacccugagcgacagcgagggcaacgagacccccggcggcuacugccugaccagauggaugcugaucgaggccgagcugaagugcuucggcaacaccgccguggccaagugcaacgagaagcacgacgaggaguucugcgacaugcugagacuguucgacuucugcaagcaggccaucagaagacugaagacccccgcccagaugagcauccagcugaucaacaaggccgugaacgcccugaucaacgaccagcugaucaugaagaaccaccugagagacaucaugggcauccccuacugcaacuacagcaaguacugcuaccugaaccacaccgugaccggcaagaccagccugcccagaugcugccuggugagcaacggcagcuaccugaacgagacccacuucagcgacgacaucgagcagcaggccgacaacaugaucaccgagcugcugcagaaggaguacauggacagacagggcaagaccccccugggccugguggaccuguucguguucagcaccagcuucuaccugaucagcaucuuccugcaccuggugagaauccccacccacagacacgugaucggcaagcccugccccaagccccacagacugaaccacaugggcaucugcagcugcggccuguacaagcaccccggcgugcccgugaaguggaagagaugaggacuaguuauaagacugacuagcccgaugggccucccaacgggcccuccuccccuccuugcaccgagauuaaucaaaggcucuuuucagagccaccaaaaaaaaaaaaaaaaaaaaaaaaaaaaaaaaaaaaaaaaaaaaaaaaaaaaaaaaaaaaaaaaagaauu

SEQ ID NO: 34514 - RNA, 1655 nt, Artificial Sequence
  mRNA product Design i-3 (hSL-A64-N5) comprising derived and/or modified sequence from LASV(Lassa virus/H.sapiens-wt/NGA/2018/ISTH_0959;Clade II)__AVV65099__GPCmut8 (opt4)
aggagaaagcuuaccaugggccagaucaucaccuucuuccaggaggugccccacgugaucgaggaggugaugaacaucgugcugaucgcccugagccugcuggccauccugaagggcaucuacaacguggugaccugcggccuguucggccuggugagcuuccugcugcugugcggcagaagcugcagcaccaccuacaagggcguguacgagcugcagacccuggagcuggacauggccagccugaacaugugcaugccccugagcugcaccaagaacaacagccaccacuacaucauggugggcaacgagaccggccuggagcugacccugaccaacaccagcaucaucaaccacaaguucugcaaccugagcgacgcccacaagaagaaccuguacgaccacgcccugaugagcaucaucagcaccuuccaccugagcauccccaacuucaaccaguacgaggccaugagcugcgacuucaacggcggcaagaucagcgugcaguacaaccugagccacgccuacgccaucgacgccgccaaccacugcggcaccaucgccaacggcgugcugcagaccuucaugagaauggccuggggcggcagcuacaucgcccuggacagcggcaagggcagcugggacugcaucaugaccagcuaccaguaccugaucauccagaacaccaccugggaggaccacugccaguucagcagacccagccccaucggcuaccugggccugcugagccagagaaccagagacaucuacaucagcagaagacugcugggcaccuucaccuggacccugagcgacagcgagggcaacgagacccccggcggcuacugccugaccagauggaugcugaucgaggccgagcugaagugcuucggcaacaccgccguggccaagugcaacgagaagcacgacgaggaguucugcgacaugcugagacuguucgacuucugcaagcaggccaucagaagacugaagacccccgcccagaugagcauccagcugaucaacaaggccgugaacgcccugaucaacgaccagcugaucaugaagaaccaccugagagacaucaugggcauccccuacugcaacuacagcaaguacugcuaccugaaccacaccgugaccggcaagaccagccugcccagaugcugccuggugagcaacggcagcuaccugaacgagacccacuucagcgacgacaucgagcagcaggccgacaacaugaucaccgagcugcugcagaaggaguacaucgacagacagggcaagaccccccugggccugguggaccuguucguguucagcaccagcuucuaccugaucagcaucuuccugcaccuggugaagauccccacccacagacacgugaucggcaagcccugccccaagccccacagacugaaccacaugggcaucugcagcugcggccuguacaagcaccccggcgugcccgugaaguggaagagaugaggacuaguuauaagacugacuagcccgaugggccucccaacgggcccuccuccccuccuugcaccgagauuaaucaaaggcucuuuucagagccaccaaaaaaaaaaaaaaaaaaaaaaaaaaaaaaaaaaaaaaaaaaaaaaaaaaaaaaaaaaaaaaaaagaauu

SEQ ID NO: 34515 - RNA, 1655 nt, Artificial Sequence
  mRNA product Design i-3 (hSL-A64-N5) comprising derived and/or modified sequence from LASV(LASV003-NIG-2008;Clade II)__AIT17580__GPCmut8 (opt4)
aggagaaagcuuaccaugggccagaucaucaccuucuuccaggaggugccccacgugaucgaggaggugaugaacaucgugcugaucgcccugagccugcuggccauccugaagggcaucuacaacguggccaccugcggccuguucggccuggugagcuuccugcugcugugcggcagaagcugcagcaccaccuacaagggcguguacgagcugcagacccuggagcuggacauggccagccugaacaugugcaugccccugagcugcaccaagaacaacagccaccacuacaucauggugggcaacgagaccggccuggagcugacccugaccaacaccagcaucaucaaccacaaguucugcaaccugagcgacgcccacaagaagaaccuguacgaccacgcccugaugagcaucaucagcaccuuccaccugagcauccccaacuucaaccaguacgaggccaugagcugcgacuucaacggcggcaagaucagcgugcaguacaaccugagccacaccuacgccguggacgccgccaaccacugcggcaccaucgccaacggcgugcugcagaccuucaugagaauggccuggggcggcagcuacaucgcccuggacagcggcaagggcagcugggacugcaucaugaccagcuaccaguaccugaucauccagaacaccaccugggaggaccacugccaguucagcagacccagccccaucggcuaccugggccugcugagccagagaaccagagacaucuacaucagcagaagacugcugggcaccuucaccuggacccugagcgacagcgagagcaacgagacccccggcggcuacugccugaccagauggaugcugaucgaggccgagcugaagugcuucggcaacaccgccguggccaagugcaacgagaagcacgacgaggaguucugcgacaugcugagacuguucgacuucugcaagcaggccaucagaagacugaaggcccccgcccagaugagcauccagcugaucaacaaggccgugaacgcccugaucaacgaccagcugaucaugaagaaccaccugagagacaucaugggcauccccuacugcaacuacagcaaguacugcuaccugaaccacaccgugaccggcagaaccagccugcccagaugcugccuggugagcaacggcagcuaccugaacgagacccacuucagcgacgacaucgagcagcaggccgacaacaugaucaccgagcugcugcagaaggaguacauggacagacagggcaagaccccccugggccugguggaccuguucguguucagcaccagcuucuaccugaucagcaucuuccugcaccuggugaagauccccacccacagacacgugaucggcaagcccugccccaagccccacagacugaaccacaugggcaucugcagcugcggccuguacaagcaccccggcgugcccgugaaguggaagagaugaggacuaguuauaagacugacuagcccgaugggccucccaacgggcccuccuccccuccuugcaccgagauuaaucaaaggcucuuuucagagccaccaaaaaaaaaaaaaaaaaaaaaaaaaaaaaaaaaaaaaaaaaaaaaaaaaaaaaaaaaaaaaaaaagaauu

SEQ ID NO: 34516 - RNA, 1655 nt, Artificial Sequence
  mRNA product Design i-3 (hSL-A64-N5) comprising derived and/or modified sequence from LASV(LASV035-NIG-2009;Clade II)__AIT17588__GPCmut8 (opt4)
aggagaaagcuuaccaugggccagaucaucaccuucuuccaggaggugccccacgugaucgaggaggugaugaacaucgugcugaucgcccugagccugcuggccauccugaagggcaucuacaacguggccaccugcggccuguucggccuggugagcuuccugcugcugugcggcagaagcugcagcaccaccuacaagggcguguacgagcugcagacccuggagcuggacauggccagccugaacaugugcaugccccugagcugcaccaagaacaacagccaccacuacaucauggugggcaacgagaccggccuggagcugacccugaccaacaccagcaucaucaaccacaaguucugcaaccugagcgacgcccacaagaagaaccuguacgaccacgcccugaugagcaucaucagcaccuuccaccugagcauccccaacuucaaccaguacgaggccaugagcugcgacuucaacggcggcaagaucagcgugcaguacaaccugagccacgccuacgccguggacgccgccaaccacugcggcaccaucgccaacggcgugcugcagaccuucaugagaauggccuggggcggcagcuacaucgcccuggacagcggcaagggcagcugggacugcaucaugaccagcuaccaguaccugaucauccagaacaccaccugggaggaccacugccaguucagcagacccagccccaucggcuaccugggccugcugagccagagaaccagagacaucuacaucagcagaagacugcugggcaccuucaccuggacccugagcgacagcgagggcaacgagacccccggcggcuacugccugaccagauggaugcugaucgaggccgagcugaagugcuucggcaacaccgccguggccaagugcaacgagaagcacgacgaggaguucugcgacaugcugagacuguucgacuucugcaagcaggccaucagaagacugaaggcccccgcccagaugagcauccagcugaucaacaaggccgugaacgcccugaucaacgaccagcugaucaugaagaaccaccugagagacaucaugggcauccccuacugcaacuacagcaaguacugcuaccugaaccacaccgugaccggcaagaccagccugcccagaugcugccuggugagcaacggcagcuaccugaacgagacccacuucagcgacgacaucgagcagcaggccgacaacaugaucaccgagcugcugcagaaggaguacaucgacagacagggcaagaccccccugggccugguggaccuguucguguucagcaccagcuucuaccugaucagcaucuuccugcaccuggugaagauccccacccacagacacgugaucggcaagcccugccccaagccccacagacugaaccacaugggcaucugcagcugcggccuguacaagcaccccggcgugcccgugaaguggaagagaugaggacuaguuauaagacugacuagcccgaugggccucccaacgggcccuccuccccuccuugcaccgagauuaaucaaaggcucuuuucagagccaccaaaaaaaaaaaaaaaaaaaaaaaaaaaaaaaaaaaaaaaaaaaaaaaaaaaaaaaaaaaaaaaaagaauu

SEQ ID NO: 34517 - RNA, 1655 nt, Artificial Sequence
  mRNA product Design i-3 (hSL-A64-N5) comprising derived and/or modified sequence from LASV(LASV1000-NIG-2009;Clade II)__AIT17782__GPCmut8 (opt4)
aggagaaagcuuaccaugggccagaucaucaccuucuuccaggaggugccccacgugaucgaggaggugaugaacaucgugcugaucgcccugagccugcuggccauccugaagggcaucuacaacguggccaccugcggccuguucggccuggugagcuuccugcugcugugcggcagaagcugcagcaccaccuacaagggcguguacgagcugcagacccuggagcuggacauggccagccugaacaugugcaugccccugagcugcaccaagaacaacagccaccacuacaucauggugggcaacgagaccggccuggagcugacccugaccaacaccagcaucaucaaccacaaguucugcaaccugagcgacgcccacaagaagaaccuguacgaccacgcccugaugagcaucaucagcaccuuccaccugagcauccccaacuucaaccaguacgaggccaugagcugcgacuucaacggcggcaagaucagcgugcaguacaaccugagccacaccuacgccguggacgccgccaaccacugcggcaccaucgccaacggcgugcugcagaccuucaugagaauggccuggggcggcagcuacaucgcccuggacagcggcaagggcagcugggacugcaucaugaccagcuaccaguaccugaucauccagaacaccaccugggaggaccacugccaguucagcagacccagccccaucggcuaccugggccugcugagccagagaaccagagacaucuacaucagcagaagacugcugggcaccuucaccuggacccugagcgacagcgagggcaacgagacccccggcggcuacugccugaccagauggaugcugaucgaggccgagcugaagugcuucggcaacaccgccguggccaagugcaacgagaagcacgacgaggaguucugcgacaugcugagacuguucgacuucugcaagcaggccaucaagagacugaagacccccgcccagaugagcauccagcugaucaacaaggccgugaacgcccugaucaacgaccagcugaucaugaagaaccaccugagagacaucaugggcauccccuacugcaacuacagcaaguacugcuaccugaaccacaccgugaccggcaagaccagccugcccagaugcugccuggugagcaacggcagcuaccugaacgagacccacuucagcgacgacaucgagcagcaggccgacaacaugaucaccgagcugcugcagaaggaguacaucgacagacagggcaagaccccccugggccugguggaccuguucguguucagcaccagcuucuaccugaucagcaucuuccugcaccuggugaagauccccacccacagacacguggugggcaagcccugccccaagccccacagacugaaccacaugggcaucugcagcugcggccuguacaagcaccccggcgugcccgugaaguggaagagaugaggacuaguuauaagacugacuagcccgaugggccucccaacgggcccuccuccccuccuugcaccgagauuaaucaaaggcucuuuucagagccaccaaaaaaaaaaaaaaaaaaaaaaaaaaaaaaaaaaaaaaaaaaaaaaaaaaaaaaaaaaaaaaaaagaauu

SEQ ID NO: 34518 - RNA, 1655 nt, Artificial Sequence
  mRNA product Design i-3 (hSL-A64-N5) comprising derived and/or modified sequence from LASV(LASV221-NIG-2010;Clade II)__AIT17624__GPCmut8 (opt4)
aggagaaagcuuaccaugggccagaucaucaccuucuuccaggaggugccccacgugaucgaggaggugaugaacaucgugcugaucgcccugagccugcuggccauccugaagggcaucuacaacguggccaccugcggccuguucggccuggugagcuuccugcugcugugcggcagaagcugcagcaccaccuacaagggcguguacgagcugcagacccuggagcuggacauggccagccugaacaugugcaugccccugagcugcaccaagaacaacagccaccacuacaucauggugggcaacgagaccggccuggagcugacccugaccaacaccagcaucaucaaccacaaguucugcaaccugagcgacgcccacaagaagaaccuguacgaccacgcccugaugagcaucaucagcaccuuccaccugagcauccccaacuucaaccaguacgaggccaugagcugcgacuucaacggcggcaagaucagcgugcaguacaaccugagccacaccuacgccaucgacgccgccaaccacugcggcaccaucgccaacggcgugcugcagaccuucaugagaauggccuggggcggcagcuacaucgcccuggacagcggcaagggcagcugggacugcaucaugaccagcuaccaguaccugaucauccagaacaccaccugggaggaccacugccaguucagcagacccagccccaucggcuaccugggccugcugagccagagaaccagagacaucuacaucagcagaagacugcugggcaccuucaccuggacccugagcgacagcgagggcaacgagacccccggcggcuacugccugaccagauggaugcugaucgaggccgagcugaagugcuucggcaacaccgccguggccaagugcaacgagaagcacgacgaggaguucugcgacaugcugagacuguucgacuucugcaagcaggccaucagaagacugaagacccccgcccagaugagcauccagcugaucaacaaggccgugaacgcccugaucaacgaccagcugaucaugaagaaccaccugagagacaucaugggcauccccuacugcaacuacagcaaguacugcuaccugaaccacaccgugaccggcaagaccagccugcccagaugcugccuggugagcaacggcagcuaccugaacgagacccacuucagcgacgacaucgagcagcaggccgacaacaugaucaccgagaugcugcagaaggaguacauggacagacagggcaagaccccccugggccugguggaccuguucguguucagcaccagcuucuaccugaucagcaucuuccugcaccuggugaagauccccacccacagacacgugaucggcaagcccugccccaagccccacagacugaaccacaugggcaucugcagcugcggccuguacaagcaccccggcgugcccgugaaguggaagagaugaggacuaguuauaagacugacuagcccgaugggccucccaacgggcccuccuccccuccuugcaccgagauuaaucaaaggcucuuuucagagccaccaaaaaaaaaaaaaaaaaaaaaaaaaaaaaaaaaaaaaaaaaaaaaaaaaaaaaaaaaaaaaaaaagaauu

SEQ ID NO: 34519 - RNA, 1655 nt, Artificial Sequence
  mRNA product Design i-3 (hSL-A64-N5) comprising derived and/or modified sequence from LASV(LASV237-NIG-2010;Clade II)__AIT17638__GPCmut8 (opt4)
aggagaaagcuuaccaugggccagaucaucaccuucuuccaggaggugccccacgugaucgaggaggugaugaacaucgugcugaucgcccugagccugcuggccauccugaagggcaucuacaacguggccaccugcggccuguucggccuggugagcuuccugcugcugugcggcagaagcugcagcaccaccuacaagggcguguacgagcugcagacccuggagcuggacauggccagccugaacaugugcaugccccugagcugcaccaagaacaacagccaccacuacaucauggugggcaacgagaccggccuggagcugacccugaccaacaccagcaucaucaaccacaaguucugcaaccugagcgacgcccacaagaaggaccuguacgaccacgcccugaugagcaucaucagcaccuuccaccugagcauccccaacuucaaccaguacgaggccaugagcugcgacuucaacggcggcaagaucagcgugcaguacaaccugagccacaccuacgccguggacgccgccaaccacugcggcaccaucgccaacggcgugcugcagaccuucaugagaauggccuggggcggcagcuacaucgcccuggacagcggcaagggcagcugggacugcaucaugaccagcuaccaguaccugaucauccagaacaccaccugggaggaccacugccaguucagcagacccagccccaucggcuaccugggccugcugagccagagaaccagagacaucuacaucagcagaagacugcugggcaccuucaccuggacccugagcgacagcgagggcaacgagacccccggcggcuacugccugaccagauggaugcugaucgaggccgagcugaagugcuucggcaacaccgccguggccaagugcaacgagaagcacgacgaggaguucugcgacaugcugagacuguucgacuucugcaagcaggccaucagaagacugaagacccccgcccagaugagcauccagcugaucaacaaggccgugaacgcccugaucaacgaccagcugaucaugaagaaccaccugagagacaucaugggcauccccuacugcaacuacagcaaguacugcuaccugaaccacaccgugaccggcaagaccagccugcccagaugcugccuggugagcaacggcagcuaccugaacgagacccacuucagcgacgacaucgagcagcaggccgacaacaugaucaccgagcugcugcagaaggaguacauggacagacagggcaagaccccccugggccugguggaccuguucguguucagcaccagcuucuaccugaucagcaucuuccugcaccugaucaagauccccacccacagacacaucaccggcaagcccugccccaagccccacagacugaaccacaugggcaucugcagcugcggccuguacaagcaccccggcgugcccgugaaguggaagagaugaggacuaguuauaagacugacuagcccgaugggccucccaacgggcccuccuccccuccuugcaccgagauuaaucaaaggcucuuuucagagccaccaaaaaaaaaaaaaaaaaaaaaaaaaaaaaaaaaaaaaaaaaaaaaaaaaaaaaaaaaaaaaaaaagaauu

SEQ ID NO: 34520 - RNA, 1655 nt, Artificial Sequence
  mRNA product Design i-3 (hSL-A64-N5) comprising derived and/or modified sequence from LASV(LASV253-NIG-2011;Clade II)__AIT17670__GPCmut8 (opt4)
aggagaaagcuuaccaugggccagaucaucaccuucuuccaggaggugccccacgugaucgaggaggugaugaacaucgugcugaucgcccugagccugcuggccauccugaagggcaucuacaacguggccaccugcggccuguucggccuggugagcuuccugcugcugugcggcagaagcugcagcaccaccuacaagggcguguacgagcugcagacccuggagcuggacauggccagccugaacaugugcaugccccugagcugcaccaagaacaacagccaccacuacaucauggugggcaacgagaccggccuggagcugacccugaccaacaccagcaucaucaaccacaaguucugcaaccugagcgacgcccacaagaagaaccuguacgaccacgcccugaugagcaucaucagcaccuuccaccugagcauccccaacuucaaccaguacgaggccaugagcugcgacuucaacggcggcaagaucagcgugcaguacaaccugagccacaccuacgccguggacgccgccaaccacugcggcaccaucgccaacggcgugcugcagaccuucaugagaauggccuggggcggcagcuacaucgcccuggacagcggcaagggcagcugggacugcaucaugaccagcuaccaguaccugaucauccagaacaccaccugggaggaccacugccaguucagcagacccagccccaucggcuaccugggccugcugagccagagaaccagagacaucuacaucagcagaagacugcugggcaccuucaccuggacccugagcgacagcgagggcaacgagacccccggcggcuacugccugaccagauggaugcugaucgaggccgagcugaagugcuucggcaacaccgccguggccaagugcaacgagaagcacgacgaggaguucugcgacaugcugagacuguucgacuucugcaagcaggccaucagaagacugaaggcccccgcccagaugagcauccagcugaucaacaaggccgugaacgcccugaucaacgaccagcugaucaugaagaaccaccugagagacaucaugggcauccccuacugcaacuacagcaaguacugcuaccugaaccacaccgugaccggcagaaccagccugcccagaugcugccuggugagcaacggcagcuaccugaacgagacccacuucagcgacgacaucgagcagcaggccgacaacaugaucaccgagcugcugcagaaggaguacaucgacagacagggcaagaccccccugggccugguggaccuguucguguucagcaccagcuucuaccugaucagcaucuuccugcaccuggugaagauccccacccacagacacaucaucggcaagcccugccccaagccccacagacugaaccacaugggcaucugcagcugcggccuguacaagcaccccggcgugcccgugaaguggaagagaugaggacuaguuauaagacugacuagcccgaugggccucccaacgggcccuccuccccuccuugcaccgagauuaaucaaaggcucuuuucagagccaccaaaaaaaaaaaaaaaaaaaaaaaaaaaaaaaaaaaaaaaaaaaaaaaaaaaaaaaaaaaaaaaaagaauu

SEQ ID NO: 34521 - RNA, 1655 nt, Artificial Sequence
  mRNA product Design i-3 (hSL-A64-N5) comprising derived and/or modified sequence from LASV(LASV254-NIG-2011;Clade II)__AIT17674__GPCmut8 (opt4)
aggagaaagcuuaccaugggccagaucaucaccuucuuccaggaggugccccacgugaucgaggaggugaugaacaucgugcugaucgcccugagccugcuggccauccugaagggcaucuacaacguggccaccugcggccuguucggccuggugagcuuccugcugcugugcggcagaagcugcagcaccaccuacaagggcguguacgagcugcagacccuggagcuggacaugaccaaccugaacaugugcaugccccugagcugcaccaagaacaacagccaccacuacaucauggugggcaacgagaccggccuggagcugacccugaccaacaccagcaucaucaaccacaaguucugcaaccugagcgacgcccacaagaagaaccuguacaaccacgcccugaugagcaucaucagcaccuuccaccugagcauccccaacuucaaccaguacgaggccaugagcugcgacuucaacggcggcaagaucagcgugcaguacaaccugagccacagcuacgccguggacgccgccaaccacugcggcaccaucgccaacggcgugcugcagaccuucaugagaauggccuggggcggcagcuacaucgcccuggacagcggcaagggcaacugggacugcaucaugaccagcuaccaguaccugaucauccagaacaccaccugggaggaccacugccaguucagcagacccagccccaucggcuaccugggccugcugagccagagaaccagagacaucuacaucagcagaagacugcugggcaccuucaccuggacccugagcgacagcgagggcaacgagacccccggcggcuacugccugaccagauggaugcugaucgaggccgagcugaagugcuucggcaacaccgccguggccaagugcaacgagaagcacgacgaggaguucugcgacaugcugagacuguucgacuucugcaagcaggccaucagaagacugaagacccccgcccaggccaacauccagcugaucaacaaggccgugaacgcccugaucaacgaccagcugaucaugaagaaccaccugagagacaucaugggcauccccuacugcaacuacagcaaguacugcuaccugaaccacaccgugaccggcaagaccagccugcccagaugcugccuggugagcaacggcagcuaccugaacgagacccacuucagcgacgacaucgagcagcaggccgacaacaugaucaccgagcugcugcagaaggaguacauggacagacagggcaagaccccccugggccugguggaccuguucguguucagcaccagcuucuaccugaucagcaucuuccugcaccuggugaagauccccacccacagacacgugaucggcaagcccugccccaagccccacagacugaaccacaugggcaucugcagcugcggccuguacaagcaccccggcgugcccgugaaguggaagagaugaggacuaguuauaagacugacuagcccgaugggccucccaacgggcccuccuccccuccuugcaccgagauuaaucaaaggcucuuuucagagccaccaaaaaaaaaaaaaaaaaaaaaaaaaaaaaaaaaaaaaaaaaaaaaaaaaaaaaaaaaaaaaaaaagaauu

SEQ ID NO: 34522 - RNA, 1655 nt, Artificial Sequence
  mRNA product Design i-3 (hSL-A64-N5) comprising derived and/or modified sequence from LASV(Nig08-A19;Clade III)__ADU56618__GPCmut8 (opt4)
aggagaaagcuuaccaugggccagaucgugaccuucuuccaggaggugccccacgugaucgaggaggugaugaacaucgugcugaucgcccugagcauccuggccauccugaagggccuguacaacaucgccaccugcggccugaucggccuggugaccuuccugcugcugagcggcagaagcugcagcaugaccuacaagggcguguacgagcugcagacccuggagcugaacaugaacacccugaacaugugcaugccccugagcugcaccaagaacaacagccaccacuacaucauggugggcaacgagaccggccuggagcugacccugaccaacaccagccugcugcaccacaaguucugcaaccugagcgacgcccacaagaagaaccuguacgaccacacccugaugagcaucaucagcaccuuccaccugagcauccccaacuucaaccaguacgaggccaugagcugcgacuucaacggcggcaagaucaccgugcaguacaaccugagccacagcuacgccaucgacgccgccaaccacugcggcaccguggccaacggcgugcugcagaccuucaugagaauggccuggggcggcagcuacaucgcccuggacagcggcagaggcaagugggacugcaucaugaccagcuaccaguaccugaucauccagaacaccaccugggaggaccacugccaguucagcagacccagccccaucggcuaccugggccugcugagccagagaaccagagacaucuacaucagcagaagacugcugggcaccuucaccuggacccugagcgacagcgagggcaacgagacccccggcggcuacugccugaccagauggaugcugaucgaggccgagcugaagugcuucggcaacaccgccguggccaagugcaacgagaagcacgacgaggaguucugcgacaugcugagacuguucgacuucugcaagcaggccaucagaagacugaaggcccccgcccagaugagcauccagcugaucaacaaggccgugaacgcccugaucaacgaccagcugaucaugaagaaccaccugagagacaucaugggcauccccuacugcaacuacagcaaguacugcuaccugaaccacaccagcaccggcagaaccagccugcccagaugcugccuggugagcaacggcagcuaccugaacgagacccacuucagcgacgacaucgagcagcaggccgacaacaugaucaccgagaugcugcagaaggaguaccuggacagacagggcaagaccccccugggccugguggaccuguucguguucagcaccagcuucuaccugaucagcaucuuccugcaccuggugaagauccccacccacagacacaucgugggcaagcccugccccaagccccacagacugaaccacaugggcaucugcagcugcggccuguacaagcagcccggcgugcccgugagauggaagagaugaggacuaguuauaagacugacuagcccgaugggccucccaacgggcccuccuccccuccuugcaccgagauuaaucaaaggcucuuuucagagccaccaaaaaaaaaaaaaaaaaaaaaaaaaaaaaaaaaaaaaaaaaaaaaaaaaaaaaaaaaaaaaaaaagaauu

SEQ ID NO: 34523 - RNA, 1658 nt, Artificial Sequence
  mRNA product Design i-3 (hSL-A64-N5) comprising derived and/or modified sequence from LASV(G1180-SLE-2010;Clade IV)__AIT17168__GPCmut8 (opt4)
aggagaaagcuuaccaugggccagaucgugaccuucuuccaggaggugccccacgugaucgaggaggugaugaacaucgugcugaucgcccugagcauccuggccgugcugaagggccuguacaacuucgccaccugcggccuggugggccugcugaccuuccugcugcugugcggcagaagcugcaccgccagcagauacaagggcguguacgagcugcagacccuggagcugaacauggagacccugaacaugugcaugccccugagcugcaccaagaacaacagccaccacuacaucauggugggcaacgagaccggccuggagcugacccugaccaacaccagcaucaucaaccacaaguucugcaaccugagcgacgcccacaagaagaaccuguacgaccacgcccugaugagcaucaucagcaccuuccaccugagcauccccaacuucaaccaguacgaggccaugagcugcgacuucaacggcggcaagaucagcgugcaguacaaccugagccacagcuacgccggcgacgccgccaaccacugcggcaccguggccaacggcgugcugcagaccuucaugagaauggccuggggcggcagcuacaucgcccuggacagcggccacggcagcugggacugcaucaugaccagcuaccaguaccugaucauccagaacaccaccugggaggaccacugccaguucagcagacccagccccaucggcuaccugggccugcugagccagagaaccagagacaucuacaucagcagaagacugcugggcaccuucaccuggacccugagcgacagcgagggcaaggacacccccggcggcuacugccugaccagauggaugcugaucgaggccgagcugaagugcuucggcaacaccgccguggccaagugcaacgagaagcacgacgaggaguucugcgacaugcugagacuguucgacuucugcaagcaggccauccagagacugaaggcccccgcccagaugagcauccagcugaucaacaaggccgugaacgcccugaucaacgaccagcugaucaugaagaaccaccugagagacaucaugggcauccccuacugcaacuacagcaaguacugcuaccugaaccacaccaccaccggcaagaccagccugcccaagugcugccuggugagcaacggcagcuaccugaacgagacccacuucagcgacgacaucgagcagcaggccgacaacaugaucaccgagaugcugcagaaggaguacauggagagacagggcaagaccccccugggccugguggaccuguucguguucagcaccagcuucuaccugaucagcaucuuccugcaccuggugaagauccccacccacagacacaucgugggcaagagcugccccaagccccacagacugaaccacaugggcaucugcagcugcggccuguacaagcagcccggcgugcccgugaaguggaagagaugaggacuaguuauaagacugacuagcccgaugggccucccaacgggcccuccuccccuccuugcaccgagauuaaucaaaggcucuuuucagagccaccaaaaaaaaaaaaaaaaaaaaaaaaaaaaaaaaaaaaaaaaaaaaaaaaaaaaaaaaaaaaaaaaagaauu

SEQ ID NO: 34524 - RNA, 1658 nt, Artificial Sequence
  mRNA product Design i-3 (hSL-A64-N5) comprising derived and/or modified sequence from LASV(G1442-SLE-2011;Clade IV)__AIT17180__GPCmut8 (opt4)
aggagaaagcuuaccaugggccagaucgugaccuucuuccaggaggugccccacgugaucgaggaggugaugaacaucgugcugaucgcccugagcauccuggccgugcugaagggccuguacaacguggccaccugcggccugaucggccuggugaccuuccugcugcugugcggcagaagcugcaccaccacccuguacaagggcguguacgagcugcagacccuggagcugaacauggagacccugaacaugugcaugccccugagcugcaccaagaacaacagccaccacuacaucagagugggcaacgagaccggccuggagcugacccugaccaacaccagcaucaucaaccacaaguucugcaaccugagcgacgcccacaagaagaaccuguacgaccacgcccugaugagcaucaucagcaccuuccaccugagcauccccaacuucaaccaguacgaggccaugagcugcgacuucaacggcggcaagaucagcgugcaguacaaccugagccacagcuacgccggcgacgccgccaaccacugcggcaccguggccaacggcgugcugcagaccuucaugagaauggccuggggcggcagcuacaucgcccuggacagcggcagaggcaacugggacugcaucaugaccagcuaccaguaccugaucauccagaacaccaccugggacgaccacugccaguucagcagacccagccccaucggcuaccugggccugcugagccagagaaccagagacguguacaucagcagaagacugcugggcaccuucaccuggacccugagcgacagcgagggcaaggacacccccggcggcuacugccugaccagauggaugcugaucgaggccgagcugaagugcuucggcaacaccgccguggccaagugcaacgagaagcacgacgaggaguucugcgacaugcugagacuguucgacuucugcaagcaggccauccagagacugaaggcccccgcccagaugagcauccagcugaucaacaaggccgugaacgcccugaucaacgaccagcugaucaugaagaaccaccugagagacaucaugggcauccccuacugcaacuacagcaaguacugcuaccugaacaacaccgccaccggcaagaccagccugcccaagugcugccugaucagcaacggcagcuaccugaacgagacccacuucagcgacgacaucgagcaggaggccgacaacaugaucaccgagaugcugcagaaggaguacauggagagacagggcaagaccccccugggccugguggaccuguucguguucagcaccagcuucuaccugaucagcaucuuccugcaccuggugaagauccccacccacagacacaucgugggcaagagcugccccaagccccacagacugaaccacaugggcaucugcagcugcggccuguacaagcagcccggcgugcccgugagauggaagagaugaggacuaguuauaagacugacuagcccgaugggccucccaacgggcccuccuccccuccuugcaccgagauuaaucaaaggcucuuuucagagccaccaaaaaaaaaaaaaaaaaaaaaaaaaaaaaaaaaaaaaaaaaaaaaaaaaaaaaaaaaaaaaaaaagaauu

SEQ ID NO: 34525 - RNA, 1658 nt, Artificial Sequence
  mRNA product Design i-3 (hSL-A64-N5) comprising derived and/or modified sequence from LASV(G3010-SLE-2013;Clade IV)__AIT17344__GPCmut8 (opt4)
aggagaaagcuuaccaugggccagaucgugaccuucuuccaggaggugccccacgugaucgaggaggugaugaacaucgugcugaucgcccugagcauccuggccgugcugaagggccuguacaacuucgccaccugcggccuggugggccuggugaccuuccugcugcugugcggcagaagcugcaccaccagccuguacaagggcguguacgagcugcagacccuggagcugaacauggagacccugaacaugugcaugccccugagcugcaccaagaacaacagccaccacuacaucauggugggcaacgagaccggccuggagcugacccugaccaacaccagcaucaucaaccacaaguucugcaaccugagcgacgcccacaagaagaaccuguacaaccacgcccugaugagcaucaucagcaccuuccaccugagcauccccaacuucaaccaguacgaggccaugagcugcgacuucaacggcggcaagaucagcgugcaguacaaccugagccacagcuacgccggcgacgccgccagccacugcggcaccguggccaacggcgugcugcagaccuucaugagaauggccuggggcggcagcuacaucgcccuggacagcggcuacggcaagugggacugcaucaugaccagcuaccaguaccugaucauccagaacaccaccugggaggaccacugccaguucagcagacccagccccaucggcuaccugggccugcugagccagagaaccagagacaucuacaucagcagaagacugcugggcaccuucaccuggacccugagcgacagcgagggcaaggacacccccggcggcuacugccugaccagauggaugcugaucgaggccgagcugaagugcuucggcaacaccgccguggccaagugcaacgagaagcacgacgaggaguucugcgacaugcugagacuguucgacuucugcaagcaggccauccagagacugaagacccccgcccagaugagcauccagcugaucaacaaggccgugaacgcccugaucaacgaccagcugaucaugaagaaccaccugagagacaucaugggcauccccuacugcaacuacagcaaguacugcuaccugaaccacaccaccaccggcaagaccagccugcccaagugcugccuggugagcaacggcagcuaccugaacgagacccacuucagcgacgacaucgagcagcaggccgacaacaugaucaccgagaugcugcagaaggaguacauggagagacagggcaagaccccccugggccugguggaccuguucguguucagcaccagcuucuaccugaucagcaucuuccugcaccuggugaagauccccacccacagacacaucgugggcaagagcugccccaagccccacagacugaaccacaugggcaucugcagcugcggccuguacaagcagcccggcgugcccgugagauggaagagaugaggacuaguuauaagacugacuagcccgaugggccucccaacgggcccuccuccccuccuugcaccgagauuaaucaaaggcucuuuucagagccaccaaaaaaaaaaaaaaaaaaaaaaaaaaaaaaaaaaaaaaaaaaaaaaaaaaaaaaaaaaaaaaaaagaauu

SEQ ID NO: 34526 - RNA, 1658 nt, Artificial Sequence
  mRNA product Design i-3 (hSL-A64-N5) comprising derived and/or modified sequence from LASV(G502-SLE-2009;Clade IV)__AIT17126__GPCmut8 (opt4)
aggagaaagcuuaccaugggccagaucgugaccuucuuccaggaggugccccacgugaucgaggaggugaugaacaucgugcugaucgcccugagcauccuggccgugcugaagggccuguacaacuucgccaccugcggccuggugggccugcugaccuuccugcugcugugcggcagaagcugcaccaccggccuguacaagggcguguacgagcugcagacccuggagcugaacauggagacccugaacaugugcaugccccugagcugcaccaagaacaacagccaccacuacaucauggugggcaacgagaccggccuggagcugacccugaccaacaccagcaucaucaaccacaaguucugcaaccugagcgacgcccacaagaagaaccuguacgaccacgcccugaugagcaucaucagcaccuuccaccugagcauccccaacuucaaccaguacgaggccaugagcugcgacuucaacggcggcaagaucagcgugcaguacaaccugagccacagcuacgccggcgacgccgccgaccacugcggcaccguggccaacggcgugcugcagaccuucaugagaauggccuggggcggcagcuacaucgcccuggacagcggcagaggcagaugggacugcaucaugaccagcuaccaguaccugaucauccagaacaccaccugggaggaccacugccaguucagcagacccagccccaucggcuaccugggccugcugagccagagaaccagagacaucuacaucagcagaagacugcugggcaccuucaccuggacccugagcgacagcgagggcaaggacacccccggcggcuacugccugaccagauggaugcugaucgaggccgagcugaagugcuucggcaacaccgccguggccaagugcaacgagaagcacgacgaggaguucugcgacaugcugagacuguucgacuucugcaagcaggccauccagagacugaaggcccccgcccagaugagcauccagcugaucaacaaggccgugaacgcccugaucaacgaccagcuggugaugaagaaccaccugagagacaucaugggcauccccuacugcaacuacagcagauacugcuaccugaaccacaccaccaccggcagaaccagccugcccaagugcugccuggugagcaacggcagcuaccugaacgagacccacuucagcgacgacaucgagcagcaggccgacaacaugaucaccgagaugcugcagaaggaguacauggagagacagggcaagaccccccugggccugguggaccuguucguguucagcaccagcuucuaccugaucagcaucuuccugcaccuggugaagauccccacccacagacacaucgugggcaagagcugccccaagccccacagacugaaccacaugggcaucugcagcugcggccuguacaagcagcccggcgugcccgugaaguggaagagaugaggacuaguuauaagacugacuagcccgaugggccucccaacgggcccuccuccccuccuugcaccgagauuaaucaaaggcucuuuucagagccaccaaaaaaaaaaaaaaaaaaaaaaaaaaaaaaaaaaaaaaaaaaaaaaaaaaaaaaaaaaaaaaaaagaauu

SEQ ID NO: 34527 - RNA, 1658 nt, Artificial Sequence
  mRNA product Design i-3 (hSL-A64-N5) comprising derived and/or modified sequence from LASV(G733-SLE-2010;Clade IV)__AIT17154__GPCmut8 (opt4)
aggagaaagcuuaccaugggccagaucgugaccuucuuccaggaggugccccacgugaucgaggaggugaugaacaucgugcugaucgcccugagcauccuggccgugcugaagggccuguacaacuucgccaccugcggcaucgugggccuggugagcuuccugcugcugugcggcagaagcugcaccaccagccuguacaagggcguguacgagcugcagacccuggagcugaacauggagacccugaacaugugcaugccccugagcugcaccaagaacaacagccaccacuacaucauggugggcaacgagaccggccuggagcugacccugaccaacaccagcaucaucaaccacaaguucugcaaccugagcgacgcccacaagaagaaccuguacgaccacgcccugaugagcaucaucagcaccuuccaccugagcauccccaacuucaaccaguacgaggccaugagcugcgacuucaacggcggcaagaucagcgugcaguacaaccugagccacagcuacgccggcgacgccgccaaccacugcggcaccaucgccaacggcgugcugcagaccuucaugagaauggccuggggcggcagcuacaucgcccuggacagcggcagagacagaugggacugcaucaugaccagcuaccaguaccugaucauccagaacaccaccugggaggaccacugccaguucagcagacccagccccaucggcuaccugggccugcugagccagagaaccagagacaucuacaucagcagaagacugcugggcaccuucaccuggacccugagcgacagcgagggcaaggacacccccggcggcuacugccugaccagauggaugcugaucgaggccgagcugaagugcuucggcaacaccgccguggccaagugcaacgagaagcacgacgaggaguucugcgacaugcugagacuguucgacuucugcaagcaggccauccagagacugaaggcccccgcccagaugagcauccagcugaucaacaaggccgugaacgcccugaucaacgaccagcugaucaugaagaaccaccugagagacaucaugggcauccccuacugcaacuacagcaaguacugcuaccugaaccacaccaccaccggcaagaccagccugcccaagugcugccuggugagcaacggcagcuaccugaacgagacccacuucagcgacgacaucgagcagcaggccgacaacaugaucaccgagaugcugcagaaggaguacauggagagacagggcaagaccccccugggccugguggaccuguucguguucagcaccagcuucuaccugaucagcaucuuccugcaccuggugaagauccccacccacagacacguggugggcaagagcugccccaagccccacagacugaaccacaugggcaucugcagcugcggccuguacggccagcccggcgugcccgugaaguggaagagaugaggacuaguuauaagacugacuagcccgaugggccucccaacgggcccuccuccccuccuugcaccgagauuaaucaaaggcucuuuucagagccaccaaaaaaaaaaaaaaaaaaaaaaaaaaaaaaaaaaaaaaaaaaaaaaaaaaaaaaaaaaaaaaaaagaauu

SEQ ID NO: 34528 - RNA, 1658 nt, Artificial Sequence
  mRNA product Design i-3 (hSL-A64-N5) comprising derived and/or modified sequence from MOPV/LASV reassortant(IGS-1;Clade IV)__AFY05576__GPCmut8 (opt4)
aggagaaagcuuaccaugggccagaucgugaccuucuuccaggaggugccccacgugaucgaggaggugaugaacaucgugcugaucgcccugagcgugcuggccgugcugaagggccuguacaacuucgccaccugcggccuggugggccuggugaccuuccugcugcugugcggcagaagcugcaccaccagccuguacaagggcguguacgagcugcagacccuggagcugaacauggagacccugaacaugugcaugccccugagcugcaccaagaacaacagccaccacuacaucauggugggcaacgagaccggccuggagcugacccugaccaacaccagcaucaucaaccacaaguucugcaaccugagcgacgcccacaagaagaaccuguacgaccacgcccugaugagcaucaucagcaccuuccaccugagcauccccaacuucaaccaguacgaggccaugagcugcgacuucaacggcggcaagaucagcgugcaguacaaccugagccacagcuacgccggcgacgccgccaaccacugcggcaccguggccaacggcgugcugcagaccuucaugagaauggccuggggcggcagcuacaucgcccuggacagcggcagaggcaacugggacugcaucaugaccagcuaccaguaccugaucauccagaacaccaccugggaggaccacugccaguucagcagacccagccccaucggcuaccugggccugcugagccagagaaccagagacaucuacaucagcagaagacugcugggcaccuucaccuggacccugagcgacagcgagggcgaggacacccccggcggcuacugccugaccagauggaugcugaucgaggccgagcugaagugcuucggcaacaccgccguggccaagugcaacgagaagcacgacgaggaguucugcgacaugcugagacuguucgacuucugcaagcaggccauccagagacugaaggcccccgcccagaugagcauccagcugaucaacaaggccgugaacgcccugaucaacgaccagcugaucaugaagaaccaccugagagacaucaugggcauccccuacugcaacuacagcaaguacugcuaccugaaccacaccaccaccggcagaaccagccugcccaagugcugccuggugagcaacggcagcuaccugaacgagacccacuucagcgacgacaucgagcagcaggccgacaacaugaucaccgagaugcugcagaaggaguacauggagagacagggcaagaccccccugggccugguggaccuguucguguucagcaccagcuucuaccugaucagcaucuuccugcaccuggugaagauccccacccacagacacaucgugggcaagagcugccccaagccccacagacugaaccacaugggcaucugcagcugcggccuguacaagcagcccggcgugcccgugaaguggaagagaugaggacuaguuauaagacugacuagcccgaugggccucccaacgggcccuccuccccuccuugcaccgagauuaaucaaaggcucuuuucagagccaccaaaaaaaaaaaaaaaaaaaaaaaaaaaaaaaaaaaaaaaaaaaaaaaaaaaaaaaaaaaaaaaaagaauu

SEQ ID NO: 34529 - RNA, 1658 nt, Artificial Sequence
  mRNA product Design i-3 (hSL-A64-N5) comprising derived and/or modified sequence from LASV(LM765-SLE-2012;Clade IV)__AIT17814__GPCmut8 (opt4)
aggagaaagcuuaccaugggccagaucgugaccuucuuccaggaggugccccacgugaucgaggaggugaugaacaucgugcugaucgcccugagcauccuggccgugcugaagggccuguacaacuucgccaccugcggccuggugggccuggugaccuuccugcugcugugcggcagaagcugcaccaccagccuguacaagggcguguacgagcugcagacccuggagcugaacauggagacccugaacaugugcaugccccugagcugcaccaagaacaacagccaccacuacaucauggugggcaacgagaccggccuggagcugacccugaccaacaccagcaucaucgaccacaaguucugcaaccugagcgacgcccacagaaagaaccuguacgaccacgcccugaugagcaucaucagcaccuuccaccugagcauccccaacuucaaccaguacgaggccaugagcugcgacuucaacggcggcaagaucagcgugcaguacaaccugagccacagcuacgccaaggacgccgccgaccacugcggcaccguggccaacggcgugcugcagaccuucaugagaauggccuggggcggcagcuacaucgcccuggacagcggcagaggcagaugggacugcaucaugaccagcuaccaguaccugaucauccagaacaccaccugggaggaccacugccaguucagcagacccagccccaucggcuaccugggccugcugagccagagaaccagagacaucuacaucagcagaagacugcugggcaccuucaccuggacccugagcgacagcgagggcaaggacacccccggcggcuacugccugaccagauggaugcugaucgaggccgagcugaagugcuucggcaacaccgccguggccaagugcaacgagaagcacgacgaggaguucugcgacaugcugagacuguucgacuucugcaagcaggccauccagagacugaaggcccccgcccagaugagcauccagcugaucaacaaggccgugaacgcccugaucaacgaccagcugaucaugaagaaccaccugagagacaucaugggcauccccuacugcaacuacagcaaguacugcuaccugaaccacaccaccaccggcaagaccagccugcccaagugcugccuggugagcaacggcagcuaccugaacgagacccacuucagcgacgacaucgagcagcaggccgacaacaugaucaccgagaugcugcagaaggaguacauggagagacagggcaagaccccccugggccugguggaccuguucguguucagcaccagcuucuaccugaucagcaucuuccugcaccuggugaagauccccacccacagacacaucgugggcaagcccugccccaagccccacagacugaaccacaugggcaucugcagcugcggccuguacaagcagcccggcgugcccgugaaguggaagagaugaggacuaguuauaagacugacuagcccgaugggccucccaacgggcccuccuccccuccuugcaccgagauuaaucaaaggcucuuuucagagccaccaaaaaaaaaaaaaaaaaaaaaaaaaaaaaaaaaaaaaaaaaaaaaaaaaaaaaaaaaaaaaaaaagaauu

SEQ ID NO: 34530 - RNA, 1658 nt, Artificial Sequence
  mRNA product Design i-3 (hSL-A64-N5) comprising derived and/or modified sequence from LASV(LM776-SLE-2012;Clade IV)__AIT17824__GPCmut8 (opt4)
aggagaaagcuuaccaugggccagaucgugaccuucuuccaggaggugccccacgugaucgaggaggugaugaacaucgugcugaucgcccugagcauccuggccgugcugaagggccuguacaacuucgccaccugcggccuggugggccuggugaccuuccugcugcugugcggcagaagcugcaccaccagcguguacaagggcguguacgagcugcagacccuggagcugaacauggagacccugaacaugugcaugccccugagcugcaccaagaacaacagccaccacuacaucauggugggcaacgagaccggccuggagcugacccugaccaacaccagcaucaucaaccacaaguucugcaaccugagcgacgcccacaagaagaaccuguacgaccacgcccugaugagcaucaucagcaccuuccaccugagcauccccaacuucaaccaguacgaggccaugagcugcgacuucaacggcggcaagaucagcgugcaguacaaccugagccacagcuacgccggcgacgccgccaaccacugcggcaccguggccaacggcgugcugcagaccuucaugagaauggccuggggcggcagcuacaucgcccuggacagcggccacggcaagugggacugcaucaugaccagcuaccaguaccugaucauccagaacaccaccugggaggaccacugccaguucagcagacccagccccaucggcuaccugggccugcugagccagagaaccagagacaucuacaucagcagaagacugcugggcaccuucaccuggacccugagcgacagcgagggcaaggacacccccggcggcuacugccugaccagauggaugcugaucgaggccgagcugaagugcuucggcaacaccgccguggccaagugcaacgagaagcacgacgaggaguucugcgacaugcugagacuguucgacuucugcaagcaggccauccagagacugaaggcccccgcccagaugagcauccagcugaucaacaaggccgugaacgcccugaucaacgaccagcugaucaugaagaaccaccugagagacaucaugggcauccccuacugcaacuacagcaaguacugcuaccugaaccacaccaccaccggcaagaccagccugcccaagugcugccuggugagcaacggcagcuaccugaacgagacccacuucagcgacgacaucgagcagcaggccgacaacaugaucaccgagaugcugcagaaggaguacauggagagacagggcaagaccccccugggccugguggaccuguucguguucagcaccagcuucuaccugaucagcaucuuccugcaccuggugaagauccccacccacagacacaucgugggcaagagcugccccaagccccacagacugaaccacaugggcaucugcagcugcggccuguacaagcagcccggcgugcccgugagauggaagagaugaggacuaguuauaagacugacuagcccgaugggccucccaacgggcccuccuccccuccuugcaccgagauuaaucaaaggcucuuuucagagccaccaaaaaaaaaaaaaaaaaaaaaaaaaaaaaaaaaaaaaaaaaaaaaaaaaaaaaaaaaaaaaaaaagaauu

SEQ ID NO: 34531 - RNA, 1658 nt, Artificial Sequence
  mRNA product Design i-3 (hSL-A64-N5) comprising derived and/or modified sequence from LASV(Mad39;Clade IV)__ANH09722__GPCmut8 (opt4)
aggagaaagcuuaccaugggccagaucgugaccuucuuccaggaggugccccacgugaucgaggaggugaugaacaucgugcugaucgcccugagcauccuggccgugcugaagggccuguacaacguggccaccugcggccugaucggccuggugaccuuccugcugcugugcggcagaagcugcaccaccacccuguacaagggcguguacgagcugcaggcccuggagcugaacauggagacccugaacaugugcaugccccugagcugcaccaagaacaacagccaccacuacaucagagugggcaacgagaccggccuggagcugacccugaccaacaccagccugaucaaccacaaguucugcaaccugagcgacgcccacaagaagaaccuguacgaccacgcccugaugagcaucaucagcaccuuccaccugagcauccccaacuucaaccaguacgaggccaugagcugcgacuucaacgacggcaagaucagcgugcaguacaaccugagccacaccuacgccggcgacaccgccaaccacugcggcaccguggccaacggcgugcugcagaccuucaugagaauggccuggggcggcagcuacaucgcccuggacagcggcagaggcggcugggacugcaucaugaccagcuaccaguaccugaucauccagaacaccaccugggaggaccacugccaguucagcagacccagccccaucggcuaccugggccugcugagccagagaaccagagacaucuacaucagcagaagacugcugggcaccuucaccuggacccugagcgacagcgagggcaaggacacccccggcggcuacugccugaccagauggaugcugaucgaggccgagcugaagugcuucggcaacaccgccguggccaagugcaacgagaagcacgacgaggaguucugcgacaugcugagacuguucgacuucugcaagcaggccauccagagacugaaggcccccgcccagaugagcauccagcugaucaacaaggccgugaacgcccugaucaacgaccagcugaucaugaagaaccaccugagagacaucaugggcauccccuacugcaacuacagcaaguacugcuaccugaaccacaccgugaccggcaagaccagccugcccaagugcugccuggugagcaacggcagcuaccugaacgagacccacuucagcgacgacaucgagcagcaggccgacaacaugaucaccgagaugcugcagaaggaguacauggagagacagggcaagaccccccugggccugguggaccuguucguguucagcaccagcuucuaccugaucagcaucuuccugcaccuggugaagauccccacccacagacacguggugggcaagcccugccccaagccccacagacugaaccacaugggcaucugcagcugcggcuucuacaagcagcccggcgugcccgugagauggaagagaugaggacuaguuauaagacugacuagcccgaugggccucccaacgggcccuccuccccuccuugcaccgagauuaaucaaaggcucuuuucagagccaccaaaaaaaaaaaaaaaaaaaaaaaaaaaaaaaaaaaaaaaaaaaaaaaaaaaaaaaaaaaaaaaaagaauu

SEQ ID NO: 34532 - RNA, 1658 nt, Artificial Sequence
  mRNA product Design i-3 (hSL-A64-N5) comprising derived and/or modified sequence from LASV(Z0947-SLE-2011;Clade IV)__AIT17840__GPCmut8 (opt4)
aggagaaagcuuaccaugggccagaucgugaccuucuuccaggaggugccccacgugaucgaggaggugaugaacaucgugcugaucgcccugagcauccuggccgugcugaagggccuguacaacuucgccaccugcggccuggugggccuggugaccuuccugcugcugugcggcagaagcugcaccaucagccuguacaagggcguguacgagcugcagacccuggagcugaacauggagacccugaacaugugcaugccccugagcugcaccaagaacaacagccaccacuacaucauggugggcaacgagaccggccuggagcugacccugaccaacaccagcaucaucaaccacaaguucugcaaccugagcgacgcccacaagaagaaccuguacgaccacgcccugaugagcaucaucagcaccuuccaccugagcauccccaacuucaaccaguacgaggccaugagcugcgacuucaacggcggcaagaucagcgugcaguacaaccugagccacagcuacgccggcgacgccgccaaccacugcggcaccguggccaacggcgugcugcagaccuucaugagaauggccuggggcggcagcuacaucgcccuggacagcggcagagacagaugggacugcaucaugaccagcuaccaguaccugaucauccagaacaccaccugggaggaccacugccaguucagcagacccagccccaucggcuaccugggccugcugagccagagaaccagagacaucuacaucagcagaagacugcugggcaccuucaccuggacccugagcgacagcgagggcaaggacacccccggcggcuacugccugaccagauggaugcugaucgaggccgagcugaagugcuucggcaacaccgccguggccaagugcaacgagaagcacgacgaggaguucugcgacaugcugagacuguucgacuucugcaagcaggccauccagagacugaaggcccccgcccagaugagcauccagcugaucaacaaggccgugaacgcccugaucaacgaccagcugaucaugaagaaccaccugagagacaucaugggcauccccuacugcaacuacagcaaguacugcuaccugaaccacaccaccaccggcaagaccagccugcccaagugcugccuggugagcaacggcagcuaccugaacgagacccacuucagcgacgacaucgagcagcaggccgacaacaugaucaccgagaugcugcagaaggaguacauggagagacagggcaagaccccccugggccugguggaccuguucguguucagcaccagcuucuaccugaucagcaucuuccugcaccuggugaagauccccacccacagacacaucgugggcaagcccugccccaagccccacagacugaaccacaugggcaucugcagcugcggccuguacaagcagcccggcgugcccgugaaguggaagagaugaggacuaguuauaagacugacuagcccgaugggccucccaacgggcccuccuccccuccuugcaccgagauuaaucaaaggcucuuuucagagccaccaaaaaaaaaaaaaaaaaaaaaaaaaaaaaaaaaaaaaaaaaaaaaaaaaaaaaaaaaaaaaaaaagaauu

SEQ ID NO: 34533 - RNA, 1658 nt, Artificial Sequence
  mRNA product Design i-3 (hSL-A64-N5) comprising derived and/or modified sequence from LASV(Josiah;Clade IV)__NP_694870__GPCmut8 (opt5)
aggagaaagcuuaccaugggccagaucgugaccuucuuucaagaggucccccacguuauugaagaggugaugaacaucgugcugauugcccucagcguccuggcugugcuuaaggggcuguacaauuucgccacaugcggacucguuggccuggugacguuucuucugcucugugggagauccugcaccacaucucuguauaaaggagucuacgaacugcagacccucgagcugaacauggaaacacuuaauauguguaugccucugagcugcaccaagaacaauucccaucacuauaucauggugggcaacgagacagggcucgagcugacccuuacgaauaccucuauuaucaaccauaaauucuguaaucugagcgacgcgcacaagaaaaaccucuacgaucaugcucugauguccaucauuucuacauuucaccugagcaucccgaauuucaaccaguaugaagccauguccugcgacuuuaauggaggcaagauuagcguucaguacaaccucucucacuccuaugccggcgaugcugccaaucauugugggaccguggcuaacggaguccugcaaacauucaugcggauggccuggggcgggagcuacaucgcgcuugacucuggacgcggcaacugggauugcauuaugaccuccuaccaguaucugaucauucagaauacgacaugggaggaccacugucaguuuagcagacccucuccuaucggguaccucggacugcuuucccaacggacccgcgauaucuauauuagcagacggcugcucggcacauucaccuggacccuguccgacucugaaggcaaggauacacccgggggauacugccugacgcgcuggaugcucaucgaggccgagcugaaauguuuuggcaacaccgcuguggccaagugcaaugaaaaacaugacgaggaguucugcgauaugcuuagacuguuugacuucuguaagcaggcuauucagcggcucaaagccccugcgcagaugagcauccaacugauuaacaaggccgugaaugcucuuaucaacgaucagcugaucaugaagaaucaccuccgcgacauuauggggauccccuauugcaacuacuccaaauauuguuaccugaaucacacaaccacaggaagaaccagccugccuaagugcugucucgucucuaacggcuccuaccugaaugaaacgcauuucagcgacgauauugaacagcaagccgacaacaugaucacagagaugcuucagaaagaguauauggaacggcaggggaagaccccgcugggacucguugaucuguuuguguucucuaccagcuuuuaccugauuuccaucuuccuucaccucgugaaaauccccacacaucgccacauugucggcaagucuugcccuaaaccccauagacugaaucacaugggcaucuguagcugcgggcuguauaagcagccuggagugcccguuaaguggaaacggugaggacuaguuauaagacugacuagcccgaugggccucccaacgggcccuccuccccuccuugcaccgagauuaaucaaaggcucuuuucagagccaccaaaaaaaaaaaaaaaaaaaaaaaaaaaaaaaaaaaaaaaaaaaaaaaaaaaaaaaaaaaaaaaaagaauu

SEQ ID NO: 34534 - RNA, 1655 nt, Artificial Sequence
  mRNA product Design i-3 (hSL-A64-N5) comprising derived and/or modified sequence from LASV(LP;Clade I)__AAF86701__GPCmut8 (opt5)
aggagaaagcuuaccaugggccagaucauuaccuucuuucaagaggugccccacgucaucgaagagguuaugaacauugugcugaucgcccucagccugcuugcuauucugaaggggcucuacaauaucgccacaugcggaaucauuggccugguggcguuccuuuuucugugugggaaauccugcucucucacgcugaagggaggcuaugaacugcagacccucgagcugaacauggaaacacuuaauauguguaugccucugagcugcaccaaaaacuccucucaucacuacaucagagucgggaaugagacaggacucgagcugacccuuacaaacaccagcauuaucaaucauaaguucuguaaccuguccgacgcucacaaaaagaaucucuaugaucaugcccugaugucuauuaucagcacguuucaccuguccauuccgaacuucaaucaguacgaagccaugagcugcgacuuuaacggcggcaagaucucugugcaguauaaucucucccacagcuacgcuggggaugccgcugagcauuguggaaccguugccaacggcgugcugcaaacauucaugcggauggcguggggagggcgcuauaucgcccuugacucuggcaaagggaauugggauugcauuaugaccuccuaccaguaccugaucauucagaacacaaccugggaagaccacugucaguuuagcagacccucuccuaucggauaucucggccugcuuucccaacggacgcgcgauauuuacaucagcagacggcugcucggcacauucaccuggacacuguccgacucugaggggaacgagacccccggaggcuauugccugacccgcuggaugcucaucgaagcugagcugaaguguuuugggaauacagccgucgcuaaaugcaacgaaaagcaugaugaggaguucugcgacaugcuuagacuguuugauuucuguaaacaggccauucggcgccucaaggcgccugcccagaugagcauccagcugauuaauaaggcugugaacgcccuuaucaaugaccaacugauuaugaaaaaccaccucagagauaucaugggaauccccuacugcaauuauuccaaguacuguuaucugaaccacacgagcucuggccggaccucccugccuaaaugcugucucauuagcaaugggucuuaccugaacgaaacacaguucagcgacgacaucgagcagcaagcugauaauaugauuaccgaaaugcuucagaaggaguacaucgaacgccagggaaaaacaccgcugggccucguugacauuuuuaucuucuccaccucuuuuuaucugauuagcaucuuccugcaucuuaucaagauucccacgcacagacauaucgugggcaaaccuugccccaagccucaccggcucaaccauaugggggucuguuccugcggacuguacaagcaccccggcgugccgacaaaauggaagcgcugaggacuaguuauaagacugacuagcccgaugggccucccaacgggcccuccuccccuccuugcaccgagauuaaucaaaggcucuuuucagagccaccaaaaaaaaaaaaaaaaaaaaaaaaaaaaaaaaaaaaaaaaaaaaaaaaaaaaaaaaaaaaaaaaagaauu

SEQ ID NO: 34535 - RNA, 1655 nt, Artificial Sequence
  mRNA product Design i-3 (hSL-A64-N5) comprising derived and/or modified sequence from LASV(803213;Clade II)__AAF86703__GPCmut8 (opt5)
aggagaaagcuuaccaugggccagaucauuaccuucuuucaagaggugccccacgucaucgaagagguuaugaacauugugcugaucgcccucagccugcuugcuauucugaaggggaucuacaauguggccacaugcggacucuucggccugaucuccuuucuucugcucugugggagaucuugcagcgucacguauaaaggaguguacgaacugcagacccuggagcucaacauggcgaaucugaacauguguaugccucuuuccugcacaaagaauaacucucaucacuauauuaugguuggcaaugaaaccgggcuggagcucacacugaccaacacaagcaucauuaaucauaaauucuguaaccuuuccgacgcucacaagaaaaaucuguacgaucaugcccucaugucuaucauuagcaccuuucaccuguccaucccgaacuucaaucaguaugaggccaugagcugcgacuuuaacggaggcaagauuucugugcaguacaaucugucccacagcuucgcugucgaugccgcuaaccauuguggcacgaucgccaacggggugcuccaaaccuuuaugcggauggcguggggaggcucuuauaucgcccuggacuccgggaagggaaauugggauugcauuaugacaagcuaccaguaccuuaucauucagaacaccacaugggaagaccacugucaguucucucgccccuccccuaucggcuaucuggggcuccugagccaaagaacccgggauauuuacaucucccgcagacuucugggaacguuuacauggacccucucugacagcgagggcaaugaagcucccggcggguauugccugacacgguggaugcugaucgaggccgagcucaaauguuucggaaacaccgcuguugccaagugcaaugaaaaacaugaugaggaauuuugcgacaugcugcgccuuuucgauuucuguaagcaggcgauuaaaagacugaagaccccugcccagauguccauccagcucauuaacaaggcugugaaugcccugaucaacgaccaacuuauuaugaaaaaucaucugcgggauaucaugggcauccccuacugcaacuauagccgcuacuguuaucucaaucacacagucacggggaagaccucucugccuagaugcugucugguguccaacggaagcuaccucaaugagacacacuuuucugacgacauugaacagcaggcugauaacaugaucaccgagaugcugcaaaaagaguacauggaccggcagggcaagacaccgcuugggcugguggaucucuucgucuuuagcaccuccuucuaucugauuucuaucuuucugcaccuuguuaaaauucccacgcaucgccacaucgugggaaagccuugccccaaaccucauagacucaaucacaugggcauuuguagcugcggccuguacaagcaccccggggugccggucaaguggaaacggugaggacuaguuauaagacugacuagcccgaugggccucccaacgggcccuccuccccuccuugcaccgagauuaaucaaaggcucuuuucagagccaccaaaaaaaaaaaaaaaaaaaaaaaaaaaaaaaaaaaaaaaaaaaaaaaaaaaaaaaaaaaaaaaaagaauu

SEQ ID NO: 34536 - RNA, 1655 nt, Artificial Sequence
  mRNA product Design i-3 (hSL-A64-N5) comprising derived and/or modified sequence from LASV(GA391;Clade III)__CAA36645__GPCmut8 (opt5)
aggagaaagcuuaccaugggccagaucgugaccuucuuucaagaggucccccacguuauugaagaggugaugaacaucgugcugauugcccucagcauccuggcuauucuuaaggggcuguacaaugucgccacaugcggacucaucggccuggugacguuccuucugcucuccgggagaucuuguagccugaucuauaaaggaaccuacgaacugcagacacucgagcugaacauggaaacccuuaauaugugcaugccucuguccuguacaaagaacaauucucaucacuauauucggguuggcaacgagaccgggcucgagcugacacuuaccaauacgagcauccugaaccauaaauuuugcaaucucuccgacgcgcacaagcgcaaccuguacgaucauucucugaugagcauuaucuccaccuuccaccucagcauuccgaauuuuaaccaguaugaagcuaugucuugugacuucaauggaggcaaaaucacagugcaguacaaccugucccacagcuuugccgucgaugccgcuggccauugcgggacccuugccaauggagugcugcaaacauucaugagaauggcuuggggcgggucuuauauugcccucgacuccggacggggcaacugggauuguaucaugaccagcuaccaguaccugaucauucagaacacgacaugggacgaucacugccaguuuucucgccccuccccuaucggguaucuuggacugcucagccaaagaacccgggacauuuacaucucccgcagacugcugggcacauucaccuggacccucucugauagcgagggcaaugaaacacccgggggauauugucugacgcgguggaugcuuauugaggcggagcugaagugcuuuggcaacaccgccguugcuaaguguaaugaaaaacaugacgaggaguucugcgauaugcuccgccuguuugacuucugcaagcaggccaucagacggcuuaaaaccccugcucagauguccauccagcugauuaacaaggccgugaaugcgcucaucaacgaucaacugauuaugaaaaaucaucugcgcgacaucauggggauucccuacuguaacuauagcagauacugcuaucucaaucacacaucuacaggaaagaccucccugccucgguguugccuuaucagcaacggcucuuaccugaaugaaacgaaguucagcgacgauaucgaacagcaggccgacaacaugauuacagagaugcuccaaaaagaguacaucgaucgccaggggaagaccccgcugggacuggucgaccuuuuuguguucuccaccucuuuuuaucucauuagcaucuuccugcaccuggugaaaauucccacacacagacauaucgucggcaagccuugucccaaaccucaccggcucaaucauaugggcauuugcuccugugggcuguacaagcagcccggaguuccggugagauggaaacgcugaggacuaguuauaagacugacuagcccgaugggccucccaacgggcccuccuccccuccuugcaccgagauuaaucaaaggcucuuuucagagccaccaaaaaaaaaaaaaaaaaaaaaaaaaaaaaaaaaaaaaaaaaaaaaaaaaaaaaaaaaaaaaaaaagaauu

SEQ ID NO: 34537 - RNA, 1658 nt, Artificial Sequence
  mRNA product Design i-3 (hSL-A64-N5) comprising derived and/or modified sequence from LASV(AV;Clade V)__CCA30314__GPCmut8 (opt5)
aggagaaagcuuaccaugggccagaucgugaccuucuuucaagaggucccccacguuauugaagaggugaugaacaucgugcugauugcccucagcauccuggcuguccuuaaggggcuguacaauauugccacaugcggacucaucggccugaucacguuccuucugcucugugggagauccugcucuagcaaccuguauaaaggaguguacgaacugcagucccucgaccugaauauggagacccuuaacauguguaugccucugucuugcacaaagaauaacagccaucacuauauucggguuggcaaugauaccgggcucgaacugacacuuaccaacacauccauccugaaucauaaauuuuguaaccucucugacgcgcacaagaaagaucuguacgaccaugcucugaugagcauuaucuccaccuuccaccucagcauuccgaauuuuaaccaguaugaggccaugucuugcgauuucaauggaggcaagaucuccgugcaguacaaccugagccacucuuaugccauugacgcugccaaucauuguggcacggucgcuaacgggauccuucaaaccuuuaugcgcauggccuggggaggcuccuacaucgcgcuggauagcgggagaggaaacugggacugcauuaugacaucuuaccaguaucucaucauucagaauaccacaugggagaaccacugucaguucucccggcccagcccuaucggcuaccuggggcuucugucccaacgcaccagagauauuuauaucucucggcgccuccugggaacguuuacauggacccugagcgacuccgaaggcaaugccacacccggcggguacugccucaccagauggaugcugaucgaggcugaacuuaaguguuucggaaacaccgccguggcuaaaugcaaugagaagcaugaugaggaauuuugcgacaugcugcgccucuucgauuuuuguaaacaggccauuagccggcugaagucuccugcgcagauguccauccagcuuauuaacaaagccguuaaugcucugaucaacgaccaacucauuaugaagaaucaccugagagacaucaugggcauccccuauugcaacuacagcaaguauuguuaccugaaucacacaauuacggggaaaaccucucucccuaagugcugucuggugagcaacggauccuaccuuaaugagacacauuucucugaugacaucgaacagcaggccgauaacaugauuaccgagaugcugcaaaaagaauauauggagcggcagggcaagacaccgcucgggcuggucgaccuguucguguuuagcaccuccuucuaccuuaucagcauuuuucuccgccuggugaaaauccccacgcacagacauauugucggaaagccuugccccaaaccucaccggcugaaucauaugggcaucuguucuugcggccucuauaagcagcccgggguuccggugcgcuggaagagaugaggacuaguuauaagacugacuagcccgaugggccucccaacgggcccuccuccccuccuugcaccgagauuaaucaaaggcucuuuucagagccaccaaaaaaaaaaaaaaaaaaaaaaaaaaaaaaaaaaaaaaaaaaaaaaaaaaaaaaaaaaaaaaaaagaauu

SEQ ID NO: 34538 - RNA, 1655 nt, Artificial Sequence
  mRNA product Design i-3 (hSL-A64-N5) comprising derived and/or modified sequence from LASV(Togo/2016/7082;Clade VI)__AMR44577__GPCmut8 (opt5)
aggagaaagcuuaccaugggccagaucauuaccuucuuucaagaggugccccacgucaucgaagagguuaugaacauugugcugaucgcccucagccugcuugcuauucugaaggggguguacaaugucgccacaugcggaaucaucggccucgugacguuccuguuucuuugugggagauccugcucucugauuuauaaaggaagcuacgaacuccagacccuggagcugaacauggaaacacucaauauguguaugccucuguccugcaccaagaacucuagccaucacuauauccggguuggcaaugagacagggcuugagcugacccucacaaacaccuccauuaucaaucauaaauucuguaaccugucugacgcgcacaagcgcaaucuuuacgaucaugcucugaugagcauucucuccacguuucaccugagcaucccgaacuucaaucaguaugaagccaugucuugcgacuuuaacggaggcaaaauuuccgugcaguacaaucugagccacgccuaugcugucgaugccgcugagcauuguggcaccguggccaacgggguucuccaaacauucaugagaauggcguggggaggcucuuacaucgcccuggacuccgggcggggaaauugggauugcaucaugaccagcuaccaguaucuuauuauccagaacacaaccugggaagaccacugucaguuuucucgccccuccccuauuggcuaccuggggcuccugagccaaagaacgcgggauaucuauauuucccgcagacuucugggaacauucaccuggacacucucugacagcgagggcaacgagacccccggcggguacugccugacccgguggaugcugaucgaagcugagcucaaguguuuuggaaauacagccguggcuaagugcaacgaaaaacaugaugaggaguucugcgacaugcugcgccuuuuugauuucuguaagcaggccauccagagacugaaauccccugcgcagaugagcauucaacucaucaauaaggccgucaacgcucugauuaaugaccagcuuaucaugaaaaaccaucugcgggauaugaugggcauucccuauugcaauuacucuaaguauuguuaccucaaccacacguccagcgggcgcaccucucugccuaagugcugucuggugagcaauggauccuaccucaacgaaacacacuucucugacgacaucgagcagcaagccgauaauaugaucaccgaaaugcugcagaaagaguauauugacagacagggcaagacaccgcuugggcugguggaucucuuugucuucagcaccuccuuuuaccugaucagcauuuuccugcaccuuaucaaaauucccacgcaucggcacaucguuggaaagccuugccccaaaccucaucgccucaaccacaugggcauuuguucuugcggccuguauaagcagcccggggugccgacaagauggaaacggugaggacuaguuauaagacugacuagcccgaugggccucccaacgggcccuccuccccuccuugcaccgagauuaaucaaaggcucuuuucagagccaccaaaaaaaaaaaaaaaaaaaaaaaaaaaaaaaaaaaaaaaaaaaaaaaaaaaaaaaaaaaaaaaaagaauu

SEQ ID NO: 34539 - RNA, 1655 nt, Artificial Sequence
  mRNA product Design i-3 (hSL-A64-N5) comprising derived and/or modified sequence from LASV(KAK-428;Clade n.d. (VII))__ANH09740__GPCmut8 (opt5)
aggagaaagcuuaccaugggccagaucgugaccuucuuucaagaggucccccacguuauugaagaggugaugaacaucgugcugauugcccucagccugcuugcuauccugaaggggcucuacaauuucgccacaugcggagucauuggccugaucacguuucuucugcucugugggagauccugcucugcgaccuauaaaggacaguacgaacugcagacacuggagcucaacauggaaagccugaauauguguaugccucuuuccugcaccaagaacaauucucaucacuauauccgggcuggcaacaauacagggcuggagcucacccugacaaacaccagcauuaucucccauaaauucuguaaucuuucugacgcccacaagaaaaaccuguacgaucauacgcucaugagcauuaucaccacauuucaccuguccauuccgaauuucaaccaguaugaggccaugagcugcgacuuuaauggaggcaagaucucuauucaauacaaccugucccacagcuaugcuggcgaugccgcucagcauugugggaccguggccaauggaguucuccagacauucaugcgcauggcguggggcgggucuuaccuggcccuugacuccggaagacggggcugggauugcaucaucagcucuuaccaguaucugauuauccaaaacaccacgugggacgaucacugucaguuuucccgccccagcccuauuggguaccucggauucgugucccagaagacaagagacaucuauauuucucggcgccugcuuggcaccuuuacauggacccugagcgauuccgaaggccaugacaugcccgggggauacugccucaccagauggaugcugaucgaggcugaucugaaauguuucggcaacacagccgucgcuaagugcaaugaaaaacacgacgaggaguuuugcgauauguggcgccucuucgacuucuguaagcaggccauccaacggcugaaagcgccugcccagaugaacauucagcuuaucaauaaggcugugaacgcccugauuaaugaccaacucaugaugaagaaccaccugagagauaucauggggauucccuauugcaauuacagcaaauuuuguuaucuuaacaauacgaccacaggacggaccucucugccucgcugcugucucaucuccaacggcagcuaccugaaugaaacacauuucucugacgauaucgagcagcaggcugacaacaugauuaccgaaaugcugcagaaggaguacauggauagacaagggaaaacgccgcucggacugguugaccuuuuuguguucagcacauccuuuuaucugaucaccauuuuccuccaccuggucaagauccccacccaucggcacauugugggcaaaccuugccccaagccucaucgccugaaucacaugggcaucuguucuugcgggcuuuacaaacagcccggagugccggucagauggaagcggugaggacuaguuauaagacugacuagcccgaugggccucccaacgggcccuccuccccuccuugcaccgagauuaaucaaaggcucuuuucagagccaccaaaaaaaaaaaaaaaaaaaaaaaaaaaaaaaaaaaaaaaaaaaaaaaaaaaaaaaaaaaaaaaaagaauu

SEQ ID NO: 34540 - RNA, 1655 nt, Artificial Sequence; identical to SEQ ID NO: 34534
  mRNA product Design i-3 (hSL-A64-N5) comprising derived and/or modified sequence from LASV(Pinneo-NIG-1969;Clade I)__AIT17836__GPCmut8 (opt5)

SEQ ID NO: 34541 - RNA, 1655 nt, Artificial Sequence
  mRNA product Design i-3 (hSL-A64-N5) comprising derived and/or modified sequence from LASV(ISTH0009-NIG-2011;Clade II)__AIT17404__GPCmut8 (opt5)
aggagaaagcuuaccaugggccagaucauuaccuucuuucaagaggugccccacgucaucgaagagguuaugaacauugugcugaucgcccucagccugcuugcuauucugaaggggaucuacaauguggccacaugcggacucuucggccuggucuccuuucuucugcucugugggagaucuugcagcacgaccuauaaaggaguguacgaacugcagacacuggagcucgacauggcgucccugaacauguguaugccucuuucuugcaccaagaauaacagccaucacuauaucaugguuggcaaugaaacagggcuggagcucacccugacaaacaccuccauuaucaaucauaaauucuguaaccuuucugaugcucacaagaaaaaucuguacgaccaugcccucaugagcauuaucuccacguuucaccugagcauuccgaacuucaaucaguaugaggccaugucuugcgauuuuaacggaggcaagaucuccgugcaguacaaucugagccacgcuuaugccgucgacgcugccaaccauuguggcaccauugcgaauggggugcuccaaacauucaugcggauggccuggggaggcucuuacaucgcucuggauuccgggaagggaagcugggacugcaucaugaccucuuaccaguaucuuauuauccagaacacaaccugggaagaucacugucaguuuucccgccccagcccuauuggcuaccuggggcuccugucccaaagaacgcgggacaucuauauuucucgcagacuucugggaacauucaccuggacacucagcgauuccgagggcaacgaaacccccggcggguacugccugacccgguggaugcugaucgaggccgagcucaaauguuuuggaaauacagcuguugccaagugcaacgaaaaacaugacgaggaguucugcgauaugcugcgccuuuuugacuucuguaagcaggcgaucagacggcugaaaacgccugcccagaugagcauucagcucaucaauaaggcugugaacgcccugauuaaugaucaacuuaucaugaagaaccaucugcgcgacauuaugggcauccccuauugcaauuacucuaaauauuguuaccucaaccacaccgucacagggaagaccucccugccuagaugcugucuggugagcaauggaucuuaccucaacgaaacacacuucagcgacgauaucgaacagcaggcugacaauaugauuaccgagcugcuucaaaaagaguauauggaucggcagggcaagacgccgcuggggcucguggaccuguuugucuucuccacaucuuuuuaccugaucagcauuuuccuucaccucaucaaaauucccacccaucgccacaucaccggaaagccuugccccaaaccucauagacugaaccacaugggcauuuguuccugcggccuguauaagcaccccgggguuccggugaaguggaaacggugaggacuaguuauaagacugacuagcccgaugggccucccaacgggcccuccuccccuccuugcaccgagauuaaucaaaggcucuuuucagagccaccaaaaaaaaaaaaaaaaaaaaaaaaaaaaaaaaaaaaaaaaaaaaaaaaaaaaaaaaaaaaaaaaagaauu

SEQ ID NO: 34542 - RNA, 1655 nt, Artificial Sequence
  mRNA product Design i-3 (hSL-A64-N5) comprising derived and/or modified sequence from LASV(ISTH2010-NIG-2012;Clade II)__AIT17482__GPCmut8 (opt5)
aggagaaagcuuaccaugggccagaucauuaccuucuuucaagaggugccccacgucaucgaagagguuaugaacauugugcugaucgcccucagccugcuugcuauucugaaggggaucuacaauguggccacaugcggacucuucggccuggucuccuuucuucugcucugugggagaucuugcagcacgaccuauaaaggaguguacgaacugcagacacuggagcucgacauggcgucccugaacauguguaugccucuuucuugcaccaagaauaacagccaucacuauaucaugguuggcaaugaaacagggcuggagcucacccugacaaacaccuccauuaucaaucauaaauucuguaaccuuucugaugcucacaagaaaaaucuguacgaccaugcccucaugagcauuaucuccacguuucaccugagcauuccgaacuucaaucaguaugaggccaugucuugcgauuuuaacggaggcaagaucuccgugcaguacaaucugagccacgcuuaugccgucgacgcugccaaccauuguggcaccauugcgaauggggugcuccaaacauucaugcggauggccuggggaggcucuuacaucgcucuggauuccgggaagggaagcugggacugcaucaugaccucuuaccaguaucuuauuauccagaacauuacaugggaagaucacugucaguuuucccgccccagcccuaucggcuaccuggggcuccugucccaaagaacccgggacauuuauaucucucgcagacuucugggaacguucacauggacccucagcgauuccgagggcaacgaaacacccggcggguacugccugacccgguggaugcugaucgaggccgagcucaaauguuuuggaaauaccgcuguugccaagugcaacgaaaaacaugacgaggaguucugcgauaugcugcgccuuuuugacuucuguaagcaggcgauuagacggcugaaaacgccugcccagaugagcauccagcucauuaauaaggcugugaacgcccugaucaaugaucaacuuauuaugaagaaccaucugcgcgacaucaugggcauccccuauugcaauuacucuaaauauuguuaccucaaccacacagucaccgggaagacaucccugccuagaugcugucuggugagcaauggaucuuaccucaacgaaacccacuucagcgacgauauugaacagcaggcugacaauaugaucacagagcugcuucaaaaagaguauauugaucggcagggcaagaccccgcuggggcucguggaccuguuugucuucuccacgucuuuuuaccugaucagcauuuuccuucaccucguuaaaauccccacacaucgccacguggugggaaagccuugccccaaaccucauagacugaaccacaugggcauuuguuccugcggccuguauaagcaccccggggucccggugaaguggaaacggugaggacuaguuauaagacugacuagcccgaugggccucccaacgggcccuccuccccuccuugcaccgagauuaaucaaaggcucuuuucagagccaccaaaaaaaaaaaaaaaaaaaaaaaaaaaaaaaaaaaaaaaaaaaaaaaaaaaaaaaaaaaaaaaaagaauu

SEQ ID NO: 34543 - RNA, 1655 nt, Artificial Sequence
  mRNA product Design i-3 (hSL-A64-N5) comprising derived and/or modified sequence from LASV(Lassa virus/H.sapiens-wt/NGA/2015/ISTH_0543;Clade II)__AVO03639__GPCmut8 (opt5)
aggagaaagcuuaccaugggccagaucauuaccuucuuucaagaggugccccacgucaucgaagagguuaugaacauugugcugaucgcccucagccugcuugcuauucugaaggggaucuacaauguggccacaugcggacucuucggccuggucuccuuucuucugcucugugggagaucuugcagcacgaccuauaaaggaguguacgaacugcagacacuggagcucgacauggcgaaccugaauauguguaugccucuuuccugcaccaagaacaauucucaucacuauaucaugguuggcaacgaaacagggcuggagcucacccugacaaauaccagcauuaucaaccauaaauucuguaaucuuuccgaugcucacaagaaaaaccuguacgaccaugcccucaugucuauuaucagcacguuucaccuguccauuccgaauuucaaccaguaugaggccaugagcugcgauuuuaauggaggcaagaucucugugcaguacaaccugucccacaccuaugcugucgacgccgcuaaucauuguggcacaauugccaacggggugcuccaaaccuucaugcggauggcguggggaggcagcuacaucgcccuggauucugggaagggauccugggacugcaucaugacaagcuaccaguaucuuguuauucagaacaccacgugggaagaucacugucaguuuucucgccccuccccuaucggcuaccuggggcuccugagccaaagaacacgggacauuuauaucucccgcagacuucugggaaccuucacauggacccucucugauagcgagggcaaugaaacccccggcggguacugccugacacgguggaugcugauugaggcugagcucaaauguuuuggaaacacggccguggcuaagugcaaugaaaaacaugacgaggaguucugcgauaugcugcgccuuuuugacuucuguaagcaggccaucagacggcugaaaaccccugcgcagauguccauccagcucauuaacaaggccgucaaugcucugaucaacgaucaacuuauuaugaagaaucaucugcgcgacaucaugggcauucccuauugcaacuacagcaaauauuguuaccucaaucacacagugaccgggaagacaucucugccuagaugcugucugguguccaacggaagcuaccucaaugaaacccacuucucugacgauaucgaacagcaggccgacaacaugaucacggagcugcuucaaaaagaguauauugaucggcagggcaagacaccgcuggggcucgucgaccuguuuguuuucagcaccuccuuuuaccugaucucuauuuuccuucaccucgugaaaauccccacccaucgccacauuacaggaaagccuugccccaaaccucauagacugaaucacaugggcaucuguagcugcggccuguauaagcaccccggggugccggucaaguggaaacggugaggacuaguuauaagacugacuagcccgaugggccucccaacgggcccuccuccccuccuugcaccgagauuaaucaaaggcucuuuucagagccaccaaaaaaaaaaaaaaaaaaaaaaaaaaaaaaaaaaaaaaaaaaaaaaaaaaaaaaaaaaaaaaaaagaauu

SEQ ID NO: 34544 - RNA, 1655 nt, Artificial Sequence
  mRNA product Design i-3 (hSL-A64-N5) comprising derived and/or modified sequence from LASV(Lassa virus/H.sapiens-wt/NGA/2016/ISTH_0009;Clade II)__AVO03571__GPCmut8 (opt5)
aggagaaagcuuaccaugggccagaucauuaccuucuuucaagaggugccccacgucaucgaagagguuaugaacauugugcugaucgcccucagccugcuugcuauucugaaggggaucuacaauguggccacaugcggacuccugggccuugucuccuuccugcuccugugugggagaucuugcagcacgaccuauaaaggaguguacgaacugcagacacucgagcuggacauggcgucccuuaacauguguaugccucugucuugcaccaagaauaacagccaucacuauaucaugguuggcaaugaaacagggcucgagcugacccuuacaaacaccuccauuaucaaucauaaauuuuguaaccugucugaugcucacaagaaaaaucucuacgaccaugcccugaugagcauuaucuccacguuccaccugagcauuccgaacuuuaaucaguaugaggccaugucuugcgauuucaacggaggccggaucuccgugcaguacaaucucagccacucuuaugcugucgacgccgcuaaccauuguggcaccauugccaauggggugcugcaaacauuuaugcgcauggcguggggaggcuccuacaucgcccuugauagcgggaagggaucuugggacugcaucaugaccuccuaccaguaucugauuauccagaacacaaccugggaagaucacugucaguucagcagacccuccccuauuggcuaccucgggcugcuuucucaacggacgcgcgacaucuauauuagcagacggcugcucggaacauuuaccuggacacuguccgauagcgagggcaacgaaacccccggcggguacugccugacccgcuggaugcucaucgaggcugagcugaaguguuucggaaauacagccguugcuaaaugcaacgaaaagcaugacgaggaauuuugcgauaugcuuagacuguucgacuuuuguaaacaggccauccggcgccucaagacgccugcgcagaugucuauucagcugaucaauaaagccgugaacgcucuuauuaaugaucaacugaucaugaagaaccaccucagagacauuaugggcauccccuauugcaauuacuccaaguauuguuaccugaaccacaccgucacagggaaaaccagccugccucggugcugucucgugucuaauggaagcuaccugaacgagacacauuucuccgacgauaucgaacagcaggccgacaauaugauuaccgagcuucugcaaaaggaguauaucgaucgccagggcaaaacgccgcucgggcugguggaccuguucgucuuuucuaccagcuucuaccuuauuuccaucuuucuccaccugguuaagauucccacacauagacacaucaccggaaaaccuugccccaagccucaucggcugaaccacaugggcauuuguagcugcggccucuauaaucaccccggggugccggugaaauggaagcgcugaggacuaguuauaagacugacuagcccgaugggccucccaacgggcccuccuccccuccuugcaccgagauuaaucaaaggcucuuuucagagccaccaaaaaaaaaaaaaaaaaaaaaaaaaaaaaaaaaaaaaaaaaaaaaaaaaaaaaaaaaaaaaaaaagaauu

SEQ ID NO: 34545 - RNA, 1655 nt, Artificial Sequence
  mRNA product Design i-3 (hSL-A64-N5) comprising derived and/or modified sequence from LASV(Lassa virus/H.sapiens-wt/NGA/2016/ISTH_0017;Clade II)__AVO03567__GPCmut8 (opt5)
aggagaaagcuuaccaugggccagaucauuaccuucuuucaagaggugccccacgucaucgaagagguuaugaacauugugcugaucgcccucagccugcuugcuauucugaaggggaucuacaauguggccacaugcggacucuucggccuggucuccuuucuucugcucugugggagaucuugcagcacgaccuauaaaggaguguacgaacugcagacacuggagcucgacauggcgucccugaacauguguaugccucuuucuugcaccaagaauaacagccaucacuauaucaugguuggcaaugaaacagggcuggagcucacccugacaaacaccuccauuaucaaucauaaauucuguaaccuuucugaugcucacaagaaaaaucuguacgaccaugcccucaugagcauuaucuccacguuucaccugagcauuccgaacuucaaucaguaugaggccaugucuugcgauuuuaacggaggcaagaucuccgugcaguacaaucugagccacaccuaugcuauugacgccgcuaaccauuguggcacaaucgccaaugggguccuccaaaccuucaugcggauggcguggggaggcucuuacaucgcccuggauuccgggaagggaagcugggacugcauuaugacaucuuaccaguaucuuaucauucagaacaccacgugggaagaucacugucaguuuucccgccccagcccuaucggcuaccuggggcuccugucccaaagaacacgggacauuuauaucucucgcagacuucugggaaccuucacauggacccucagcgauuccgagggcaacgaaacccccggcggguacugccugacacgguggaugcugaucgaggcugagcucaaauguuuuggaaauacggccguggcuaagugcaacgaaaaacaugacgaggaguucugcgauaugcugcgccuuuuugacuucuguaagcaggccauuagacggcugaaaaccccugcgcagaugagcauccagcucauuaauaaggccguuaacgcucugaucaaugaucaacuuauuaugaagaaccaucugcgcgacaucaugggcauccccuauugcaauuacucuaaauauuguuaccucaaccacacagugaccgggaagacaucccugccuagaugcugucuggucagcaauggaucuuaccucaacgaaacccacuucagcgacgauauugaacagcaggccgacaauaugaucacggagcugcuucaaaaagaguauauggaucggcagggcaagacaccgcuggggcucguggaccuguuuguguucuccaccucuuuuuaccugauuagcaucuuccuucaccucguccgcauucccacccauagacacguuaucggaaaaccuugccccaagccucaucggcugaaccacaugggcauuuguuccugcggccuguauaaacaccccggggugccggugaaguggaagcgcugaggacuaguuauaagacugacuagcccgaugggccucccaacgggcccuccuccccuccuugcaccgagauuaaucaaaggcucuuuucagagccaccaaaaaaaaaaaaaaaaaaaaaaaaaaaaaaaaaaaaaaaaaaaaaaaaaaaaaaaaaaaaaaaaagaauu

SEQ ID NO: 34546 - RNA, 1655 nt, Artificial Sequence
  mRNA product Design i-3 (hSL-A64-N5) comprising derived and/or modified sequence from LASV(Lassa virus/H.sapiens-wt/NGA/2018/ISTH_0959;Clade II)__AVV65099__GPCmut8 (opt5)
aggagaaagcuuaccaugggccagaucauuaccuucuuucaagaggugccccacgucaucgaagagguuaugaacauugugcugaucgcccucagccugcuugcuauucugaaggggaucuacaauguggucacaugcggacucuucggccugguguccuuucuucugcucugugggagaucuugcagcacgaccuauaaaggaguuuacgaacugcagacacuggagcucgacauggccucccugaacauguguaugccucuuucuugcaccaagaauaacagccaucacuauaucauggugggcaaugaaacagggcuggagcucacccugacaaacaccuccauuaucaaucauaaauucuguaaccuuucugaugcgcacaagaaaaaucuguacgaccaugcucucaugagcauuaucuccacguuucaccugagcauuccgaacuucaaucaguaugaggccaugucuugcgauuuuaacggaggcaagaucuccguccaguacaaucugagccacgccuaugcuauugacgccgcuaaccauuguggcaccaucgccaauggggugcuccaaacauucaugcggauggcguggggaggcucuuacaucgcccuggauuccgggaagggaagcugggacugcauuaugaccucuuaccaguaucuuaucauucagaacacaaccugggaagaucacugucaguuuucccgccccagcccuaucggcuaccuggggcuccugucccaaagaacgcgggacauuuauaucucucgcagacuucugggaacauucaccuggacacucagcgauuccgagggcaacgaaacccccggcggguacugccugacccgguggaugcugaucgaggcugagcucaaauguuuuggaaauacagccguugcuaagugcaacgaaaaacaugacgaggaguucugcgauaugcugcgccuuuuugacuucuguaagcaggccauuagacggcugaaaacgccugcgcagaugagcauccagcucauuaauaaggccgugaacgcucugaucaaugaucaacuuauuaugaagaaccaucugcgcgacaucaugggcauccccuauugcaauuacucuaaauauuguuaccucaaccacaccgucacagggaagaccucccugccuagaugcugucuggugagcaauggaucuuaccucaacgaaacacacuucagcgacgauauugaacagcaggccgacaauaugaucaccgagcugcuucaaaaagaguauauugaucggcagggcaagacgccgcuggggcucguggaccuguuugucuucuccacaucuuuuuaccugaucagcauuuuccuucaccucguuaaaauccccacccaucgccacgugauuggaaagccuugccccaaaccucauagacugaaccacaugggcaucuguuccugcggccuguauaagcaccccggggugccggucaaguggaaacggugaggacuaguuauaagacugacuagcccgaugggccucccaacgggcccuccuccccuccuugcaccgagauuaaucaaaggcucuuuucagagccaccaaaaaaaaaaaaaaaaaaaaaaaaaaaaaaaaaaaaaaaaaaaaaaaaaaaaaaaaaaaaaaaaagaauu

SEQ ID NO: 34547 - RNA, 1655 nt, Artificial Sequence
  mRNA product Design i-3 (hSL-A64-N5) comprising derived and/or modified sequence from LASV(LASV003-NIG-2008;Clade II)__AIT17580__GPCmut8 (opt5)
aggagaaagcuuaccaugggccagaucauuaccuucuuucaagaggugccccacgucaucgaagagguuaugaacauugugcugaucgcccucagccugcuugcuauucugaaggggaucuacaauguggccacaugcggacucuucggccuggucuccuuucuucugcucugugggagaucuugcagcacgaccuauaaaggaguguacgaacugcagacacuggagcucgacauggcgucccugaacauguguaugccucuuucuugcaccaagaauaacagccaucacuauaucaugguuggcaaugaaacagggcuggagcucacccugacaaacaccuccauuaucaaucauaaauucuguaaccuuucugaugcucacaagaaaaaucuguacgaccaugcccucaugagcauuaucuccacguuucaccugagcauuccgaacuucaaucaguaugaggccaugucuugcgauuuuaacggaggcaagaucuccgugcaguacaaucugagccacaccuaugcugucgacgccgcuaaccauuguggcacaauugccaauggggugcuccaaaccuucaugcggauggcguggggaggcucuuacaucgcccuggauuccgggaagggaagcugggacugcaucaugacaucuuaccaguaucuuauuauccagaacaccacgugggaagaucacugucaguuuucccgccccagcccuauuggcuaccuggggcuccugucccaaagaacacgggacaucuauauuucucgcagacuucugggaaccuucacauggacccucagcgauuccgagagcaacgaaacccccggcggcuacugccugacacgguggaugcugaucgaggcugagcucaaauguuuugggaauacggccguugcuaagugcaacgaaaaacaugacgaggaguucugcgauaugcugcgccuuuuugacuucuguaagcaggccaucagacggcugaaagcgccugcccagaugucuauucagcucaucaauaaggcugugaacgcccugauuaaugaucaacuuaucaugaagaaccaucugcgcgacauuaugggaauccccuauugcaauuacuccaaauauuguuaccucaaccacaccgucacaggcagaaccagccugccucggugcugucuggugucuaaugggagcuaccucaacgaaacacacuucuccgacgauaucgaacagcaggcugacaauaugauuaccgagcugcuucaaaaggaguauauggaucgccagggaaaaacgccgcugggccucguggaccuguuugucuucucuaccagcuuuuaccugaucuccauuuuccuucaccucguuaagauccccacacauagacacgugauugggaaaccuugccccaagccucaucggcugaaccacaugggaaucuguagcugcggccuguauaaacaccccggcgugccggucaaguggaagcgcugaggacuaguuauaagacugacuagcccgaugggccucccaacgggcccuccuccccuccuugcaccgagauuaaucaaaggcucuuuucagagccaccaaaaaaaaaaaaaaaaaaaaaaaaaaaaaaaaaaaaaaaaaaaaaaaaaaaaaaaaaaaaaaaaagaauu

SEQ ID NO: 34548 - RNA, 1655 nt, Artificial Sequence
  mRNA product Design i-3 (hSL-A64-N5) comprising derived and/or modified sequence from LASV(LASV035-NIG-2009;Clade II)__AIT17588__GPCmut8 (opt5)
aggagaaagcuuaccaugggccagaucauuaccuucuuucaagaggugccccacgucaucgaagagguuaugaacauugugcugaucgcccucagccugcuugcuauucugaaggggaucuacaauguggccacaugcggacucuucggccuggucuccuuucuucugcucugugggagaucuugcagcacgaccuauaaaggaguguacgaacugcagacacuggagcucgacauggcgucccugaacauguguaugccucuuucuugcaccaagaauaacagccaucacuauaucaugguuggcaaugaaacagggcuggagcucacccugacaaacaccuccauuaucaaucauaaauucuguaaccuuucugaugcucacaagaaaaaucuguacgaccaugcccucaugagcauuaucuccacguuucaccugagcauuccgaacuucaaucaguaugaggccaugucuugcgauuuuaacggaggcaagaucuccgugcaguacaaucugagccacgcuuaugccgucgacgcugccaaccauuguggcaccauugcgaauggggugcuccaaacauucaugcggauggccuggggaggcucuuacaucgcucuggauuccgggaagggaagcugggacugcaucaugaccucuuaccaguaucuuauuauccagaacacaaccugggaagaucacugucaguuuucccgccccagcccuauuggcuaccuggggcuccugucccaaagaacgcgggacaucuauauuucucgcagacuucugggaacauucaccuggacacucagcgauuccgagggcaacgaaacccccggcggguacugccugacccgguggaugcugaucgaggccgagcucaaauguuuuggaaauacagcuguugccaagugcaacgaaaaacaugacgaggaguucugcgauaugcugcgccuuuuugacuucuguaagcaggcgaucagacggcugaaagccccugcucagaugagcauucagcucaucaauaaggccgugaacgcucugauuaaugaucaacuuaucaugaagaaccaucugcgcgacauuaugggcauccccuauugcaauuacucuaaauauuguuaccucaaccacacggucaccgggaagacaucccugccuagaugcugucuggugagcaauggaucuuaccucaacgaaacccacuucagcgacgauaucgaacagcaggccgacaauaugauuacagagcugcuucaaaaagaguauaucgaucggcagggcaagaccccgcuggggcucguggaccuguuugucuucuccacgucuuuuuaccugauuagcaucuuccuucaccucguuaaaauucccacacaucgccacgugaucggaaagccuugccccaaaccucauagacugaaccacaugggcauuuguuccugcggccuguauaagcaccccggggugccggucaaguggaaacggugaggacuaguuauaagacugacuagcccgaugggccucccaacgggcccuccuccccuccuugcaccgagauuaaucaaaggcucuuuucagagccaccaaaaaaaaaaaaaaaaaaaaaaaaaaaaaaaaaaaaaaaaaaaaaaaaaaaaaaaaaaaaaaaaagaauu

SEQ ID NO: 34549 - RNA, 1655 nt, Artificial Sequence
  mRNA product Design i-3 (hSL-A64-N5) comprising derived and/or modified sequence from LASV(LASV1000-NIG-2009;Clade II)__AIT17782__GPCmut8 (opt5)
aggagaaagcuuaccaugggccagaucauuaccuucuuucaagaggugccccacgucaucgaagagguuaugaacauugugcugaucgcccucagccugcuugcuauucugaaggggaucuacaauguggccacaugcggacucuucggccuggucuccuuucuucugcucugugggagaucuugcagcacgaccuauaaaggaguguacgaacugcagacacuggagcucgacauggcgucccugaacauguguaugccucuuucuugcaccaagaauaacagccaucacuauaucaugguuggcaaugaaacagggcuggagcucacccugacaaacaccuccauuaucaaucauaaauucuguaaccuuucugaugcucacaagaaaaaucuguacgaccaugcccucaugagcauuaucuccacguuucaccugagcauuccgaacuucaaucaguaugaggccaugucuugcgauuuuaacggaggcaagaucuccgugcaguacaaucugagccacaccuaugcugucgacgccgcuaaccauuguggcacaauugccaauggggugcuccaaaccuucaugcggauggcguggggaggcucuuacaucgcccuggauuccgggaagggaagcugggacugcaucaugacaucuuaccaguaucuuauuauccagaacaccacgugggaagaucacugucaguuuucccgccccagcccuauuggcuaccuggggcuccugucccaaagaacacgggacaucuauauuucucgcagacuucugggaaccuucacauggacccucagcgauuccgagggcaacgaaacccccggcggguacugccugacacgguggaugcugaucgaggcugagcucaaauguuuuggaaauacggccguugcuaagugcaacgaaaaacaugacgaggaguucugcgauaugcugcgccuuuuugacuucuguaagcaggccaucaaaagacugaagaccccugcgcagaugagcauucagcucaucaauaaggccgugaacgcucugauuaaugaucaacuuaucaugaaaaaccaucugcgggacauuaugggcauccccuauugcaauuacucuaaguauuguuaccucaaccacacagucaccgggaaaacaucccugccucgcugcugucuggugagcaauggaucuuaccucaacgaaacccacuucagcgacgauaucgaacagcaggccgacaauaugauuacggagcugcuucaaaaggaguauaucgauagacagggcaaaacaccgcuggggcucguggaccuguuugucuucuccaccucuuuuuaccugauuagcaucuuccuucaccucguuaagauucccacccaucggcacguggugggaaaaccuugccccaagccucaucgccugaaccacaugggcaucuguuccugcggccuguauaagcaccccggggucccggugaaauggaagagaugaggacuaguuauaagacugacuagcccgaugggccucccaacgggcccuccuccccuccuugcaccgagauuaaucaaaggcucuuuucagagccaccaaaaaaaaaaaaaaaaaaaaaaaaaaaaaaaaaaaaaaaaaaaaaaaaaaaaaaaaaaaaaaaaagaauu

SEQ ID NO: 34550 - RNA, 1655 nt, Artificial Sequence
  mRNA product Design i-3 (hSL-A64-N5) comprising derived and/or modified sequence from LASV(LASV221-NIG-2010;Clade II)__AIT17624__GPCmut8 (opt5)
aggagaaagcuuaccaugggccagaucauuaccuucuuucaagaggugccccacgucaucgaagagguuaugaacauugugcugaucgcccucagccugcuugcuauucugaaggggaucuacaauguggccacaugcggacucuucggccuggucuccuuucuucugcucugugggagaucuugcagcacgaccuauaaaggaguguacgaacugcagacacuggagcucgacauggcgucccugaacauguguaugccucuuucuugcaccaagaauaacagccaucacuauaucaugguuggcaaugaaacagggcuggagcucacccugacaaacaccuccauuaucaaucauaaauucuguaaccuuucugaugcucacaagaaaaaucuguacgaccaugcccucaugagcauuaucuccacguuucaccugagcauuccgaacuucaaucaguaugaggccaugucuugcgauuuuaacggaggcaagaucuccgugcaguacaaucugagccacaccuaugcuauugacgccgcuaaccauuguggcacaaucgccaaugggguccuccaaaccuucaugcggauggcguggggaggcucuuacaucgcccuggauuccgggaagggaagcugggacugcauuaugacaucuuaccaguaucuuaucauucagaacaccacgugggaagaucacugucaguuuucccgccccagcccuaucggcuaccuggggcuccugucccaaagaacacgggacauuuauaucucucgcagacuucugggaaccuucacauggacccucagcgauuccgagggcaacgaaacccccggcggguacugccugacacgguggaugcugaucgaggcugagcucaaauguuuuggaaauacggccguggcuaagugcaacgaaaaacaugacgaggaguucugcgauaugcugcgccuuuuugacuucuguaagcaggccauuagacggcugaaaaccccugcgcagaugagcauccagcucauuaauaaggccguuaacgcucugaucaaugaucaacuuauuaugaagaaccaucugcgcgacaucaugggcauccccuauugcaauuacucuaaauauuguuaccucaaccacacagugaccgggaagacaucccugccuagaugcugucuggucagcaauggaucuuaccucaacgaaacccacuucagcgacgauauugaacagcaggccgacaauaugaucacggagaugcugcaaaaagaguauauggaucggcagggcaagacaccgcuugggcugguggaccucuuuguguucuccaccucuuuuuaccugauuagcaucuuccugcaccuugucaaaauucccacccaucgccacguuaucggaaagccuugccccaaaccucauagacucaaccacaugggcauuuguuccugcggccuguauaagcaccccggggugccggugaaguggaaacggugaggacuaguuauaagacugacuagcccgaugggccucccaacgggcccuccuccccuccuugcaccgagauuaaucaaaggcucuuuucagagccaccaaaaaaaaaaaaaaaaaaaaaaaaaaaaaaaaaaaaaaaaaaaaaaaaaaaaaaaaaaaaaaaaagaauu

SEQ ID NO: 34551 - RNA, 1655 nt, Artificial Sequence
  mRNA product Design i-3 (hSL-A64-N5) comprising derived and/or modified sequence from LASV(LASV237-NIG-2010;Clade II)__AIT17638__GPCmut8 (opt5)
aggagaaagcuuaccaugggccagaucauuaccuucuuucaagaggugccccacgucaucgaagagguuaugaacauugugcugaucgcccucagccugcuugcuauucugaaggggaucuacaauguggccacaugcggacucuucggccuggucuccuuucuucugcucugugggagaucuugcagcacgaccuauaaaggaguguacgaacugcagacacuggagcucgacauggcgucccugaacauguguaugccucuuucuugcaccaagaauaacagccaucacuauaucaugguuggcaaugaaacagggcuggagcucacccugacaaacaccuccauuaucaaucauaaauucuguaaccuuucugaugcucacaagaaagaccuguacgaucaugcccucaugagcauuaucuccacguuucaccugagcauuccgaauuucaaccaguaugaggccaugucuugcgacuuuaauggaggcaagaucuccgugcaguacaaccugagccacaccuaugcugucgaugccgcuaaucauuguggcacaauugccaacggggugcuccaaaccuucaugcggauggcguggggaggcucuuacaucgcccuggacuccgggaagggaagcugggauugcaucaugacaucuuaccaguaucuuauuauccagaauaccacgugggaagaccacugucaguuuucccgccccagcccuauuggcuaccuggggcuccugucccaaagaacacgggauaucuauauuucucgcagacuucugggaaccuucacauggacccucagcgacuccgagggcaacgaaacccccggcggguacugccugacacgguggaugcugaucgaggcugagcucaaauguuuuggaaacacggccguugcuaagugcaaugaaaaacaugaugaggaguucugcgacaugcugcgccuuuuugauuucuguaagcaggccaucagacggcugaaaaccccugcgcagaugagcauucagcucaucaacaaggccgugaaugcucugauuaacgaccaacuuaucaugaagaaucaucugcgcgacauuaugggcauccccuauugcaacuacucuaaauauuguuaccucaaucacacagucaccgggaagacaucccugccuagaugcugucuggugagcaacggaucuuaccucaaugaaacccacuucagcgaugacaucgaacagcaggccgauaacaugauuacggagcugcuucaaaaagaguauauggaccggcagggcaagacaccgcuggggcucguggaucuguuugucuucuccaccucuuuuuaccugaucagcauuuuccuucaccucaucaaaauucccacccaucgccacaucacaggaaagccuugccccaaaccucauagacugaaucacaugggcauuuguuccugcggccuguauaagcaccccgggguuccggugaaguggaaacggugaggacuaguuauaagacugacuagcccgaugggccucccaacgggcccuccuccccuccuugcaccgagauuaaucaaaggcucuuuucagagccaccaaaaaaaaaaaaaaaaaaaaaaaaaaaaaaaaaaaaaaaaaaaaaaaaaaaaaaaaaaaaaaaaagaauu

SEQ ID NO: 34552 - RNA, 1655 nt, Artificial Sequence
  mRNA product Design i-3 (hSL-A64-N5) comprising derived and/or modified sequence from LASV(LASV253-NIG-2011;Clade II)__AIT17670__GPCmut8 (opt5)
aggagaaagcuuaccaugggccagaucauuaccuucuuucaagaggugccccacgucaucgaagagguuaugaacauugugcugaucgcccucagccugcuugcuauucugaaggggaucuacaauguggccacaugcggacucuucggccuggucuccuuucuucugcucugugggagaucuugcagcacgaccuauaaaggaguguacgaacugcagacacuggagcucgacauggcgucccugaacauguguaugccucuuucuugcaccaagaauaacagccaucacuauaucaugguuggcaaugaaacagggcuggagcucacccugacaaacaccuccauuaucaaucauaaauucuguaaccuuucugaugcucacaagaaaaaucuguacgaccaugcccucaugagcauuaucuccacguuucaccugagcauuccgaacuucaaucaguaugaggccaugucuugcgauuuuaacggaggcaagaucuccgugcaguacaaucugagccacaccuaugcugucgacgccgcuaaccauuguggcacaauugccaauggggugcuccaaaccuucaugcggauggcguggggaggcucuuacaucgcccuggauuccgggaagggaagcugggacugcaucaugacaucuuaccaguaucuuauuauccagaacaccacgugggaagaucacugucaguuuucccgccccagcccuauuggcuaccuggggcuccugucccaaagaacacgggacaucuauauuucucgcagacuucugggaaccuucacauggacccucagcgauuccgagggcaacgaaacccccggcggguacugccugacacgguggaugcugaucgaggcugagcucaaauguuuuggaaauacggccguugcuaagugcaacgaaaaacaugacgaggaguucugcgauaugcugcgccuuuuugacuucuguaagcaggccaucagacggcugaaagcgccugcccagaugagcauucagcucaucaauaaggcugugaacgcccugauuaaugaucaacuuaucaugaagaaccaucugcgcgacauuaugggcauccccuauugcaauuacucuaaauauuguuaccucaaccacaccgucacagggagaaccucccugccucggugcugucuggugagcaauggaucuuaccucaacgaaacacacuucagcgacgauaucgaacagcaggcugacaauaugauuaccgagcugcuucaaaaggaguauaucgaucgccagggcaaaacgccgcuggggcucguggaccuguuugucuucuccacaucuuuuuaccugauuagcaucuuccuucaccucguuaagauucccacccauagacacaucauuggaaaaccuugccccaagccucaucggcugaaccacaugggcaucuguuccugcggccuguauaaacaccccggggugccggugaaguggaagcgcugaggacuaguuauaagacugacuagcccgaugggccucccaacgggcccuccuccccuccuugcaccgagauuaaucaaaggcucuuuucagagccaccaaaaaaaaaaaaaaaaaaaaaaaaaaaaaaaaaaaaaaaaaaaaaaaaaaaaaaaaaaaaaaaaagaauu

SEQ ID NO: 34553 - RNA, 1655 nt, Artificial Sequence
  mRNA product Design i-3 (hSL-A64-N5) comprising derived and/or modified sequence from LASV(LASV254-NIG-2011;Clade II)__AIT17674__GPCmut8 (opt5)
aggagaaagcuuaccaugggccagaucauuaccuucuuucaagaggugccccacgucaucgaagagguuaugaacauugugcugaucgcccucagccugcuugcuauucugaaggggaucuacaauguggccacaugcggacucuucggccuggucuccuuucuucugcucugugggagaucuugcagcacgaccuauaaaggaguguacgaacugcagacacuggagcucgacaugaccaaccugaauauguguaugccucuuuccugcacaaagaacaauucucaucacuauaucaugguuggcaacgaaaccgggcuggagcucacacugaccaauacgagcauuaucaaccauaaauucuguaaucuuuccgaugcgcacaagaaaaaccuguacaaucaugcucucaugucuauuaucagcaccuuucaccuguccauuccgaacuucaaucaguaugaggccaugagcugcgacuuuaacggaggcaagaucucugugcaguacaaucugucccacagcuaugccgucgaugcugccaaccauuguggcacaauugcuaacggggugcuccaaaccuucaugcggauggccuggggaggcucuuacaucgcgcuggacuccgggaagggaaauugggauugcaucaugacaagcuaccaguaucuuauuauccagaacaccacgugggaagaccacugucaguuuucucgccccuccccuauuggcuaccuggggcuccugagccaaagaacacgggauaucuauauuucccgcagacuucugggaaccuucacauggacccucucugacagcgagggcaaugaaacccccggcggguacugccugacacgguggaugcugaucgaggccgagcucaaauguuuuggaaacacggcuguugccaagugcaaugaaaaacaugaugaggaguucugcgacaugcugcgccuuuuugauuucuguaagcaggcuaucagacggcugaaaaccccugcccaggcgaacauucagcucaucaauaaggccgugaacgcucugauuaaugaccaacuuaucaugaagaaccaucugcgcgauauuaugggcauccccuauugcaauuacuccaaauauuguuaccucaaccacacagucaccgggaagacaagccugccuagaugcugucuggugucuaauggauccuaccucaacgaaacccacuucagcgacgacaucgaacagcaggccgauaauaugauuacggagcugcuucaaaaagaguauauggaccggcagggcaagacaccgcuggggcucguggaucuguuugucuucucuaccagcuuuuaccugaucuccauuuuccuucaccucguuaaaauccccacccaucgccacgugauuggaaagccuugccccaaaccucauagacugaaccacaugggcaucuguucuugcggccuguauaagcaccccggggugccggucaaguggaaacggugaggacuaguuauaagacugacuagcccgaugggccucccaacgggcccuccuccccuccuugcaccgagauuaaucaaaggcucuuuucagagccaccaaaaaaaaaaaaaaaaaaaaaaaaaaaaaaaaaaaaaaaaaaaaaaaaaaaaaaaaaaaaaaaaagaauu

SEQ ID NO: 34554 - RNA, 1655 nt, Artificial Sequence
  mRNA product Design i-3 (hSL-A64-N5) comprising derived and/or modified sequence from LASV(Nig08-A19;Clade III)__ADU56618__GPCmut8 (opt5)
aggagaaagcuuaccaugggccagaucgugaccuucuuucaagaggucccccacguuauugaagaggugaugaacaucgugcugauugcccucagcauccuggcuauucuuaaggggcuguacaauaucgccacaugcggacucaucggccuggucacguuccuucugcucuccgggagaucuuguagcaugaccuauaaaggaguguacgaacugcagacacuggagcucaacaugaauacccugaacaugugcaugccucuuuccuguacaaagaauaacucucaucacuauauuaugguuggcaaugaaaccgggcuggagcucacacugaccaacacgagccuucugcaucacaaauuuugcaaucucuccgacgcgcauaagaaaaaccuguacgaucacacccugaugucuaucauuagcacauuccaccucuccaucccgaauuuuaaccaguaugaggcuaugagcugugacuucaauggaggcaagauuaccgugcaguacaaccugucucauuccuaugccaucgaugccgcuaaucacugcggcacagucgccaacggggugcuucaaaccuuuaugcggauggcuuggggaggcagcuacauugcccuggacucugggcgcggaaagugggauuguaucaugacguccuaccaguaucucaucauucagaacacaaccugggaagaccauugccaguucagcagacccucuccuaucggcuaccuggggcuucugucccaacggacacgcgauauuuauaucagcagacggcuccugggaaccuuuaccuggacacuguccgacucugagggcaaugaaacgcccggcggguacugucucacccgcuggaugcugauugaggcggagcuuaaaugcuucggaaacacagccguugcuaaguguaaugaaaaacacgaugaggaauuuugcgacaugcugagacucuucgauuuuugcaagcaggccauccggcgccugaaagcuccugcccagaugagcauccagcuuauuaacaaggcggugaaugcccugaucaacgaccaacucauuaugaagaaucaccugagagauaucaugggcauucccuauuguaacuacuccaaauauugcuaccugaaucauaccagcacagggcggaccucucucccucgcuguugccuggucuccaacggaagcuaccuuaaugagacgcacuucucugacgacaucgaacagcaggcugauaacaugaucacagagaugcugcaaaaggaguaucucgacagacagggcaaaaccccgcuggggcugguggaucuuuucguguuuagcaccuccuucuaccucauuucuaucuuucugcaucuggucaagauucccacacaccggcauaucguuggaaaaccuugucccaagccucaccgccucaaucacaugggcauuugcagcuguggccuguauaaacagcccggggugccggugagauggaagcggugaggacuaguuauaagacugacuagcccgaugggccucccaacgggcccuccuccccuccuugcaccgagauuaaucaaaggcucuuuucagagccaccaaaaaaaaaaaaaaaaaaaaaaaaaaaaaaaaaaaaaaaaaaaaaaaaaaaaaaaaaaaaaaaaagaauu

SEQ ID NO: 34555 - RNA, 1658 nt, Artificial Sequence
  mRNA product Design i-3 (hSL-A64-N5) comprising derived and/or modified sequence from LASV(G1180-SLE-2010;Clade IV)__AIT17168__GPCmut8 (opt5)
aggagaaagcuuaccaugggccagaucgugaccuucuuucaagaggucccccacguuauugaagaggugaugaacaucgugcugauugcccucagcauccuggcuguccuuaaggggcuguacaauuucgccacaugcggacucgugggccugcuuacguuucugcuccugugugggagauccugcaccgcgucucgguauaaaggaguuuacgaacugcagacacucgagcugaacauggaaacccuuaauauguguaugccucugagcugcacaaagaacaauucccaucacuauauuauggugggcaacgagaccgggcucgagcugacacuuaccaauacgucuaucaucaaccauaaauucuguaaucugagcgacgcucacaagaaaaaccucuacgaucaugcccugauguccauuaucucuaccuuucaccugagcauuccgaauuucaaccaguaugaagccauguccugcgacuuuaauggaggcaagaucagcguccaguacaaccucucucacuccuaugcuggcgaugccgcuaaucauugugggacaguggccaacggaguucugcaaaccuucaugcgcauggcguggggcgggagcuacauugcccuugacucuggacacggcuccugggauugcaucaugacaagcuaccaguaucugauuauccagaacaccacgugggaggaccauugucaguuuucuagacccuccccuaucggguaccucggacugcuuagccaacggacacgcgauauuuauaucuccagacggcugcucggcaccuucacauggacccugucugacagcgaaggcaaggauacccccgggggauacugccugacacgcuggaugcucauugaggcugagcugaaauguuuuggcaauacggccguggcuaagugcaacgaaaaacacgacgaggaguucugcgauaugcuuagacuguuugacuucuguaagcaggccauccagcggcucaaagcgccugcccagauguccauucaacugaucaauaaggcugucaacgcccuuaucaaugaucagcugauuaugaagaaccaccuccgcgacaucauggggauucccuauugcaauuacagcaaauauuguuaccugaaccauaccacaaccggaaagacaucucugccuaaaugcugucucguguccaauggcagcuaccugaacgaaacccacuucucugacgauaucgaacagcaagcugacaauaugauuacggagaugcuucagaaggaguauauggaaagacaggggaaaacaccgcugggacucguggaucuguuugucuucagcaccuccuuuuaccugaucucuaucuuccuucaucucguuaagauucccacccaccggcauaucgugggcaaaagcugcccuaagccccaccgccugaaccacaugggcauuuguuccugcgggcuguauaagcagccuggagugcccgucaaauggaagagaugaggacuaguuauaagacugacuagcccgaugggccucccaacgggcccuccuccccuccuugcaccgagauuaaucaaaggcucuuuucagagccaccaaaaaaaaaaaaaaaaaaaaaaaaaaaaaaaaaaaaaaaaaaaaaaaaaaaaaaaaaaaaaaaaagaauu

SEQ ID NO: 34556 - RNA, 1658 nt, Artificial Sequence
  mRNA product Design i-3 (hSL-A64-N5) comprising derived and/or modified sequence from LASV(G1442-SLE-2011;Clade IV)__AIT17180__GPCmut8 (opt5)
aggagaaagcuuaccaugggccagaucgugaccuucuuucaagaggucccccacguuauugaagaggugaugaacaucgugcugauugcccucagcauccuggcuguccuuaaggggcuguacaauguggccacaugcggacucauuggccugguuacguuccuucugcucugugggagauccugcaccacaacccuguauaaaggaguguacgaacugcagacacucgagcugaacauggaaacccuuaauauguguaugccucugucuugcacaaagaacaauagccaucacuauauccgggucggcaacgagaccgggcucgagcugacgcuuaccaauacauccaucauuaaccauaaauuuuguaaucugucugacgcgcacaagaaaaaccucuacgaucaugcucugaugagcaucauuuccaccuuccaccugucuaucccgaauuuuaaccaguaugaagccaugagcugcgacuucaauggaggcaagauuuccgugcaguacaaccucagccacucuuaugccggcgaugcugccaaucauugugggacaguugcuaacggagugcugcaaaccuuuaugcgcauggccuggggcggguccuacaucgcgcuugacagcggaagaggcaacugggauugcauuaugacgucuuaccaguaucugaucauccagaauacaaccugggacgaucacugucaguucucccggcccagcccuauuggguaccucggacugcuuucucaacgcacaagagacgucuauaucucccggcgccugcucggcaccuuuaccuggacacugagcgauuccgagggcaaggacacgcccgggggauacugccugaccagauggaugcucauugaagccgagcugaaauguuucggcaacacagcuguggccaagugcaaugagaaacaugaugaagaguuuugcgacaugcuucggcuguucgauuuuuguaagcaggcuauccagcgccucaaagccccugcgcagaugucuauucaacugaucaacaaggccgugaaugcucuuaucaacgaccagcugauuaugaagaaucaccucagagacaucauggggauucccuauugcaacuacagcaaauauuguuaccugaauaacaccgccacaggaaagaccucccugccuaaaugcugucucaucagcaauggcucuuaccugaacgaaacgcacuucuccgaugacauugagcaggaagcugauaauaugaucacagagaugcuucaaaaggaguauauggaacggcaggggaaaaccccgcugggacucgucgaccuguucguuuuuagcaccucuuucuaccugaucagcauuuuucuucaucucgugaagauccccacacaccgccauauugugggcaaauccugcccuaagccccacagacugaaccauaugggcaucuguucuugcgggcuguauaagcagccuggaguccccgugcgguggaaacgcugaggacuaguuauaagacugacuagcccgaugggccucccaacgggcccuccuccccuccuugcaccgagauuaaucaaaggcucuuuucagagccaccaaaaaaaaaaaaaaaaaaaaaaaaaaaaaaaaaaaaaaaaaaaaaaaaaaaaaaaaaaaaaaaaagaauu

SEQ ID NO: 34557 - RNA, 1658 nt, Artificial Sequence
  mRNA product Design i-3 (hSL-A64-N5) comprising derived and/or modified sequence from LASV(G3010-SLE-2013;Clade IV)__AIT17344__GPCmut8 (opt5)
aggagaaagcuuaccaugggccagaucgugaccuucuuucaagaggucccccacguuauugaagaggugaugaacaucgugcugauugcccucagcauccuggcuguccuuaaggggcuguacaauuucgccacaugcggacucgugggccugguuacguuucuucugcucugugggagauccugcaccacaucucuguauaaaggaguguacgaacugcagacccucgagcugaacauggaaacacuuaauauguguaugccucugagcugcaccaagaacaauucccaucacuauauuauggucggcaacgagacagggcucgagcugacccuuacgaauaccucuaucaucaaccauaaauucuguaaucugagcgacgcgcacaagaaaaaccucuacaaucaugcucugauguccauuaucucuacauuucaccugagcauuccgaacuucaaucaguaugaagccauguccugcgauuuuaacggaggcaagaucagcgugcaguacaaucucucucacuccuaugccggcgacgcugccagccauugugggaccguugcuaacggagugcugcaaacauucaugcggauggccuggggcgggucuuacauugcgcuugauuccggauacggcaagugggacugcaucaugaccagcuaucaguaccugauuauccagaacacgacaugggaggaucacugucaguuuucucgccccuccccuaucggguaucucggacugcuuagccaaagaacccgggacauuuacaucucccgcagacugcucggcacauucaccuggacccugucugauagcgaaggcaaagacacacccgggggauauugccugacgcgguggaugcucauugaggccgagcugaaguguuuuggcaauaccgcugucgccaaaugcaacgaaaagcaugaugaggaguucugcgacaugcuucgccuguuugauuucuguaaacaggcuauccagagacucaagaccccugcccagauguccauucaacugaucaauaaggcggugaacgcccuuaucaaugaccagcugauuaugaaaaaccaccuccgggauaucauggggauucccuacugcaauuauagcaaguacuguuaccugaaccacacaacaaccggaaaaacgucucugccuaagugcugucucguguccaauggcagcuaucugaacgaaacacauuucucugacgacaucgaacagcaagcugauaauaugauuaccgagaugcuucagaaagaguacauggaacgccaggggaagaccccgcugggacucgucgaccuguuuguuuucagcacauccuuuuaucugaucucuaucuuccuucaccucgugaaaauucccacccauagacacaucgugggcaagagcugcccuaagccccaucggcugaaccacaugggcauuuguuccugcgggcuguacaaacagccuggaguccccgugcgcuggaagagaugaggacuaguuauaagacugacuagcccgaugggccucccaacgggcccuccuccccuccuugcaccgagauuaaucaaaggcucuuuucagagccaccaaaaaaaaaaaaaaaaaaaaaaaaaaaaaaaaaaaaaaaaaaaaaaaaaaaaaaaaaaaaaaaaagaauu

SEQ ID NO: 34558 - RNA, 1658 nt, Artificial Sequence
  mRNA product Design i-3 (hSL-A64-N5) comprising derived and/or modified sequence from LASV(G502-SLE-2009;Clade IV)__AIT17126__GPCmut8 (opt5)
aggagaaagcuuaccaugggccagaucgugaccuucuuucaagaggucccccacguuauugaagaggugaugaacaucgugcugauugcccucagcauccuggcuguccuuaaggggcuguacaauuucgccacaugcggacucgugggccugcuuacguuucugcuccugugugggagauccugcaccacaggacuguauaaaggcguuuacgaacuccagacccuggagcuuaacauggaaacacugaauauguguaugccucucucuugcaccaagaacaauagccaucacuauauuaugguggggaacgagacaggacuggagcuuacccugacgaauaccuccaucaucaaccauaaauucuguaaucucucugacgcgcacaagaaaaaccuguacgaucaugcucugaugagcauuaucuccacauuucaccucucuauuccgaauuucaaccaguaugaagccaugagcugcgacuuuaauggcggcaagaucuccguccaguacaaccugagccacucuuaugccggggaugcugccgaccauuguggaaccguggcuaauggcguucuucaaacauucaugcggauggccuggggaggguccuacauugcgcuggauagcggccgcgggagaugggacugcaucaugaccucuuaccaguaucucauuauccagaacacgacaugggaggaucacugucaguuuucccggcccagcccuaucggauaccugggccuucugucucaacgcaccagagacauuuauaucucccggcgccuccugggcacauucaccuggacccugagcgauuccgaagggaaggacacacccggaggcuacugccucacgagauggaugcugauugaggccgagcuuaaauguuuugggaacaccgcuguggccaagugcaaugaaaaacaugaugaggaguucugcgacaugcugcggcucuuugauuucuguaagcaggcuauccagcgccugaaagccccugcgcagaugucuauucaacuuaucaacaaggccgucaaugcucugaucaacgaccagcucgugaugaagaaucaccugagagacauuaugggaauccccuauugcaacuacagccgguauuguuaccugaaucacacaaccacaggccgcaccucccucccuaaaugcugucuggugagcaacgggucuuaccuuaaugaaacgcauuucuccgaugacauugaacagcaagccgauaacaugaucacagagaugcugcagaaggaguauauggaaagacagggaaaaaccccgcucggccuggucgaccuguuuguuuucagcaccucuuuuuaccuuauuagcaucuuccuccaccuggugaagauccccacacaucggcacauugugggcaaauccugcccuaagccccaucgccugaaucacauggggaucuguucuugcggacucuauaaacagccuggcguccccgugaaguggaagagaugaggacuaguuauaagacugacuagcccgaugggccucccaacgggcccuccuccccuccuugcaccgagauuaaucaaaggcucuuuucagagccaccaaaaaaaaaaaaaaaaaaaaaaaaaaaaaaaaaaaaaaaaaaaaaaaaaaaaaaaaaaaaaaaaagaauu

SEQ ID NO: 34559 - RNA, 1658 nt, Artificial Sequence
  mRNA product Design i-3 (hSL-A64-N5) comprising derived and/or modified sequence from LASV(G733-SLE-2010;Clade IV)__AIT17154__GPCmut8 (opt5)
aggagaaagcuuaccaugggccagaucgugaccuucuuucaagaggucccccacguuauugaagaggugaugaacaucgugcugauugcccucagcauccuggcuguccuuaaggggcuguacaauuucgccacaugcggaauugugggccucguuuccuuucugcuucugugugggagaucuugcacgaccagccucuauaaaggaguguacgaacugcagacacuggagcucaacauggaaacccugaauauguguaugccucuuuccugcacaaagaacaauucucaucacuauaucauggucggcaacgagaccgggcuggagcucacacugaccaauacgagcaucauuaaccauaaauucuguaaucuuuccgacgcgcacaagaaaaaccuguacgaucaugcucucaugucuaucauuagcaccuuucaccuguccaucccgaauuucaaccaguaugaagccaugagcugcgacuuuaauggaggcaagauuucugugcaguacaaccugucccacagcuaugccggcgaugcugccaaucauugugggacaaucgcuaacggaguucuccaaaccuucaugcggauggccuggggcgggucuuacauugcgcuggacuccggacgcgauagaugggacugcaucaugacaagcuaccaguaucuuaucauucagaacaccacgugggaggaucacugucaguuuucucggcccuccccuaucggcuaccuggggcuccugagccaacgcacaagagacauuuauaucucccggcgccuucugggaaccuucacauggacccucucugauagcgaaggcaaggacacccccggcggguacugccugacaagauggaugcugauugaggccgagcucaaauguuuuggaaauacggcuguggccaagugcaacgaaaaacaugaugaggaguucugcgacaugcugcggcuuuuugauuucuguaagcaggcuauccagcgccugaaagccccugcgcagauguccauccaacucauuaauaaggccgucaacgcucugaucaaugaccagcuuauuaugaagaaccaccugagagacaucaugggcauucccuauugcaauuacagcaaauauuguuaccucaaccacaccacaaccgggaagacaucucugccuaaaugcugucugguguccaauggaagcuaccucaacgaaacccauuucucugaugacaucgaacagcaagccgauaauaugaucacggagaugcugcagaaggaguauauggaacggcagggcaaaacaccgcuugggcugguggaccucuuugucuucagcaccuccuuuuaccugauuucuaucuuccugcaccuuguuaagauucccacccaucgccacguggugggaaaaagcugcccuaagccccauagacucaaccacaugggcaucuguuccugcggccuguaugggcagccuggaguccccgugaaguggaaacggugaggacuaguuauaagacugacuagcccgaugggccucccaacgggcccuccuccccuccuugcaccgagauuaaucaaaggcucuuuucagagccaccaaaaaaaaaaaaaaaaaaaaaaaaaaaaaaaaaaaaaaaaaaaaaaaaaaaaaaaaaaaaaaaaagaauu

SEQ ID NO: 34560 - RNA, 1658 nt, Artificial Sequence
  mRNA product Design i-3 (hSL-A64-N5) comprising derived and/or modified sequence from MOPV/LASV reassortant(IGS-1;Clade IV)__AFY05576__GPCmut8 (opt5)
aggagaaagcuuaccaugggccagaucgugaccuucuuucaagaggucccccacguuauugaagaggugaugaacaucgugcugauugcccucagcguccuggcugugcuuaaggggcuguacaauuucgccacaugcggacucguuggccuggugacguuucuucugcucugugggagauccugcaccacaucucuguauaaaggagucuacgaacugcagacccucgagcugaacauggaaacacuuaauauguguaugccucugagcugcaccaagaacaauucccaucacuauaucauggugggcaacgagacagggcucgagcugacccuuacgaauaccucuauuaucaaccauaaauucuguaaucugagcgacgcgcacaagaaaaaccucuacgaucaugcucugauguccaucauuucuacauuucaccugagcaucccgaauuucaaccaguaugaagccauguccugcgacuuuaauggaggcaagauuagcguucaguacaaccucucucacuccuaugccggcgaugcugccaaucauugugggaccguggcuaacggaguccugcaaacauucaugcggauggccuggggcgggagcuacaucgcgcuugacucuggacgcggcaacugggauugcauuaugaccuccuaccaguaucugaucauucagaauacgacaugggaggaccacugucaguuuagcagacccucuccuaucggguaccucggacugcuuucccaacggacccgcgauaucuauauuagcagacggcugcucggcacauucaccuggacccuguccgacucugaaggcgaggauacacccgggggauacugccugacgcgcuggaugcucaucgaggccgaacugaaguguuuuggcaacaccgcuguggccaaaugcaaugagaagcaugacgaagaguucugcgauaugcuuagacuguuugacuucuguaaacaggcuauucagcggcucaaggccccugcgcagaugagcauccaacugauuaacaaagccgugaaugcucuuaucaacgaucagcugaucaugaagaaucaccuccgcgacauuauggggauccccuauugcaacuacuccaaguauuguuaccugaaucacacaaccacaggaagaaccagccugccuaaaugcugucucgucucuaacggcuccuaccugaaugaaacgcauuucagcgacgauauugagcagcaagccgacaacaugaucacagagaugcuucagaaggaauauauggagcggcaggggaaaaccccgcugggacucguugaucuguuuguguucucuaccagcuuuuaccugauuuccaucuuccuucaccucgugaagauccccacacaucgccacauugucggcaaaucuugcccuaagccccauagacugaaucacaugggcaucuguagcugcgggcuguauaaacagccuggagugcccguuaaguggaagcggugaggacuaguuauaagacugacuagcccgaugggccucccaacgggcccuccuccccuccuugcaccgagauuaaucaaaggcucuuuucagagccaccaaaaaaaaaaaaaaaaaaaaaaaaaaaaaaaaaaaaaaaaaaaaaaaaaaaaaaaaaaaaaaaaagaauu

SEQ ID NO: 34561 - RNA, 1658 nt, Artificial Sequence
  mRNA product Design i-3 (hSL-A64-N5) comprising derived and/or modified sequence from LASV(LM765-SLE-2012;Clade IV)__AIT17814__GPCmut8 (opt5)
aggagaaagcuuaccaugggccagaucgugaccuucuuucaagaggucccccacguuauugaagaggugaugaacaucgugcugauugcccucagcauccuggcuguccuuaaggggcuguacaauuucgccacaugcggacucgugggccugguuacguuucuucugcucugugggagauccugcaccacaucucuguauaaaggaguguacgaacugcagacccucgagcugaacauggaaacacuuaauauguguaugccucugagcugcaccaagaacaauucccaucacuauauuauggucggcaacgagacagggcucgagcugacccuuacgaauaccucuaucaucgaccauaaauucuguaaccugagcgaugcgcaccggaagaaucucuacgaccaugcucugauguccauuaucucuacauuucaccugagcauuccgaacuucaaucaguaugaagccauguccugcgauuuuaacggaggcaaaaucagcgugcaguacaaucucucucacuccuaugccaaggacgcugccgaucauuguggcaccguugcuaacggggugcugcaaacauucaugcgcauggccuggggaggcagcuacauugcgcuugacucugggagaggacggugggauugcaucaugaccuccuaccaguaucugauuauccagaauacgacaugggaggaccacugucaguuuagccgccccucuccuaucggcuaccucgggcugcuuucccaaagaacccgggauauuuauaucagccgcagacugcucggaacauucaccuggacccuguccgacucugaaggcaaggauacacccggcggguacugccugacgcgguggaugcucauugaggccgagcugaaauguuuuggaaacaccgcugucgccaagugcaacgaaaaacaugacgaggaguucugcgauaugcuucgccuguuugacuucuguaagcaggcuauccagagacucaaagccccugcgcagaugagcauucaacugaucaauaaggccgugaacgcucuuaucaaugaccagcugauuaugaagaaccaccuccgggauaucaugggcauucccuauugcaauuacuccaaauauuguuaccugaaccacacaaccacagggaagaccagccugccuaaaugcugucucgugucuaauggauccuaccugaacgaaacgcauuucagcgacgauaucgaacagcaagccgacaauaugauuacagagaugcuucagaaggaguauauggaacgccagggcaaaaccccgcuggggcucgucgaucuguuuguuuucucuaccagcuuuuaccugaucuccaucuuccuucaccucgugaagauucccacacauagacacaucgugggaaaaccuugccccaagccucaucggcugaaccacaugggcauuuguucuugcggccuguauaagcagcccggggucccggugaaauggaagcgcugaggacuaguuauaagacugacuagcccgaugggccucccaacgggcccuccuccccuccuugcaccgagauuaaucaaaggcucuuuucagagccaccaaaaaaaaaaaaaaaaaaaaaaaaaaaaaaaaaaaaaaaaaaaaaaaaaaaaaaaaaaaaaaaaagaauu

SEQ ID NO: 34562 - RNA, 1658 nt, Artificial Sequence
  mRNA product Design i-3 (hSL-A64-N5) comprising derived and/or modified sequence from LASV(LM776-SLE-2012;Clade IV)__AIT17824__GPCmut8 (opt5)
aggagaaagcuuaccaugggccagaucgugaccuucuuucaagaggucccccacguuauugaagaggugaugaacaucgugcugauugcccucagcauccuggcuguccuuaaggggcuguacaauuucgccacaugcggacucgugggccugguuacguuucuucugcucugugggagauccugcaccacaucuguguauaaaggagucuacgaacugcagacccuggagcucaacauggaaacacugaauauguguaugccucuuagcugcaccaagaacaauucccaucacuauauuauggugggcaacgagacagggcuggagcucacccugacgaauaccucuaucaucaaccauaaauucuguaaucuuagcgacgcgcacaagaaaaaccuguacgaucaugcucucauguccauuaucucuacauuucaccugagcauuccgaauuucaaccaguaugaagccauguccugcgacuuuaauggaggcaagaucagcguucaguacaaccugucucacuccuaugccggcgaugcugccaaucauugugggaccguggcuaacggaguccuccaaacauucaugcggauggccuggggcgggagcuacauugcgcuggacucuggacacggcaagugggauugcaucaugaccuccuaccaguaucuuauuauccagaacacgacaugggaggaccauugucaguuuagccgccccucuccuaucggguaccugggacuccugucccaaagaacccgggauauuuauaucagccgcagacuucugggcacauucaccuggacccucuccgacucugaaggcaaagauacacccgggggauacugccugacgcgguggaugcugauugaggccgagcucaaguguuuuggcaauaccgcuguggccaaaugcaacgaaaagcacgacgaggaguucugcgauaugcugcgccuuuuugacuucuguaaacaggcuauccagagacugaaggccccugcgcagaugagcauucaacucaucaauaaggccgugaacgcucugaucaaugaucagcuuauuaugaaaaaccaucugcgggacaucauggggauucccuauugcaauuacuccaaguauuguuaccucaaccacacaaccacaggaaaaaccagccugccuaagugcugucuggucucuaauggcuccuaccucaacgaaacgcacuucagcgacgauaucgaacagcaagccgacaauaugauuacagagaugcugcagaaagaguauauggaacgccaggggaagaccccgcuuggacugguugaucucuuuguguucucuaccagcuuuuaccugaucuccaucuuccugcaucuugugaaaauucccacacacagacauaucgucggcaagucuugcccuaagccccaccggcucaaccacaugggcauuuguagcugcgggcuguauaaacagccuggagugcccguucgcuggaagagaugaggacuaguuauaagacugacuagcccgaugggccucccaacgggcccuccuccccuccuugcaccgagauuaaucaaaggcucuuuucagagccaccaaaaaaaaaaaaaaaaaaaaaaaaaaaaaaaaaaaaaaaaaaaaaaaaaaaaaaaaaaaaaaaaagaauu

SEQ ID NO: 34563 - RNA, 1658 nt, Artificial Sequence
  mRNA product Design i-3 (hSL-A64-N5) comprising derived and/or modified sequence from LASV(Mad39;Clade IV)__ANH09722__GPCmut8 (opt5)
aggagaaagcuuaccaugggccagaucgugaccuucuuucaagaggucccccacguuauugaagaggugaugaacaucgugcugauugcccucagcauccuggcuguccuuaaggggcuguacaauguggccacaugcggacucauuggccugguuacguuccuucugcucugugggagauccugcaccacaacccuguauaaaggaguguacgaacugcaggcgcucgagcugaacauggaaacacuuaauauguguaugccucugucuugcaccaagaacaauagccaucacuauauccgggucggcaacgagacagggcucgagcugacccuuacgaauaccucccugaucaaccauaaauuuuguaaucucucugacgcucacaagaaaaaccuguacgaucaugcccugaugagcauuaucuccacauuccaccucucuauuccgaauuuuaaccaguaugaagccaugagcugcgacuucaaugauggaaagaucuccgugcaguacaaccugagccacaccuaugcuggcgacacagccaaucauuguggcaccguugcuaacggggugcuucaaacguuuaugcgcauggccuggggaggcucuuacauugcgcuggauuccgggagaggaggcugggacugcaucaugacaagcuaccaguaucucauuauccagaacaccacaugggaggaucacugucaguucucucggcccuccccuaucggguaccugggacuucugagccaacgcaccagagacauuuauaucucucggcgccuccugggcaccuuuacauggacgcuguccgauagcgaaggcaaggacacccccgggggauacugccucacaagauggaugcugauugaggccgagcuuaaauguuucggcaauaccgcugucgccaagugcaacgaaaaacaugaugaggaauuuugcgacaugcugcgccucuucgauuuuuguaagcaggcuauccagcggcugaaagccccugcgcagauguccauucaacuuaucaauaaggccgugaacgcucugaucaaugaccagcucauuaugaagaaccaccugagagacaucauggggauucccuauugcaauuacucuaaauauuguuaccugaaccacacagugaccggaaagacgagccucccuaaaugcugucuggucuccaauggcagcuaccuuaacgagacacauuucucugaugacaucgaacagcaagccgauaauaugauuaccgagaugcugcagaaggaguauauggaacggcaggggaaaaccccgcucggacugguugaccuguucguguuuuccaccagcuucuaccuuaucucuaucuuucuccaccuggugaagauucccacacaucgccacgucgugggcaaaccuugccccaagccucauagacugaaccacaugggcaucuguagcugcggguucuauaagcagcccggaguuccggugcgguggaaacgcugaggacuaguuauaagacugacuagcccgaugggccucccaacgggcccuccuccccuccuugcaccgagauuaaucaaaggcucuuuucagagccaccaaaaaaaaaaaaaaaaaaaaaaaaaaaaaaaaaaaaaaaaaaaaaaaaaaaaaaaaaaaaaaaaagaauu

SEQ ID NO: 34564 - RNA, 1658 nt, Artificial Sequence
  mRNA product Design i-3 (hSL-A64-N5) comprising derived and/or modified sequence from LASV(Z0947-SLE-2011;Clade IV)__AIT17840__GPCmut8 (opt5)
aggagaaagcuuaccaugggccagaucgugaccuucuuucaagaggucccccacguuauugaagaggugaugaacaucgugcugauugcccucagcauccuggcuguccuuaaggggcuguacaauuucgccacaugcggacucgugggccugguuacguuucuucugcucugugggagauccugcaccauuucucuguauaaaggaguguacgaacugcagacacucgagcugaacauggaaacccuuaauauguguaugccucugagcugcacaaagaacaauucccaucacuauaucauggucggcaacgagaccgggcucgagcugacacuuaccaauacgucuaucauuaaccauaaauucuguaaucugagcgacgcgcacaagaaaaaccucuacgaucaugcucugauguccaucauuucuaccuuucaccugagcaucccgaauuucaaccaguaugaagccauguccugcgacuuuaauggaggcaagauuagcgugcaguacaaccucucucacuccuaugccggcgaugcugccaaucauugugggacaguugcuaacggagugcugcaaaccuucaugcggauggccuggggcgggagcuacaucgcgcuugacucuggacgcgauagaugggacugcauuaugacauccuaccaguaucugaucauccagaacaccacgugggaggaucacugucaguuuagccggcccucuccuauuggcuaccucgggcugcuuucccaacgcacaagagacaucuauauuagccggcgccugcucggaaccuucacauggacccuguccgauucugaaggcaaggacacccccggcggguacugccugacaagauggaugcucaucgaggccgagcugaaauguuuuggaaauacggcugucgccaagugcaacgaaaaacaugaugaggaguucugcgacaugcuucggcuguuugauuucuguaagcaggcuauucagcgccucaaagccccugcgcagaugagcauccaacugaucaauaaggccgugaacgcucuuauuaaugaccagcugaucaugaagaaccaccucagagacauuaugggcauccccuauugcaauuacuccaaauauuguuaccugaaccacaccacaaccgggaagacaagccugccuaaaugcugucucgugucuaauggauccuaccugaacgaaacccauuucagcgaugacauugaacagcaagccgauaauaugaucacggagaugcuucagaaggaguauauggaacggcagggcaaaacaccgcuggggcucgucgaccuguuuguuuucucuaccagcuuuuaccugaucuccauuuuccuucaccucgugaagauccccacccaucgccacauugugggaaaaccuugccccaagccucauagacugaaccacaugggcaucuguucuugcggccuguauaagcagcccggggucccggugaaauggaagcggugaggacuaguuauaagacugacuagcccgaugggccucccaacgggcccuccuccccuccuugcaccgagauuaaucaaaggcucuuuucagagccaccaaaaaaaaaaaaaaaaaaaaaaaaaaaaaaaaaaaaaaaaaaaaaaaaaaaaaaaaaaaaaaaaagaauu

SEQ ID NO: 34565 - RNA, 1689 nt, Artificial Sequence
  mRNA product Design i-3 (hSL-A100) comprising derived and/or modified sequence from LASV(Josiah;Clade IV)__NP_694870__GPCmut8 (opt1)
aggagaaagcuuaccaugggccagaucgugaccuucuuccaggaggucccccacgugaucgaggaggugaugaacaucguccugaucgcccucagcgugcuggccgugcugaaggggcucuacaacuucgcgaccugcggccuggucgggcuggugacguuccuccugcugugcggccgcuccugcaccaccagccucuacaaggggguguacgagcugcagacccuggagcucaacauggagacgcugaacaugugcaugccgcuguccugcaccaagaacaacagccaccacuacaucauggucggcaacgagaccggccucgagcugacgcugaccaacaccuccaucaucaaccacaaguucugcaaccucagcgacgcccacaagaagaaccuguacgaccacgcccugauguccaucaucagcaccuuccaccucuccauccccaacuucaaccaguacgaggccaugagcugcgacuucaacgggggcaagaucuccgugcaguacaaccugagccacuccuacgccggggacgcggccaaccacugcggcacgguggccaacgggguccugcagaccuucaugcggauggccuggggcggcagcuacaucgcgcucgacuccgggcgcggcaacugggacugcaucaugaccagcuaccaguaccugaucauccagaacaccacgugggaggaccacugccaguucucccggcccagccccaucggguaccugggccuccugucccagcgcacccgggacaucuacaucagccgccggcugcucggcaccuucaccuggacgcugagcgacuccgaggggaaggacaccccgggcggguacugccugacccgcuggaugcucaucgaggccgagcugaagugcuucggcaacaccgccguggccaagugcaacgagaagcacgacgaggaguucugcgacaugcugcggcuguucgacuucugcaagcaggccauccagcgccugaaggcgcccgcccagaugagcauccagcugaucaacaaggccgugaacgcccucaucaacgaccagcugaucaugaagaaccaccuccgggacaucauggggauccccuacugcaacuacuccaaguacugcuaccucaaccacacgaccaccggccgcaccagccugcccaagugcugccuggucuccaacggcagcuaccucaacgagacgcacuucuccgacgacaucgagcagcaggccgacaacaugaucaccgagaugcugcagaaggaguacauggagcggcaggggaagacgccccugggccucguggaccuguucguguucagcaccuccuucuaccugaucagcaucuuccugcaccucgucaagaucccgacccaccgccacaucguggggaaguccugccccaagccccaccggcugaaccacaugggcaucugcagcugcgggcuguacaagcagcccggcgugccggucaaguggaagcgcugaggacuaguuauaagacugacuagcccgaugggccucccaacgggcccuccuccccuccuugcaccgagauuaaucaaaggcucuuuucagagccaccaaaaaaaaaaaaaaaaaaaaaaaaaaaaaaaaaaaaaaaaaaaaaaaaaaaaaaaaaaaaaaaaaaaaaaaaaaaaaaaaaaaaaaaaaaaaaaaaaaaaa

SEQ ID NO: 34566 - RNA, 1686 nt, Artificial Sequence
  mRNA product Design i-3 (hSL-A100) comprising derived and/or modified sequence from LASV(LP;Clade I)__AAF86701__GPCmut8 (opt1)
aggagaaagcuuaccaugggccagaucaucaccuucuuccaggaggugccccacgucaucgaggaggugaugaacaucgugcugaucgcccucagccugcuggccauccucaaggggcuguacaacaucgcgaccugcggcaucaucgggcuggucgccuuccucuuccugugcggcaaguccugcagccugacgcucaagggcggguacgagcugcagacccuggagcucaacauggagacccugaacaugugcaugccgcuguccugcacgaagaacagcucccaccacuacauccgcgugggcaacgagaccgggcucgagcugacccugaccaacacgagcaucaucaaccacaaguucugcaaccucuccgacgcccacaagaagaaccuguacgaccacgcccugaugagcaucaucuccaccuuccaccucagcauccccaacuucaaccaguacgaggccauguccugcgacuucaacggcgggaagaucagcgugcaguacaaccugucccacagcuacgcgggcgacgccgccgagcacugcgggaccgucgccaacggcgugcugcagaccuucaugcggauggcguggggcgggcgcuacaucgcccucgacuccggcaaggggaacugggacugcaucaugacgagcuaccaguaccugaucauccagaacaccaccugggaggaccacugccaguucucccggcccagccccaucggcuaccugggccuccugucccagcgcacccgggacaucuacaucagccgccggcugcucgggacguucaccuggacccugagcgacuccgagggcaacgagacccccgggggcuacugccugacgcgcuggaugcucaucgaggccgagcugaagugcuucgggaacaccgccguggccaagugcaacgagaagcacgacgaggaguucugcgacaugcugcggcuguucgacuucugcaagcaggcgauccgccggcugaaggcccccgcccagaugagcauccagcugaucaacaaggccgucaacgcccucaucaacgaccagcugaucaugaagaaccaccuccgcgacaucaugggcauccccuacugcaacuacuccaaguacugcuaccucaaccacaccagcuccggccggaccagccugcccaagugcugccugaucuccaacgggagcuaccucaacgagacgcaguucuccgacgacaucgagcagcaggcggacaacaugaucaccgagaugcugcagaaggaguacaucgagcgccagggcaagaccccgcuggggcucguggacaucuucaucuucagcaccuccuucuaccugaucagcaucuuccugcaccugaucaagaucccgacgcaccggcacaucgugggcaagcccugccccaagccccaccgccucaaccacaugggggucugcuccugcggccuguacaagcacccgggcgugcccaccaaguggaagcggugaggacuaguuauaagacugacuagcccgaugggccucccaacgggcccuccuccccuccuugcaccgagauuaaucaaaggcucuuuucagagccaccaaaaaaaaaaaaaaaaaaaaaaaaaaaaaaaaaaaaaaaaaaaaaaaaaaaaaaaaaaaaaaaaaaaaaaaaaaaaaaaaaaaaaaaaaaaaaaaaaaaaa

SEQ ID NO: 34567 - RNA, 1686 nt, Artificial Sequence
  mRNA product Design i-3 (hSL-A100) comprising derived and/or modified sequence from LASV(803213;Clade II)__AAF86703__GPCmut8 (opt1)
aggagaaagcuuaccaugggccagaucaucaccuucuuccaggaggugccccacgucaucgaggaggugaugaacaucgugcugaucgcccucagccugcuggccauccucaaggggaucuacaacgucgcgaccugcggccuguucgggcugaucuccuuccuccugcugugcggccgcagcugcuccgugacguacaaggggguguacgagcuccagacccuggagcugaacauggccaaccucaacaugugcaugccgcugagcugcaccaagaacaacucccaccacuacaucauggucggcaacgagacgggccuggagcucacccugaccaacaccagcaucaucaaccacaaguucugcaaccuguccgacgcccacaagaagaaccucuacgaccacgcccugaugagcaucaucuccacguuccaccugagcauccccaacuucaaccaguacgaggccauguccugcgacuucaacgggggcaagaucagcgugcaguacaaccucucccacagcuucgcgguggacgccgccaaccacugcgggaccaucgccaacggcguccugcagaccuucaugcggauggcguggggcggguccuacaucgcccuggacagcggcaaggggaacugggacugcaucaugaccuccuaccaguaccucaucauccagaacacgaccugggaggaccacugccaguucagccgccccucccccaucggcuaccuggggcugcucagccagcggacccgcgacaucuacaucagccggcgccugcugggcaccuucacguggacccucuccgacagcgagggcaacgaggcccccgggggcuacugccugacccgguggaugcugaucgaggccgagcucaagugcuucgggaacaccgccguggcgaagugcaacgagaagcacgacgaggaguucugcgacaugcugcgccuguucgacuucugcaagcaggccaucaagcggcucaagacgcccgcccagauguccauccagcugaucaacaaggccgugaacgcccugaucaacgaccagcucaucaugaagaaccaccuccgcgacaucaugggcauccccuacugcaacuacagccgguacugcuaccugaaccacaccgucaccgggaagaccucccugccccgcugcugccuggugagcaacggcuccuaccugaacgagacgcacuucagcgacgacaucgagcagcaggcggacaacaugaucaccgagaugcuccagaaggaguacauggaccggcagggcaagaccccgcuggggcugguggaccucuucgucuucuccaccagcuucuaccugaucuccaucuuccugcaccuggugaagaucccgacgcaccgccacaucgugggcaagcccugccccaagccccaccggcucaaccacauggggaucugcagcugcggccuguacaagcacccggggguccccgugaaguggaagcgcugaggacuaguuauaagacugacuagcccgaugggccucccaacgggcccuccuccccuccuugcaccgagauuaaucaaaggcucuuuucagagccaccaaaaaaaaaaaaaaaaaaaaaaaaaaaaaaaaaaaaaaaaaaaaaaaaaaaaaaaaaaaaaaaaaaaaaaaaaaaaaaaaaaaaaaaaaaaaaaaaaaaaa

SEQ ID NO: 34568 - RNA, 1686 nt, Artificial Sequence
  mRNA product Design i-3 (hSL-A100) comprising derived and/or modified sequence from LASV(GA391;Clade III)__CAA36645__GPCmut8 (opt1)
aggagaaagcuuaccaugggccagaucgugaccuucuuccaggaggucccccacgugaucgaggaggugaugaacaucguccugaucgcccucagcauccuggccauccugaaggggcucuacaacguggcgaccugcggccugaucgggcuggugacguuccuccugcuguccggccgcagcugcucccucaucuacaaggggaccuacgagcugcagacccuggagcucaacauggagacccugaacaugugcaugccgcugagcugcaccaagaacaacucccaccacuacauccgggucggcaacgagaccggccucgagcugacccugacgaacaccagcauccucaaccacaaguucugcaaccuguccgacgcccacaagcgcaaccuguacgaccacagccucauguccaucaucagcaccuuccaccuguccauccccaacuucaaccaguacgaggccaugagcugcgacuucaacgggggcaagaucaccgugcaguacaaccugucccacagcuucgccguggacgccgcggggcacugcggcacgcucgccaacgggguccugcagaccuucaugcggauggccuggggcggcuccuacaucgcccuggacagcgggcgcggcaacugggacugcaucaugaccuccuaccaguaccucaucauccagaacaccacgugggacgaccacugccaguucagccggcccucccccaucggguaccugggccugcucagccagcgcacccgggacaucuacaucagccgccggcugcugggcaccuucaccuggacgcucuccgacagcgaggggaacgagaccccgggcggguacugccugacccgcuggaugcugaucgaggcggagcucaagugcuucggcaacaccgccguggccaagugcaacgagaagcacgacgaggaguucugcgacaugcugcggcuguucgacuucugcaagcaggccauccgccggcucaagacgcccgcccagauguccauccagcugaucaacaaggcggugaacgcccugaucaacgaccagcucaucaugaagaaccaccuccgcgacaucauggggauccccuacugcaacuacagccgguacugcuaccugaaccacaccuccaccggcaagaccagccugccccgcugcugccugaucuccaacggcagcuaccugaacgagacgaaguucuccgacgacaucgagcagcaggccgacaacaugaucaccgagaugcuccagaaggaguacaucgaccggcaggggaagacgccccugggccuggucgaccuguucguguucagcaccuccuucuaccucaucagcaucuuccugcaccuggugaagaucccgacccaccgccacaucgucgggaagcccugccccaagccccaccggcucaaccacaugggcaucugcuccugcgggcuguacaagcagccgggcgugcccgugcgcuggaagcggugaggacuaguuauaagacugacuagcccgaugggccucccaacgggcccuccuccccuccuugcaccgagauuaaucaaaggcucuuuucagagccaccaaaaaaaaaaaaaaaaaaaaaaaaaaaaaaaaaaaaaaaaaaaaaaaaaaaaaaaaaaaaaaaaaaaaaaaaaaaaaaaaaaaaaaaaaaaaaaaaaaaaa

SEQ ID NO: 34569 - RNA, 1689 nt, Artificial Sequence
  mRNA product Design i-3 (hSL-A100) comprising derived and/or modified sequence from LASV(AV;Clade V)__CCA30314__GPCmut8 (opt1)
aggagaaagcuuaccaugggccagaucgugaccuucuuccaggaggucccccacgugaucgaggaggugaugaacaucguccugaucgcccucagcauccuggccgugcugaaggggcucuacaacaucgcgaccugcggccugaucgggcugaucacguuccuccugcugugcggccgcuccugcagcuccaaccucuacaaggggguguacgagcugcagagccuggaccucaacauggagacccugaacaugugcaugccgcuguccugcaccaagaacaacagccaccacuacauccgggucggcaacgacacgggccucgagcugacccugaccaacaccuccauccucaaccacaaguucugcaaccugagcgacgcccacaagaaggaccuguacgaccacgcccucauguccaucaucagcacguuccaccuguccauccccaacuucaaccaguacgaggccaugagcugcgacuucaacgggggcaagaucuccgugcaguacaaccugagccacuccuacgccaucgacgcggccaaccacugcgggaccguggccaacggcauccuccagaccuucaugcgcauggccuggggcgggagcuacaucgcgcuggacuccggccgggggaacugggacugcaucaugaccagcuaccaguaccugaucauccagaacacgaccugggagaaccacugccaguucucccgccccagccccaucggcuaccucgggcugcugagccagcggacccgcgacaucuacaucucccggcgccuccugggcaccuucacguggacccugagcgacuccgagggcaacgccacccccgggggcuacugccucacccgguggaugcugaucgaggccgagcugaagugcuucgggaacacggccgucgccaagugcaacgagaagcacgacgaggaguucugcgacaugcuccgccuguucgacuucugcaagcaggcgaucagccggcugaagucccccgcccagaugagcauccagcucaucaacaaggccgugaacgcccugaucaacgaccagcugaucaugaagaaccaccuccgcgacaucaugggcauccccuacugcaacuacuccaaguacugcuaccugaaccacaccaucaccgggaagaccagccugcccaagugcugccucguguccaacggcagcuaccugaacgagacgcacuucuccgacgacaucgagcagcaggccgacaacaugaucaccgagaugcugcagaaggaguacauggagcggcagggcaagaccccgcucgggcuggucgaccuguucguguucagcaccuccuucuaccugaucagcaucuuccuccgccuggugaagaucccgacgcaccggcacaucgucggcaagcccugccccaagccccaccgccugaaccacauggggaucugcuccugcggccucuacaagcagccgggggugcccgugcgguggaagcgcugaggacuaguuauaagacugacuagcccgaugggccucccaacgggcccuccuccccuccuugcaccgagauuaaucaaaggcucuuuucagagccaccaaaaaaaaaaaaaaaaaaaaaaaaaaaaaaaaaaaaaaaaaaaaaaaaaaaaaaaaaaaaaaaaaaaaaaaaaaaaaaaaaaaaaaaaaaaaaaaaaaaaa

SEQ ID NO: 34570 - RNA, 1686 nt, Artificial Sequence
  mRNA product Design i-3 (hSL-A100) comprising derived and/or modified sequence from LASV(Togo/2016/7082;Clade VI)__AMR44577__GPCmut8 (opt1)
aggagaaagcuuaccaugggccagaucaucaccuucuuccaggaggugccccacgucaucgaggaggugaugaacaucgugcugaucgcccucagccugcuggccauccucaagggggucuacaacguggcgaccugcggcaucaucgggcuggugacguuccuguuccucugcggccgcuccugcagccugaucuacaagggguccuacgagcugcagacccucgagcugaacauggagacccugaacaugugcaugccgcucagcugcacgaagaacuccagccaccacuacauccgggucggcaacgagaccggccuggagcugacccucaccaacacguccaucaucaaccacaaguucugcaaccugagcgacgcccacaagcgcaaccuguacgaccacgcccucauguccauccugagcaccuuccaccuguccauccccaacuucaaccaguacgaggccaugagcugcgacuucaacgggggcaagaucuccgugcaguacaaccucagccacgccuacgcgguggacgccgccgagcacugcgggaccgucgccaacggcgugcugcagaccuucaugcggauggcguggggcggguccuacaucgcccuggacagcggccgcgggaacugggacugcaucaugacguccuaccaguaccucaucauccagaacaccaccugggaggaccacugccaguucagccggcccucccccaucggcuaccuggggcugcucagccagcgcacccgggacaucuacaucagccgccggcugcugggcacguucaccuggacccucuccgacagcgagggcaacgagacccccgggggcuacugccugacgcgcuggaugcugaucgaggccgagcucaagugcuucgggaacaccgccguggccaagugcaacgagaagcacgacgaggaguucugcgacaugcugcggcuguucgacuucugcaagcaggcgauccagcgccucaagucccccgcccagaugagcauccagcugaucaacaaggccgucaacgcccugaucaacgaccagcucaucaugaagaaccaccuccgggacaugaugggcauccccuacugcaacuacuccaaguacugcuaccugaaccacaccagcuccgggcgcaccagccugcccaagugcugccugguguccaacggcagcuaccugaacgagacgcacuucuccgacgacaucgagcagcaggccgacaacaugaucaccgagaugcuccagaaggaguacaucgaccggcagggcaagaccccgcuggggcugguggaccucuucgucuucagcaccuccuucuaccugaucagcaucuuccugcaccugaucaagaucccgacgcaccgccacaucgugggcaagcccugccccaagccccaccggcucaaccacauggggaucugcuccugcggccuguacaagcagccgggggugcccacccgcuggaagcggugaggacuaguuauaagacugacuagcccgaugggccucccaacgggcccuccuccccuccuugcaccgagauuaaucaaaggcucuuuucagagccaccaaaaaaaaaaaaaaaaaaaaaaaaaaaaaaaaaaaaaaaaaaaaaaaaaaaaaaaaaaaaaaaaaaaaaaaaaaaaaaaaaaaaaaaaaaaaaaaaaaaaa

SEQ ID NO: 34571 - RNA, 1686 nt, Artificial Sequence
  mRNA product Design i-3 (hSL-A100) comprising derived and/or modified sequence from LASV(KAK-428;Clade n.d. (VII))__ANH09740__GPCmut8 (opt1)
aggagaaagcuuaccaugggccagaucgugaccuucuuccaggaggucccccacgugaucgaggaggugaugaacaucguccugaucgcccucagccugcuggccauccucaaggggcuguacaacuucgcgaccugcggcgugaucgggcugaucacguuccuccugcugugcggccgcuccugcagcgccaccuacaaggggcaguacgagcuccagacccuggagcugaacauggagucccucaacaugugcaugccgcugagcugcacgaagaacaacucccaccacuacauccgggccggcaacaacaccggccuggagcucacccugaccaacacgagcaucaucucccacaaguucugcaaccugagcgacgcccacaagaagaaccucuacgaccacacccugauguccaucaucaccaccuuccaccugagcauccccaacuucaaccaguacgaggccauguccugcgacuucaacgggggcaagaucagcauccaguacaaccucucccacagcuacgcgggggacgccgcccagcacugcggcacgguggccaacgggguccugcagaccuucaugcgcauggcguggggcggcuccuaccuggcccucgacagcgggcggcgcggcugggacugcaucaucuccagcuaccaguaccugaucauccagaacaccaccugggacgaccacugccaguucucccggcccagccccaucggguaccugggcuucgugagccagaagacgcgcgacaucuacaucucccggcgccuccugggcaccuucaccuggacccugagcgacuccgaggggcacgacaugccgggcggguacugccucacgcgguggaugcugaucgaggccgaccugaagugcuucggcaacaccgccguggccaagugcaacgagaagcacgacgaggaguucugcgacauguggcgccucuucgacuucugcaagcaggcgauccagcggcugaaggcccccgcccagaugaacauccagcugaucaacaaggccgucaacgcccucaucaacgaccagcugaugaugaagaaccaccuccgcgacaucauggggauccccuacugcaacuacagcaaguucugcuaccugaacaacaccaccacgggccggaccucccugccccgcugcugccugaucagcaacggcuccuaccucaacgagacccacuucagcgacgacaucgagcagcaggcggacaacaugaucaccgagaugcugcagaaggaguacauggaccggcaggggaagacgccccugggccucguggaccuguucguguucuccaccagcuucuaccugaucaccaucuuccuccaccuggucaagaucccgacccaccgccacaucguggggaagcccugccccaagccccaccggcugaaccacaugggcaucugcuccugcgggcuguacaagcagccgggcgugcccguccgcuggaagcggugaggacuaguuauaagacugacuagcccgaugggccucccaacgggcccuccuccccuccuugcaccgagauuaaucaaaggcucuuuucagagccaccaaaaaaaaaaaaaaaaaaaaaaaaaaaaaaaaaaaaaaaaaaaaaaaaaaaaaaaaaaaaaaaaaaaaaaaaaaaaaaaaaaaaaaaaaaaaaaaaaaaaa

SEQ ID NO: 34572 - RNA, 1686 nt, Artificial Sequence; identical to SEQ ID NO: 34566
  mRNA product Design i-3 (hSL-A100) comprising derived and/or modified sequence from LASV(Pinneo-NIG-1969;Clade I)__AIT17836__GPCmut8 (opt1)

SEQ ID NO: 34573 - RNA, 1686 nt, Artificial Sequence
  mRNA product Design i-3 (hSL-A100) comprising derived and/or modified sequence from LASV(ISTH0009-NIG-2011;Clade II)__AIT17404__GPCmut8 (opt1)
aggagaaagcuuaccaugggccagaucaucaccuucuuccaggaggugccccacgucaucgaggaggugaugaacaucgugcugaucgcccucagccugcuggccauccucaaggggaucuacaacgucgcgaccugcggccuguucgggcugguguccuuccuccugcugugcggccgcagcugcuccacgaccuacaaggggguguacgagcuccagacccuggagcuggacauggccagccucaacaugugcaugccgcuguccugcacgaagaacaacagccaccacuacaucauggucggcaacgagaccggccuggagcucacccugaccaacacguccaucaucaaccacaaguucugcaaccugagcgacgcccacaagaagaaccucuacgaccacgcccugauguccaucaucagcaccuuccaccuguccauccccaacuucaaccaguacgaggccaugagcugcgacuucaacgggggcaagaucuccgugcaguacaaccucagccacgcguacgccguggacgccgccaaccacugcgggaccaucgcgaacggcguccugcagaccuucaugcggauggccuggggcggguccuacaucgcccuggacagcggcaagggguccugggacugcaucaugacgagcuaccaguaccucaucauccagaacaccaccugggaggaccacugccaguucucccgccccagccccaucggcuaccuggggcugcucagccagcggacccgcgacaucuacaucucccggcgccugcugggcacguucaccuggacccucagcgacuccgagggcaacgagacccccgggggcuacugccugacgcgguggaugcugaucgaggccgagcucaagugcuucgggaacaccgccguggcgaagugcaacgagaagcacgacgaggaguucugcgacaugcugcgccuguucgacuucugcaagcaggccauccggcgccucaagacccccgcccagaugagcauccagcugaucaacaaggccgugaacgcccugaucaacgaccagcucaucaugaagaaccaccuccgggacaucaugggcaucccguacugcaacuacuccaaguacugcuaccugaaccacaccgucacggggaagaccagccugccccgcugcugccugguguccaacggcagcuaccugaacgagacccacuucuccgacgacaucgagcagcaggcggacaacaugaucaccgagcuccugcagaaggaguacauggaccggcagggcaagacgccccuggggcucguggaccuguucgucuucagcaccuccuucuaccugaucagcaucuuccugcaccucaucaagaucccgacccaccgccacaucaccggcaagcccugccccaagccccaccggcugaaccacauggggaucugcuccugcggccuguacaagcacccgggggugcccgugaaguggaagcgcugaggacuaguuauaagacugacuagcccgaugggccucccaacgggcccuccuccccuccuugcaccgagauuaaucaaaggcucuuuucagagccaccaaaaaaaaaaaaaaaaaaaaaaaaaaaaaaaaaaaaaaaaaaaaaaaaaaaaaaaaaaaaaaaaaaaaaaaaaaaaaaaaaaaaaaaaaaaaaaaaaaaaa

SEQ ID NO: 34574 - RNA, 1686 nt, Artificial Sequence
  mRNA product Design i-3 (hSL-A100) comprising derived and/or modified sequence from LASV(ISTH2010-NIG-2012;Clade II)__AIT17482__GPCmut8 (opt1)
aggagaaagcuuaccaugggccagaucaucaccuucuuccaggaggugccccacgucaucgaggaggugaugaacaucgugcugaucgcccucagccugcuggccauccucaaggggaucuacaacgucgcgaccugcggccuguucgggcugguguccuuccuccugcugugcggccgcagcugcuccacgaccuacaaggggguguacgagcuccagacccuggagcuggacauggccagccucaacaugugcaugccgcuguccugcacgaagaacaacagccaccacuacaucauggucggcaacgagaccggccuggagcucacccugaccaacacguccaucaucaaccacaaguucugcaaccugagcgacgcccacaagaagaaccucuacgaccacgcccugauguccaucaucagcaccuuccaccuguccauccccaacuucaaccaguacgaggccaugagcugcgacuucaacgggggcaagaucuccgugcaguacaaccucagccacgcguacgccguggacgccgccaaccacugcgggaccaucgcgaacggcguccugcagaccuucaugcggauggccuggggcggguccuacaucgcccuggacagcggcaagggguccugggacugcaucaugacgagcuaccaguaccucaucauccagaacaucaccugggaggaccacugccaguucucccgccccagccccaucggcuaccuggggcugcucagccagcggacccgcgacaucuacaucucccggcgccugcugggcaccuucacguggacccucagcgacuccgagggcaacgagacccccgggggcuacugccugacccgguggaugcugaucgaggccgagcucaagugcuucgggaacacggccguggcgaagugcaacgagaagcacgacgaggaguucugcgacaugcugcgccuguucgacuucugcaagcaggccauccggcgccucaagacccccgcccagaugagcauccagcugaucaacaaggccgugaacgcccugaucaacgaccagcucaucaugaagaaccaccuccgggacaucaugggcauccccuacugcaacuacuccaaguacugcuaccugaaccacaccgucaccgggaagacgagccugccccgcugcugccugguguccaacggcagcuaccugaacgagacccacuucuccgacgacaucgagcagcaggcggacaacaugaucaccgagcuccugcagaaggaguacaucgaccggcagggcaagaccccgcuggggcucguggaccuguucgucuucagcacguccuucuaccugaucagcaucuuccugcaccucgugaagaucccgacccaccgccacguggucggcaagcccugccccaagccccaccggcugaaccacauggggaucugcuccugcggccuguacaagcacccgggggugcccgugaaguggaagcgcugaggacuaguuauaagacugacuagcccgaugggccucccaacgggcccuccuccccuccuugcaccgagauuaaucaaaggcucuuuucagagccaccaaaaaaaaaaaaaaaaaaaaaaaaaaaaaaaaaaaaaaaaaaaaaaaaaaaaaaaaaaaaaaaaaaaaaaaaaaaaaaaaaaaaaaaaaaaaaaaaaaaaa

SEQ ID NO: 34575 - RNA, 1686 nt, Artificial Sequence
  mRNA product Design i-3 (hSL-A100) comprising derived and/or modified sequence from LASV(Lassa virus/H.sapiens-wt/NGA/2015/ISTH_0543;Clade II)__AVO03639__GPCmut8 (opt1)
aggagaaagcuuaccaugggccagaucaucaccuucuuccaggaggugccccacgucaucgaggaggugaugaacaucgugcugaucgcccucagccugcuggccauccucaaggggaucuacaacgucgcgaccugcggccuguucgggcugguguccuuccuccugcugugcggccgcagcugcuccacgaccuacaaggggguguacgagcuccagacccuggagcuggacauggccaaccucaacaugugcaugccgcugagcugcacgaagaacaacucccaccacuacaucauggucggcaacgagaccggccuggagcucacccugaccaacacgagcaucaucaaccacaaguucugcaaccuguccgacgcccacaagaagaaccucuacgaccacgcccugaugagcaucaucuccaccuuccaccugagcauccccaacuucaaccaguacgaggccauguccugcgacuucaacgggggcaagaucagcgugcaguacaaccucucccacaccuacgcgguggacgccgccaaccacugcgggaccaucgccaacggcguccugcagacguucaugcggauggcguggggcgggagcuacaucgcccuggacuccggcaaggggagcugggacugcaucaugaccuccuaccaguaccucgugauccagaacaccaccugggaggaccacugccaguucagccgccccucccccaucggcuaccuggggcugcucagccagcggacgcgcgacaucuacaucagccggcgccugcugggcaccuucaccuggacccucuccgacagcgagggcaacgagacgcccgggggcuacugccugacccgguggaugcugaucgaggccgagcucaagugcuucgggaacaccgccguggccaagugcaacgagaagcacgacgaggaguucugcgacaugcugcgccuguucgacuucugcaagcaggcgauccggcgccucaagacccccgcccagauguccauccagcugaucaacaaggccgucaacgcccugaucaacgaccagcucaucaugaagaaccaccuccgggacaucaugggcauccccuacugcaacuacagcaaguacugcuaccugaaccacacggugaccgggaagaccucccugccccgcugcugccuggugagcaacggcuccuaccugaacgagacccacuucagcgacgacaucgagcagcaggccgacaacaugaucacggagcuccugcagaaggaguacaucgaccggcagggcaagaccccgcuggggcucgucgaccuguucguguucuccaccagcuucuaccugaucuccaucuuccugcaccucgugaagaucccgacccaccgccacaucacgggcaagcccugccccaagccccaccggcugaaccacauggggaucugcagcugcggccuguacaagcacccggggguccccgugaaguggaagcgcugaggacuaguuauaagacugacuagcccgaugggccucccaacgggcccuccuccccuccuugcaccgagauuaaucaaaggcucuuuucagagccaccaaaaaaaaaaaaaaaaaaaaaaaaaaaaaaaaaaaaaaaaaaaaaaaaaaaaaaaaaaaaaaaaaaaaaaaaaaaaaaaaaaaaaaaaaaaaaaaaaaaaa

SEQ ID NO: 34576 - RNA, 1686 nt, Artificial Sequence
  mRNA product Design i-3 (hSL-A100) comprising derived and/or modified sequence from LASV(Lassa virus/H.sapiens-wt/NGA/2016/ISTH_0009;Clade II)__AVO03571__GPCmut8 (opt1)
aggagaaagcuuaccaugggccagaucaucaccuucuuccaggaggugccccacgucaucgaggaggugaugaacaucgugcugaucgcccucagccugcuggccauccucaaggggaucuacaacgucgcgaccugcggccugcuggggcucguguccuuccugcugcucugcggccgcagcugcuccacgaccuacaaggggguguacgagcugcagacccuggagcucgacauggccagccugaacaugugcaugccgcuguccugcacgaagaacaacagccaccacuacaucauggucggcaacgagaccggccucgagcugacccugaccaacacguccaucaucaaccacaaguucugcaaccucagcgacgcccacaagaagaaccuguacgaccacgcccugauguccaucaucagcaccuuccaccucuccauccccaacuucaaccaguacgaggccaugagcugcgacuucaacgggggccggaucuccgugcaguacaaccugagccacuccuacgcgguggacgccgccaaccacugcgggaccaucgccaacggcguccugcagaccuucaugcgcauggcguggggcgggagcuacaucgcccucgacuccggcaaggggagcugggacugcaucaugacguccuaccaguaccugaucauccagaacaccaccugggaggaccacugccaguucagccggcccagccccaucggcuaccuggggcuccugucccagcgcacccgggacaucuacaucagccgccggcugcucggcacguucaccuggacccuguccgacagcgagggcaacgagacccccgggggcuacugccugacgcgcuggaugcucaucgaggccgagcugaagugcuucgggaacaccgccguggccaagugcaacgagaagcacgacgaggaguucugcgacaugcugcggcuguucgacuucugcaagcaggcgauccgccggcugaagacccccgcccagauguccauccagcugaucaacaaggccgugaacgcccucaucaacgaccagcugaucaugaagaaccaccuccgcgacaucaugggcaucccguacugcaacuacagcaaguacugcuaccucaaccacaccgucacggggaagaccucccugccccggugcugccuggugagcaacggcuccuaccucaacgagacccacuucagcgacgacaucgagcagcaggccgacaacaugaucaccgagcugcugcagaaggaguacaucgaccgccagggcaagacgccccucgggcugguggaccuguucgucuucuccaccagcuucuaccugaucuccaucuuccuccaccuggugaagaucccgacccaccggcacaucaccggcaagcccugccccaagccccaccgccugaaccacauggggaucugcagcugcggccucuacaaccacccgggggugcccgucaaguggaagcggugaggacuaguuauaagacugacuagcccgaugggccucccaacgggcccuccuccccuccuugcaccgagauuaaucaaaggcucuuuucagagccaccaaaaaaaaaaaaaaaaaaaaaaaaaaaaaaaaaaaaaaaaaaaaaaaaaaaaaaaaaaaaaaaaaaaaaaaaaaaaaaaaaaaaaaaaaaaaaaaaaaaaa

SEQ ID NO: 34577 - RNA, 1686 nt, Artificial Sequence
  mRNA product Design i-3 (hSL-A100) comprising derived and/or modified sequence from LASV(Lassa virus/H.sapiens-wt/NGA/2016/ISTH_0017;Clade II)__AVO03567__GPCmut8 (opt1)
aggagaaagcuuaccaugggccagaucaucaccuucuuccaggaggugccccacgucaucgaggaggugaugaacaucgugcugaucgcccucagccugcuggccauccucaaggggaucuacaacgucgcgaccugcggccuguucgggcugguguccuuccuccugcugugcggccgcagcugcuccacgaccuacaaggggguguacgagcuccagacccuggagcuggacauggccagccucaacaugugcaugccgcuguccugcacgaagaacaacagccaccacuacaucauggucggcaacgagaccggccuggagcucacccugaccaacacguccaucaucaaccacaaguucugcaaccugagcgacgcccacaagaagaaccucuacgaccacgcccugauguccaucaucagcaccuuccaccuguccauccccaacuucaaccaguacgaggccaugagcugcgacuucaacgggggcaagaucuccgugcaguacaaccucagccacaccuacgcgaucgacgccgccaaccacugcgggaccaucgccaacggcgugcugcagacguucaugcggauggcguggggcggguccuacaucgcccuggacagcggcaagggguccugggacugcaucaugaccagcuaccaguaccucaucauccagaacaccaccugggaggaccacugccaguucucccgccccagccccaucggcuaccuggggcugcucagccagcggacgcgcgacaucuacaucucccggcgccugcugggcaccuucaccuggacccucagcgacuccgagggcaacgagacgcccgggggcuacugccugacccgguggaugcugaucgaggccgagcucaagugcuucgggaacaccgccgucgccaagugcaacgagaagcacgacgaggaguucugcgacaugcugcgccuguucgacuucugcaagcaggcgauccggcgccucaagacccccgcccagaugagcauccagcugaucaacaaggccgugaacgcccugaucaacgaccagcucaucaugaagaaccaccuccgggacaucaugggcauccccuacugcaacuacuccaaguacugcuaccugaaccacacggugaccgggaagaccagccugccccgcugcugccuggucuccaacggcagcuaccugaacgagacccacuucuccgacgacaucgagcagcaggccgacaacaugaucacggagcuccugcagaaggaguacauggaccggcagggcaagaccccgcuggggcucguggaccuguucguguucagcaccuccuucuaccugaucagcaucuuccugcaccucguccgcaucccgacccaccggcacgugaucggcaagcccugccccaagccccaccgccugaaccacauggggaucugcuccugcggccuguacaagcacccgggggugcccgucaaguggaagcggugaggacuaguuauaagacugacuagcccgaugggccucccaacgggcccuccuccccuccuugcaccgagauuaaucaaaggcucuuuucagagccaccaaaaaaaaaaaaaaaaaaaaaaaaaaaaaaaaaaaaaaaaaaaaaaaaaaaaaaaaaaaaaaaaaaaaaaaaaaaaaaaaaaaaaaaaaaaaaaaaaaaaa

SEQ ID NO: 34578 - RNA, 1686 nt, Artificial Sequence
  mRNA product Design i-3 (hSL-A100) comprising derived and/or modified sequence from LASV(Lassa virus/H.sapiens-wt/NGA/2018/ISTH_0959;Clade II)__AVV65099__GPCmut8 (opt1)
aggagaaagcuuaccaugggccagaucaucaccuucuuccaggaggugccccacgucaucgaggaggugaugaacaucgugcugaucgcccucagccugcuggccauccucaaggggaucuacaacgucgugaccugcggccuguucgggcugguguccuuccuccugcugugcggccgcagcugcuccacgaccuacaagggggucuacgagcuccagacccuggagcuggacauggcgagccucaacaugugcaugccgcuguccugcacgaagaacaacagccaccacuacaucauggugggcaacgagaccggccuggagcucacccugaccaacacguccaucaucaaccacaaguucugcaaccugagcgacgcccacaagaagaaccucuacgaccacgcccugauguccaucaucagcaccuuccaccuguccauccccaacuucaaccaguacgaggccaugagcugcgacuucaacgggggcaagaucuccgugcaguacaaccucagccacgccuacgcgaucgacgccgccaaccacugcgggaccaucgccaacggcguccugcagaccuucaugcggauggcguggggcggguccuacaucgcccuggacagcggcaagggguccugggacugcaucaugacgagcuaccaguaccucaucauccagaacaccaccugggaggaccacugccaguucucccgccccagccccaucggcuaccuggggcugcucagccagcggacccgcgacaucuacaucucccggcgccugcugggcacguucaccuggacccucagcgacuccgagggcaacgagacccccgggggcuacugccugacgcgguggaugcugaucgaggccgagcucaagugcuucgggaacaccgccguggccaagugcaacgagaagcacgacgaggaguucugcgacaugcugcgccuguucgacuucugcaagcaggcgauccggcgccucaagacccccgcccagaugagcauccagcugaucaacaaggccgugaacgcccugaucaacgaccagcucaucaugaagaaccaccuccgggacaucaugggcaucccguacugcaacuacuccaaguacugcuaccugaaccacaccgucacggggaagaccagccugccccgcugcugccugguguccaacggcagcuaccugaacgagacccacuucuccgacgacaucgagcagcaggccgacaacaugaucaccgagcuccugcagaaggaguacaucgaccggcagggcaagacgccccuggggcucguggaccuguucgucuucagcaccuccuucuaccugaucagcaucuuccugcaccucgugaagaucccgacccaccgccacgugaucggcaagcccugccccaagccccaccggcugaaccacauggggaucugcuccugcggccuguacaagcacccggggguccccgugaaguggaagcgcugaggacuaguuauaagacugacuagcccgaugggccucccaacgggcccuccuccccuccuugcaccgagauuaaucaaaggcucuuuucagagccaccaaaaaaaaaaaaaaaaaaaaaaaaaaaaaaaaaaaaaaaaaaaaaaaaaaaaaaaaaaaaaaaaaaaaaaaaaaaaaaaaaaaaaaaaaaaaaaaaaaaaa

SEQ ID NO: 34579 - RNA, 1686 nt, Artificial Sequence
  mRNA product Design i-3 (hSL-A100) comprising derived and/or modified sequence from LASV(LASV003-NIG-2008;Clade II)__AIT17580__GPCmut8 (opt1)
aggagaaagcuuaccaugggccagaucaucaccuucuuccaggaggugccccacgucaucgaggaggugaugaacaucgugcugaucgcccucagccugcuggccauccucaaggggaucuacaacgucgcgaccugcggccuguucgggcugguguccuuccuccugcugugcggccgcagcugcuccacgaccuacaaggggguguacgagcuccagacccuggagcuggacauggccagccucaacaugugcaugccgcuguccugcacgaagaacaacagccaccacuacaucauggucggcaacgagaccggccuggagcucacccugaccaacacguccaucaucaaccacaaguucugcaaccugagcgacgcccacaagaagaaccucuacgaccacgcccugauguccaucaucagcaccuuccaccuguccauccccaacuucaaccaguacgaggccaugagcugcgacuucaacgggggcaagaucuccgugcaguacaaccucagccacaccuacgcgguggacgccgccaaccacugcgggaccaucgccaacggcguccugcagacguucaugcggauggcguggggcggguccuacaucgcccuggacagcggcaagggguccugggacugcaucaugaccagcuaccaguaccucaucauccagaacaccaccugggaggaccacugccaguucucccgccccagccccaucggcuaccuggggcugcucagccagcggacgcgcgacaucuacaucucccggcgccugcugggcaccuucaccuggacccucagcgacuccgagagcaacgagacgccgggcggguacugccugacccgguggaugcugaucgaggccgagcucaagugcuucggcaacaccgccguggccaagugcaacgagaagcacgacgaggaguucugcgacaugcugcgccuguucgacuucugcaagcaggcgauccggcgccucaaggcccccgcccagauguccauccagcugaucaacaaggccgugaacgcccugaucaacgaccagcucaucaugaagaaccaccuccgggacaucauggggauccccuacugcaacuacagcaaguacugcuaccugaaccacaccgucacgggccgcaccucccugccccggugcugccuggugagcaacggguccuaccugaacgagacccacuucagcgacgacaucgagcagcaggcggacaacaugaucaccgagcuccugcagaaggaguacauggaccgccagggcaagacgccccugggccucguggaccuguucgucuucuccaccagcuucuaccugaucuccaucuuccugcaccucgugaagaucccgacccaccggcacgugaucgggaagcccugccccaagccccaccgccugaaccacaugggcaucugcagcugcgggcuguacaagcacccgggcguccccgugaaguggaagcggugaggacuaguuauaagacugacuagcccgaugggccucccaacgggcccuccuccccuccuugcaccgagauuaaucaaaggcucuuuucagagccaccaaaaaaaaaaaaaaaaaaaaaaaaaaaaaaaaaaaaaaaaaaaaaaaaaaaaaaaaaaaaaaaaaaaaaaaaaaaaaaaaaaaaaaaaaaaaaaaaaaaaa

SEQ ID NO: 34580 - RNA, 1686 nt, Artificial Sequence
  mRNA product Design i-3 (hSL-A100) comprising derived and/or modified sequence from LASV(LASV035-NIG-2009;Clade II)__AIT17588__GPCmut8 (opt1)
aggagaaagcuuaccaugggccagaucaucaccuucuuccaggaggugccccacgucaucgaggaggugaugaacaucgugcugaucgcccucagccugcuggccauccucaaggggaucuacaacgucgcgaccugcggccuguucgggcugguguccuuccuccugcugugcggccgcagcugcuccacgaccuacaaggggguguacgagcuccagacccuggagcuggacauggccagccucaacaugugcaugccgcuguccugcacgaagaacaacagccaccacuacaucauggucggcaacgagaccggccuggagcucacccugaccaacacguccaucaucaaccacaaguucugcaaccugagcgacgcccacaagaagaaccucuacgaccacgcccugauguccaucaucagcaccuuccaccuguccauccccaacuucaaccaguacgaggccaugagcugcgacuucaacgggggcaagaucuccgugcaguacaaccucagccacgcguacgccguggacgccgccaaccacugcgggaccaucgcgaacggcguccugcagaccuucaugcggauggccuggggcggguccuacaucgcccuggacagcggcaagggguccugggacugcaucaugacgagcuaccaguaccucaucauccagaacaccaccugggaggaccacugccaguucucccgccccagccccaucggcuaccuggggcugcucagccagcggacccgcgacaucuacaucucccggcgccugcugggcacguucaccuggacccucagcgacuccgagggcaacgagacccccgggggcuacugccugacgcgguggaugcugaucgaggccgagcucaagugcuucgggaacaccgccguggcgaagugcaacgagaagcacgacgaggaguucugcgacaugcugcgccuguucgacuucugcaagcaggccauccggcgccucaaggcccccgcccagaugagcauccagcugaucaacaaggccgugaacgcgcugaucaacgaccagcucaucaugaagaaccaccuccgggacaucaugggcauccccuacugcaacuacuccaaguacugcuaccugaaccacaccgucaccgggaagacgagccugccccgcugcugccugguguccaacggcagcuaccugaacgagacccacuucuccgacgacaucgagcagcaggccgacaacaugaucaccgagcuccugcagaaggaguacaucgaccggcagggcaagaccccgcuggggcucguggaccuguucgucuucagcacguccuucuaccugaucagcaucuuccugcaccucgugaagaucccgacccaccgccacgugaucggcaagcccugccccaagccccaccggcugaaccacauggggaucugcuccugcggccuguacaagcacccggggguccccgugaaguggaagcgcugaggacuaguuauaagacugacuagcccgaugggccucccaacgggcccuccuccccuccuugcaccgagauuaaucaaaggcucuuuucagagccaccaaaaaaaaaaaaaaaaaaaaaaaaaaaaaaaaaaaaaaaaaaaaaaaaaaaaaaaaaaaaaaaaaaaaaaaaaaaaaaaaaaaaaaaaaaaaaaaaaaaaa

SEQ ID NO: 34581 - RNA, 1686 nt, Artificial Sequence
  mRNA product Design i-3 (hSL-A100) comprising derived and/or modified sequence from LASV(LASV1000-NIG-2009;Clade II)__AIT17782__GPCmut8 (opt1)
aggagaaagcuuaccaugggccagaucaucaccuucuuccaggaggugccccacgucaucgaggaggugaugaacaucgugcugaucgcccucagccugcuggccauccucaaggggaucuacaacgucgcgaccugcggccuguucgggcugguguccuuccuccugcugugcggccgcagcugcuccacgaccuacaaggggguguacgagcuccagacccuggagcuggacauggccagccucaacaugugcaugccgcuguccugcacgaagaacaacagccaccacuacaucauggucggcaacgagaccggccuggagcucacccugaccaacacguccaucaucaaccacaaguucugcaaccugagcgacgcccacaagaagaaccucuacgaccacgcccugauguccaucaucagcaccuuccaccuguccauccccaacuucaaccaguacgaggccaugagcugcgacuucaacgggggcaagaucuccgugcaguacaaccucagccacaccuacgcgguggacgccgccaaccacugcgggaccaucgccaacggcguccugcagacguucaugcggauggcguggggcggguccuacaucgcccuggacagcggcaagggguccugggacugcaucaugaccagcuaccaguaccucaucauccagaacaccaccugggaggaccacugccaguucucccgccccagccccaucggcuaccuggggcugcucagccagcggacgcgcgacaucuacaucucccggcgccugcugggcaccuucaccuggacccucagcgacuccgagggcaacgagacgcccgggggcuacugccugacccgguggaugcugaucgaggccgagcucaagugcuucgggaacaccgccguggccaagugcaacgagaagcacgacgaggaguucugcgacaugcugcgccuguucgacuucugcaagcaggcgaucaagcggcucaagacccccgcccagaugagcauccagcugaucaacaaggccgugaacgcccugaucaacgaccagcucaucaugaagaaccaccuccgcgacaucaugggcauccccuacugcaacuacuccaaguacugcuaccugaaccacacggucaccgggaagaccagccugccccggugcugccugguguccaacggcagcuaccugaacgagacccacuucuccgacgacaucgagcagcaggccgacaacaugaucacggagcuccugcagaaggaguacaucgaccgccagggcaagaccccgcuggggcucguggaccuguucgucuucagcaccuccuucuaccugaucagcaucuuccugcaccucgugaagaucccgacccaccggcacguggucggcaagcccugccccaagccccaccgccugaaccacauggggaucugcuccugcggccuguacaagcacccgggggugcccgugaaguggaagcggugaggacuaguuauaagacugacuagcccgaugggccucccaacgggcccuccuccccuccuugcaccgagauuaaucaaaggcucuuuucagagccaccaaaaaaaaaaaaaaaaaaaaaaaaaaaaaaaaaaaaaaaaaaaaaaaaaaaaaaaaaaaaaaaaaaaaaaaaaaaaaaaaaaaaaaaaaaaaaaaaaaaaa

SEQ ID NO: 34582 - RNA, 1686 nt, Artificial Sequence
  mRNA product Design i-3 (hSL-A100) comprising derived and/or modified sequence from LASV(LASV221-NIG-2010;Clade II)__AIT17624__GPCmut8 (opt1)
aggagaaagcuuaccaugggccagaucaucaccuucuuccaggaggugccccacgucaucgaggaggugaugaacaucgugcugaucgcccucagccugcuggccauccucaaggggaucuacaacgucgcgaccugcggccuguucgggcugguguccuuccuccugcugugcggccgcagcugcuccacgaccuacaaggggguguacgagcuccagacccuggagcuggacauggccagccucaacaugugcaugccgcuguccugcacgaagaacaacagccaccacuacaucauggucggcaacgagaccggccuggagcucacccugaccaacacguccaucaucaaccacaaguucugcaaccugagcgacgcccacaagaagaaccucuacgaccacgcccugauguccaucaucagcaccuuccaccuguccauccccaacuucaaccaguacgaggccaugagcugcgacuucaacgggggcaagaucuccgugcaguacaaccucagccacaccuacgcgaucgacgccgccaaccacugcgggaccaucgccaacggcgugcugcagacguucaugcggauggcguggggcggguccuacaucgcccuggacagcggcaagggguccugggacugcaucaugaccagcuaccaguaccucaucauccagaacaccaccugggaggaccacugccaguucucccgccccagccccaucggcuaccuggggcugcucagccagcggacgcgcgacaucuacaucucccggcgccugcugggcaccuucaccuggacccucagcgacuccgagggcaacgagacgcccgggggcuacugccugacccgguggaugcugaucgaggccgagcucaagugcuucgggaacaccgccgucgccaagugcaacgagaagcacgacgaggaguucugcgacaugcugcgccuguucgacuucugcaagcaggcgauccggcgccucaagacccccgcccagaugagcauccagcugaucaacaaggccgugaacgcccugaucaacgaccagcucaucaugaagaaccaccuccgggacaucaugggcauccccuacugcaacuacuccaaguacugcuaccugaaccacacggugaccgggaagaccagccugccccgcugcugccuggucuccaacggcagcuaccugaacgagacccacuucuccgacgacaucgagcagcaggccgacaacaugaucacggagaugcuccagaaggaguacauggaccggcagggcaagaccccgcuggggcugguggaccucuucguguucagcaccuccuucuaccugaucagcaucuuccugcaccuggucaagaucccgacccaccgccacgugaucggcaagcccugccccaagccccaccggcucaaccacauggggaucugcuccugcggccuguacaagcacccgggggugcccgucaaguggaagcgcugaggacuaguuauaagacugacuagcccgaugggccucccaacgggcccuccuccccuccuugcaccgagauuaaucaaaggcucuuuucagagccaccaaaaaaaaaaaaaaaaaaaaaaaaaaaaaaaaaaaaaaaaaaaaaaaaaaaaaaaaaaaaaaaaaaaaaaaaaaaaaaaaaaaaaaaaaaaaaaaaaaaaa

SEQ ID NO: 34583 - RNA, 1686 nt, Artificial Sequence
  mRNA product Design i-3 (hSL-A100) comprising derived and/or modified sequence from LASV(LASV237-NIG-2010;Clade II)__AIT17638__GPCmut8 (opt1)
aggagaaagcuuaccaugggccagaucaucaccuucuuccaggaggugccccacgucaucgaggaggugaugaacaucgugcugaucgcccucagccugcuggccauccucaaggggaucuacaacgucgcgaccugcggccuguucgggcugguguccuuccuccugcugugcggccgcagcugcuccacgaccuacaaggggguguacgagcuccagacccuggagcuggacauggccagccucaacaugugcaugccgcuguccugcacgaagaacaacagccaccacuacaucauggucggcaacgagaccggccuggagcucacccugaccaacacguccaucaucaaccacaaguucugcaaccugagcgacgcccacaagaaggaccucuacgaccacgcccugauguccaucaucagcaccuuccaccuguccauccccaacuucaaccaguacgaggccaugagcugcgacuucaacgggggcaagaucuccgugcaguacaaccucagccacaccuacgcgguggacgccgccaaccacugcgggaccaucgccaacggcguccugcagacguucaugcggauggcguggggcggguccuacaucgcccuggacagcggcaagggguccugggacugcaucaugaccagcuaccaguaccucaucauccagaacaccaccugggaggaccacugccaguucucccgccccagccccaucggcuaccuggggcugcucagccagcggacgcgcgacaucuacaucucccggcgccugcugggcaccuucaccuggacccucagcgacuccgagggcaacgagacgcccgggggcuacugccugacccgguggaugcugaucgaggccgagcucaagugcuucgggaacaccgccguggccaagugcaacgagaagcacgacgaggaguucugcgacaugcugcgccuguucgacuucugcaagcaggcgauccggcgccucaagacccccgcccagaugagcauccagcugaucaacaaggccgugaacgcccugaucaacgaccagcucaucaugaagaaccaccuccgggacaucaugggcauccccuacugcaacuacuccaaguacugcuaccugaaccacacggucaccgggaagaccagccugccccgcugcugccugguguccaacggcagcuaccugaacgagacccacuucuccgacgacaucgagcagcaggccgacaacaugaucacggagcuccugcagaaggaguacauggaccggcagggcaagaccccgcuggggcucguggaccuguucgucuucagcaccuccuucuaccugaucagcaucuuccugcaccucaucaagaucccgacccaccgccacaucacgggcaagcccugccccaagccccaccggcugaaccacauggggaucugcuccugcggccuguacaagcacccgggggugcccgugaaguggaagcgcugaggacuaguuauaagacugacuagcccgaugggccucccaacgggcccuccuccccuccuugcaccgagauuaaucaaaggcucuuuucagagccaccaaaaaaaaaaaaaaaaaaaaaaaaaaaaaaaaaaaaaaaaaaaaaaaaaaaaaaaaaaaaaaaaaaaaaaaaaaaaaaaaaaaaaaaaaaaaaaaaaaaaa

SEQ ID NO: 34584 - RNA, 1686 nt, Artificial Sequence
  mRNA product Design i-3 (hSL-A100) comprising derived and/or modified sequence from LASV(LASV253-NIG-2011;Clade II)__AIT17670__GPCmut8 (opt1)
aggagaaagcuuaccaugggccagaucaucaccuucuuccaggaggugccccacgucaucgaggaggugaugaacaucgugcugaucgcccucagccugcuggccauccucaaggggaucuacaacgucgcgaccugcggccuguucgggcugguguccuuccuccugcugugcggccgcagcugcuccacgaccuacaaggggguguacgagcuccagacccuggagcuggacauggccagccucaacaugugcaugccgcuguccugcacgaagaacaacagccaccacuacaucauggucggcaacgagaccggccuggagcucacccugaccaacacguccaucaucaaccacaaguucugcaaccugagcgacgcccacaagaagaaccucuacgaccacgcccugauguccaucaucagcaccuuccaccuguccauccccaacuucaaccaguacgaggccaugagcugcgacuucaacgggggcaagaucuccgugcaguacaaccucagccacaccuacgcgguggacgccgccaaccacugcgggaccaucgccaacggcguccugcagacguucaugcggauggcguggggcggguccuacaucgcccuggacagcggcaagggguccugggacugcaucaugaccagcuaccaguaccucaucauccagaacaccaccugggaggaccacugccaguucucccgccccagccccaucggcuaccuggggcugcucagccagcggacgcgcgacaucuacaucucccggcgccugcugggcaccuucaccuggacccucagcgacuccgagggcaacgagacgcccgggggcuacugccugacccgguggaugcugaucgaggccgagcucaagugcuucgggaacaccgccguggccaagugcaacgagaagcacgacgaggaguucugcgacaugcugcgccuguucgacuucugcaagcaggcgauccggcgccucaaggcccccgcccagaugagcauccagcugaucaacaaggccgugaacgcccugaucaacgaccagcucaucaugaagaaccaccuccgggacaucaugggcaucccguacugcaacuacuccaaguacugcuaccugaaccacaccgucacggggcgcaccagccugccccggugcugccugguguccaacggcagcuaccugaacgagacccacuucuccgacgacaucgagcagcaggcggacaacaugaucaccgagcuccugcagaaggaguacaucgaccgccagggcaagacgccccuggggcucguggaccuguucgucuucagcaccuccuucuaccugaucagcaucuuccugcaccucgugaagaucccgacccaccggcacaucaucggcaagcccugccccaagccccaccgccugaaccacauggggaucugcuccugcggccuguacaagcacccgggggugcccgucaaguggaagcggugaggacuaguuauaagacugacuagcccgaugggccucccaacgggcccuccuccccuccuugcaccgagauuaaucaaaggcucuuuucagagccaccaaaaaaaaaaaaaaaaaaaaaaaaaaaaaaaaaaaaaaaaaaaaaaaaaaaaaaaaaaaaaaaaaaaaaaaaaaaaaaaaaaaaaaaaaaaaaaaaaaaaa

SEQ ID NO: 34585 - RNA, 1686 nt, Artificial Sequence
  mRNA product Design i-3 (hSL-A100) comprising derived and/or modified sequence from LASV(LASV254-NIG-2011;Clade II)__AIT17674__GPCmut8 (opt1)
aggagaaagcuuaccaugggccagaucaucaccuucuuccaggaggugccccacgucaucgaggaggugaugaacaucgugcugaucgcccucagccugcuggccauccucaaggggaucuacaacgucgcgaccugcggccuguucgggcugguguccuuccuccugcugugcggccgcagcugcuccacgaccuacaaggggguguacgagcuccagacccuggagcuggacaugaccaaccucaacaugugcaugccgcugagcugcaccaagaacaacucccaccacuacaucauggucggcaacgagaccggccuggagcucacccugacgaacaccagcaucaucaaccacaaguucugcaaccuguccgacgcccacaagaagaaccucuacaaccacgcccugaugagcaucaucuccaccuuccaccugagcauccccaacuucaaccaguacgaggccauguccugcgacuucaacgggggcaagaucagcgugcaguacaaccucucccacagcuacgccguggacgcggccaaccacugcgggaccaucgccaacggcguccugcagacguucaugcggauggccuggggcggguccuacaucgcgcuggacagcggcaaggggaacugggacugcaucaugaccuccuaccaguaccucaucauccagaacaccaccugggaggaccacugccaguucagccgccccucccccaucggcuaccuggggcugcucagccagcggacgcgcgacaucuacaucagccggcgccugcugggcaccuucaccuggacccucuccgacagcgagggcaacgagacgcccgggggcuacugccugacccgguggaugcugaucgaggccgagcucaagugcuucgggaacaccgccguggccaagugcaacgagaagcacgacgaggaguucugcgacaugcugcgccuguucgacuucugcaagcaggccauccggcgccucaagacccccgcgcaggccaacauccagcugaucaacaaggccgugaacgcccugaucaacgaccagcucaucaugaagaaccaccuccgggacaucaugggcauccccuacugcaacuacuccaaguacugcuaccugaaccacacggucaccgggaagaccagccugccccgcugcugccugguguccaacggcagcuaccugaacgagacccacuucuccgacgacaucgagcagcaggccgacaacaugaucacggagcuccugcagaaggaguacauggaccggcagggcaagaccccgcuggggcucguggaccuguucgucuucagcaccuccuucuaccugaucagcaucuuccugcaccucgugaagaucccgacccaccgccacgugaucggcaagcccugccccaagccccaccggcugaaccacauggggaucugcuccugcggccuguacaagcacccggggguccccgugaaguggaagcgcugaggacuaguuauaagacugacuagcccgaugggccucccaacgggcccuccuccccuccuugcaccgagauuaaucaaaggcucuuuucagagccaccaaaaaaaaaaaaaaaaaaaaaaaaaaaaaaaaaaaaaaaaaaaaaaaaaaaaaaaaaaaaaaaaaaaaaaaaaaaaaaaaaaaaaaaaaaaaaaaaaaaaa

SEQ ID NO: 34586 - RNA, 1686 nt, Artificial Sequence
  mRNA product Design i-3 (hSL-A100) comprising derived and/or modified sequence from LASV(Nig08-A19;Clade III)__ADU56618__GPCmut8 (opt1)
aggagaaagcuuaccaugggccagaucgugaccuucuuccaggaggucccccacgugaucgaggaggugaugaacaucguccugaucgcccucagcauccuggccauccugaaggggcucuacaacaucgcgaccugcggccugaucgggcuggugacguuccuccugcuguccggccgcagcugcuccaugaccuacaaggggguguacgagcuccagacccuggagcugaacaugaacacccucaacaugugcaugccgcugagcugcaccaagaacaacucccaccacuacaucauggucggcaacgagaccggccuggagcucacccugacgaacaccagccugcuccaccacaaguucugcaaccuguccgacgcccacaagaagaaccuguacgaccacacccucaugagcaucaucuccaccuuccaccugagcauccccaacuucaaccaguacgaggccauguccugcgacuucaacgggggcaagaucacggugcaguacaaccugagccacuccuacgccaucgacgccgcgaaccacugcgggaccguggccaacggcguccuccagaccuucaugcggauggccuggggcgggagcuacaucgcccuggacuccggccgcgggaagugggacugcaucaugaccagcuaccaguaccugaucauccagaacacgaccugggaggaccacugccaguucucccggcccagccccaucggcuaccucgggcugcugucccagcgcacccgggacaucuacaucagccgccggcuccugggcaccuucacguggacccugagcgacuccgagggcaacgagacccccgggggcuacugccucacccgcuggaugcugaucgaggcggagcugaagugcuucgggaacacggccguggccaagugcaacgagaagcacgacgaggaguucugcgacaugcuccggcuguucgacuucugcaagcaggccauccgccggcugaaggcccccgcgcagaugagcauccagcucaucaacaaggccgugaacgcccugaucaacgaccagcugaucaugaagaaccaccuccgcgacaucaugggcauccccuacugcaacuacuccaaguacugcuaccugaaccacaccagcaccgggcggaccucccugccccgcugcugccucgucagcaacggcuccuaccugaacgagacgcacuucagcgacgacaucgagcagcaggccgacaacaugaucaccgagaugcugcagaaggaguaccucgaccggcagggcaagaccccgcuggggcugguggaccuguucguguucuccaccagcuucuaccucaucuccaucuuccugcaccuggucaagaucccgacgcaccgccacaucgugggcaagcccugccccaagccccaccggcucaaccacauggggaucugcagcugcggccuguacaagcagccgggggugcccguccgcuggaagcggugaggacuaguuauaagacugacuagcccgaugggccucccaacgggcccuccuccccuccuugcaccgagauuaaucaaaggcucuuuucagagccaccaaaaaaaaaaaaaaaaaaaaaaaaaaaaaaaaaaaaaaaaaaaaaaaaaaaaaaaaaaaaaaaaaaaaaaaaaaaaaaaaaaaaaaaaaaaaaaaaaaaaa

SEQ ID NO: 34587 - RNA, 1689 nt, Artificial Sequence
  mRNA product Design i-3 (hSL-A100) comprising derived and/or modified sequence from LASV(G1180-SLE-2010;Clade IV)__AIT17168__GPCmut8 (opt1)
aggagaaagcuuaccaugggccagaucgugaccuucuuccaggaggucccccacgugaucgaggaggugaugaacaucguccugaucgcccucagcauccuggccgugcugaaggggcucuacaacuucgcgaccugcggccugguggggcugcucaccuuccugcugcucugcggccgcuccugcaccgccagccgguacaagggggucuacgagcugcagacccuggagcucaacauggagacccugaacaugugcaugccgcuguccugcaccaagaacaacagccaccacuacaucauggugggcaacgagaccggccucgagcugacccugacgaacaccuccaucaucaaccacaaguucugcaaccucagcgacgcccacaagaagaaccuguacgaccacgcccugauguccaucaucagcaccuuccaccucuccauccccaacuucaaccaguacgaggccaugagcugcgacuucaacgggggcaagaucuccgugcaguacaaccugagccacuccuacgcgggggacgccgccaaccacugcggcaccgucgccaacggggugcugcagacguucaugcgcauggcguggggcggcagcuacaucgcccucgacuccgggcacggcagcugggacugcaucaugaccuccuaccaguaccugaucauccagaacaccaccugggaggaccacugccaguucagccggcccucccccaucggguaccugggccuccugagccagcgcacgcgggacaucuacaucagccgccggcugcucggcaccuucaccuggacccuguccgacagcgaggggaaggacacgccgggcggguacugccugacccgcuggaugcucaucgaggccgagcugaagugcuucggcaacaccgccguggccaagugcaacgagaagcacgacgaggaguucugcgacaugcugcggcuguucgacuucugcaagcaggcgauccagcgccugaaggcccccgcccagauguccauccagcugaucaacaaggccgucaacgcccucaucaacgaccagcugaucaugaagaaccaccuccgggacaucauggggauccccuacugcaacuacagcaaguacugcuaccucaaccacaccacgaccggcaagaccucccugcccaagugcugccuggugagcaacggcuccuaccucaacgagacccacuucagcgacgacaucgagcagcaggcggacaacaugaucacggagaugcugcagaaggaguacauggagcgccaggggaagacgccccugggccucguggaccuguucgucuucuccaccagcuucuaccugaucuccaucuuccugcaccucgugaagaucccgacccaccggcacaucgugggcaagagcugccccaagccccaccgccugaaccacauggggaucugcuccugcgggcuguacaagcagcccggcgucccggugaaguggaagcggugaggacuaguuauaagacugacuagcccgaugggccucccaacgggcccuccuccccuccuugcaccgagauuaaucaaaggcucuuuucagagccaccaaaaaaaaaaaaaaaaaaaaaaaaaaaaaaaaaaaaaaaaaaaaaaaaaaaaaaaaaaaaaaaaaaaaaaaaaaaaaaaaaaaaaaaaaaaaaaaaaaaaa

SEQ ID NO: 34588 - RNA, 1689 nt, Artificial Sequence
  mRNA product Design i-3 (hSL-A100) comprising derived and/or modified sequence from LASV(G1442-SLE-2011;Clade IV)__AIT17180__GPCmut8 (opt1)
aggagaaagcuuaccaugggccagaucgugaccuucuuccaggaggucccccacgugaucgaggaggugaugaacaucguccugaucgcccucagcauccuggccgugcugaaggggcucuacaacguggcgaccugcggccugaucgggcuggucacguuccuccugcugugcggccgcuccugcaccaccacccucuacaaggggguguacgagcugcagacgcuggagcucaacauggagacccugaacaugugcaugccgcugagcugcaccaagaacaacucccaccacuacauccgggugggcaacgagacgggccucgagcugacccugaccaacaccagcaucaucaaccacaaguucugcaaccucuccgacgcccacaagaagaaccuguacgaccacgcccugaugagcaucaucuccacguuccaccucagcauccccaacuucaaccaguacgaggccauguccugcgacuucaacgggggcaagaucagcguccaguacaaccugucccacagcuacgccggggacgcggccaaccacugcggcaccguggccaacggggugcugcagaccuucaugcgcauggccuggggcggcuccuacaucgcgcucgacagcgggcggggcaacugggacugcaucaugaccuccuaccaguaccugaucauccagaacacgaccugggacgaccacugccaguucagccgccccucccccaucggguaccugggccuccugagccagcggacccgcgacgucuacaucucccggcgccugcucggcaccuucacguggacccugagcgacagcgaggggaaggacaccccgggcggguacugccugacccgguggaugcucaucgaggccgagcugaagugcuucggcaacacggccguggccaagugcaacgagaagcacgacgaggaguucugcgacaugcugcgccucuucgacuucugcaagcaggccauccagcggcugaaggcgcccgcccagauguccauccagcugaucaacaaggccgugaacgcccucaucaacgaccagcugaucaugaagaaccaccuccgcgacaucauggggauccccuacugcaacuacagcaaguacugcuaccugaacaacaccgccaccggcaagaccucccugcccaagugcugccugaucagcaacggcuccuaccucaacgagacgcacuucagcgacgacaucgagcaggaggcggacaacaugaucaccgagaugcugcagaaggaguacauggagcggcaggggaagacgccccugggccucgucgaccuguucguguucuccaccagcuucuaccugaucuccaucuuccugcaccucgugaagaucccgacccaccgccacaucgucggcaagagcugccccaagccccaccggcugaaccacauggggaucugcuccugcgggcuguacaagcagcccggcgugccggugcgcuggaagcggugaggacuaguuauaagacugacuagcccgaugggccucccaacgggcccuccuccccuccuugcaccgagauuaaucaaaggcucuuuucagagccaccaaaaaaaaaaaaaaaaaaaaaaaaaaaaaaaaaaaaaaaaaaaaaaaaaaaaaaaaaaaaaaaaaaaaaaaaaaaaaaaaaaaaaaaaaaaaaaaaaaaaa

SEQ ID NO: 34589 - RNA, 1689 nt, Artificial Sequence
  mRNA product Design i-3 (hSL-A100) comprising derived and/or modified sequence from LASV(G3010-SLE-2013;Clade IV)__AIT17344__GPCmut8 (opt1)
aggagaaagcuuaccaugggccagaucgugaccuucuuccaggaggucccccacgugaucgaggaggugaugaacaucguccugaucgcccucagcauccuggccgugcugaaggggcucuacaacuucgcgaccugcggccugguggggcuggucacguuccuccugcugugcggccgcuccugcaccaccagccucuacaaggggguguacgagcugcagacccuggagcucaacauggagacgcugaacaugugcaugccgcuguccugcaccaagaacaacagccaccacuacaucauggugggcaacgagaccggccucgagcugacgcugaccaacaccuccaucaucaaccacaaguucugcaaccucagcgacgcccacaagaagaaccuguacaaccacgcccugauguccaucaucagcaccuuccaccucuccauccccaacuucaaccaguacgaggccaugagcugcgacuucaacgggggcaagaucuccguccaguacaaccugagccacuccuacgccggggacgcggccagccacugcggcacgguggccaacggggugcugcagaccuucaugcggauggccuggggcggcuccuacaucgcgcucgacagcggguacggcaagugggacugcaucaugaccuccuaccaguaccugaucauccagaacaccacgugggaggaccacugccaguucagccgccccucccccaucggguaccugggccuccugagccagcggacccgcgacaucuacaucagccggcgccugcucggcaccuucaccuggacgcuguccgacagcgaggggaaggacaccccgggcggguacugccugacccgguggaugcucaucgaggccgagcugaagugcuucggcaacaccgccgucgccaagugcaacgagaagcacgacgaggaguucugcgacaugcugcgccucuucgacuucugcaagcaggccauccagcggcugaagacgcccgcgcagauguccauccagcugaucaacaaggccgugaacgcccucaucaacgaccagcugaucaugaagaaccaccuccgcgacaucauggggauccccuacugcaacuacagcaaguacugcuaccugaaccacaccaccaccggcaagacgucccugcccaagugcugccuggugagcaacggcuccuaccucaacgagacccacuucagcgacgacaucgagcagcaggccgacaacaugaucaccgagaugcugcagaaggaguacauggagcggcaggggaagacgccccugggccucgucgaccuguucguguucuccaccagcuucuaccugaucuccaucuuccugcaccucgugaagaucccgacccaccgccacaucgucggcaagagcugccccaagccccaccggcugaaccacauggggaucugcuccugcgggcuguacaagcagcccggcgugccggugcgcuggaagcggugaggacuaguuauaagacugacuagcccgaugggccucccaacgggcccuccuccccuccuugcaccgagauuaaucaaaggcucuuuucagagccaccaaaaaaaaaaaaaaaaaaaaaaaaaaaaaaaaaaaaaaaaaaaaaaaaaaaaaaaaaaaaaaaaaaaaaaaaaaaaaaaaaaaaaaaaaaaaaaaaaaaaa

SEQ ID NO: 34590 - RNA, 1689 nt, Artificial Sequence
  mRNA product Design i-3 (hSL-A100) comprising derived and/or modified sequence from LASV(G502-SLE-2009;Clade IV)__AIT17126__GPCmut8 (opt1)
aggagaaagcuuaccaugggccagaucgugaccuucuuccaggaggucccccacgugaucgaggaggugaugaacaucguccugaucgcccucagcauccuggccgugcugaaggggcucuacaacuucgcgaccugcggccugguggggcugcucacguuccugcugcucugcggccgcuccugcaccaccgggcuguacaagggcgucuacgagcugcagacccucgagcugaacauggagacgcugaacaugugcaugccgcucagcugcaccaagaacaacucccaccacuacaucauggugggcaacgagaccgggcuggagcugacgcucaccaacaccagcaucaucaaccacaaguucugcaaccuguccgacgcccacaagaagaaccuguacgaccacgcccucaugagcaucaucuccaccuuccaccugagcauccccaacuucaaccaguacgaggccauguccugcgacuucaacggcgggaagaucagcgugcaguacaaccugucccacagcuacgccggcgacgcggccgaccacugcgggacggucgccaacggcgugcuccagaccuucaugcggauggccuggggcggguccuacaucgcgcuggacagcggccgcgggcggugggacugcaucaugaccuccuaccaguaccugaucauccagaacaccacgugggaggaccacugccaguucagccgccccucccccaucggcuaccucggccugcugagccagcggacccgcgacaucuacaucucccggcgccuccuggggaccuucaccuggacgcugagcgacagcgagggcaaggacacccccgggggcuacugccucacccgguggaugcugaucgaggccgagcugaagugcuucgggaacaccgccguggccaagugcaacgagaagcacgacgaggaguucugcgacaugcuccgccuguucgacuucugcaagcaggccauccagcggcugaaggcgcccgcccagauguccauccagcucaucaacaaggccgucaacgcccugaucaacgaccagcuggugaugaagaaccaccuccgcgacaucaugggcauccccuacugcaacuacagccgguacugcuaccugaaccacacgaccaccggccgcaccucccugcccaagugcugccucgugagcaacggguccuaccugaacgagacgcacuucagcgacgacaucgagcagcaggccgacaacaugaucaccgagaugcugcagaaggaguacauggagcggcagggcaagaccccgcucgggcuggucgaccuguucguguucuccaccagcuucuaccugaucuccaucuuccuccaccuggugaagaucccgacgcaccgccacaucgucggcaagagcugccccaagccccaccggcugaaccacauggggaucugcuccugcggccucuacaagcagcccggcgugccggugaaguggaagcgcugaggacuaguuauaagacugacuagcccgaugggccucccaacgggcccuccuccccuccuugcaccgagauuaaucaaaggcucuuuucagagccaccaaaaaaaaaaaaaaaaaaaaaaaaaaaaaaaaaaaaaaaaaaaaaaaaaaaaaaaaaaaaaaaaaaaaaaaaaaaaaaaaaaaaaaaaaaaaaaaaaaaaa

SEQ ID NO: 34591 - RNA, 1689 nt, Artificial Sequence
  mRNA product Design i-3 (hSL-A100) comprising derived and/or modified sequence from LASV(G733-SLE-2010;Clade IV)__AIT17154__GPCmut8 (opt1)
aggagaaagcuuaccaugggccagaucgugaccuucuuccaggaggucccccacgugaucgaggaggugaugaacaucguccugaucgcccucagcauccuggccgugcugaaggggcucuacaacuucgcgaccugcggcaucguggggcuggucuccuuccugcuccugugcggccgcagcugcacgaccucccuguacaaggggguguacgagcuccagacccuggagcugaacauggagacccucaacaugugcaugccgcugagcugcaccaagaacaacucccaccacuacaucauggugggcaacgagaccggccuggagcucacccugacgaacaccagcaucaucaaccacaaguucugcaaccuguccgacgcccacaagaagaaccucuacgaccacgcccugaugagcaucaucuccaccuuccaccugagcauccccaacuucaaccaguacgaggccauguccugcgacuucaacgggggcaagaucagcguccaguacaaccucucccacagcuacgccggggacgcggccaaccacugcggcaccaucgccaacggggugcugcagacguucaugcggauggccuggggcggcuccuacaucgcgcuggacagcgggcgcgaccggugggacugcaucaugaccuccuaccaguaccucaucauccagaacaccaccugggaggaccacugccaguucagccgccccucccccaucggcuaccuggggcugcucagccagcggacgcgcgacaucuacaucagccggcgccugcugggcaccuucaccuggacccucuccgacagcgagggcaaggacacgcccgggggcuacugccugacccgguggaugcugaucgaggccgagcucaagugcuucgggaacaccgccguggccaagugcaacgagaagcacgacgaggaguucugcgacaugcugcgccuguucgacuucugcaagcaggccauccagcggcucaaggcgcccgcccagauguccauccagcugaucaacaaggccgucaacgcccugaucaacgaccagcucaucaugaagaaccaccuccgcgacaucaugggcauccccuacugcaacuacagcaaguacugcuaccugaaccacaccacgaccgggaagaccucccugcccaagugcugccuggugagcaacggcuccuaccugaacgagacccacuucagcgacgacaucgagcagcaggccgacaacaugaucacggagaugcuccagaaggaguacauggagcggcagggcaagaccccgcuggggcugguggaccucuucgucuucuccaccagcuucuaccugaucuccaucuuccugcaccuggugaagaucccgacccaccgccacguggucggcaagagcugccccaagccccaccggcucaaccacauggggaucugcuccugcggccuguacgggcagcccggcgugccggugaaguggaagcgcugaggacuaguuauaagacugacuagcccgaugggccucccaacgggcccuccuccccuccuugcaccgagauuaaucaaaggcucuuuucagagccaccaaaaaaaaaaaaaaaaaaaaaaaaaaaaaaaaaaaaaaaaaaaaaaaaaaaaaaaaaaaaaaaaaaaaaaaaaaaaaaaaaaaaaaaaaaaaaaaaaaaaa

SEQ ID NO: 34592 - RNA, 1689 nt, Artificial Sequence
  mRNA product Design i-3 (hSL-A100) comprising derived and/or modified sequence from MOPV/LASV reassortant(IGS-1;Clade IV)__AFY05576__GPCmut8 (opt1)
aggagaaagcuuaccaugggccagaucgugaccuucuuccaggaggucccccacgugaucgaggaggugaugaacaucguccugaucgcccucagcgugcuggccgugcugaaggggcucuacaacuucgcgaccugcggccuggucgggcuggugacguuccuccugcugugcggccgcuccugcaccaccagccucuacaaggggguguacgagcugcagacccuggagcucaacauggagacgcugaacaugugcaugccgcuguccugcaccaagaacaacagccaccacuacaucauggucggcaacgagaccggccucgagcugacgcugaccaacaccuccaucaucaaccacaaguucugcaaccucagcgacgcccacaagaagaaccuguacgaccacgcccugauguccaucaucagcaccuuccaccucuccauccccaacuucaaccaguacgaggccaugagcugcgacuucaacgggggcaagaucuccgugcaguacaaccugagccacuccuacgccggggacgcggccaaccacugcggcacgguggccaacgggguccugcagaccuucaugcggauggccuggggcggcagcuacaucgcgcucgacuccgggcgcggcaacugggacugcaucaugaccagcuaccaguaccugaucauccagaacaccacgugggaggaccacugccaguucucccggcccagccccaucggguaccugggccuccugucccagcgcacccgggacaucuacaucagccgccggcugcucggcaccuucaccuggacgcugagcgacuccgagggggaggacaccccgggcggguacugccugacccgcuggaugcucaucgaggccgagcugaagugcuucggcaacaccgccguggccaagugcaacgagaagcacgacgaggaguucugcgacaugcugcggcuguucgacuucugcaagcaggccauccagcgccugaaggcgcccgcccagaugagcauccagcugaucaacaaggccgugaacgcccucaucaacgaccagcugaucaugaagaaccaccuccgggacaucauggggauccccuacugcaacuacuccaaguacugcuaccucaaccacacgaccaccggccgcaccagccugcccaagugcugccuggucuccaacggcagcuaccucaacgagacgcacuucuccgacgacaucgagcagcaggccgacaacaugaucaccgagaugcugcagaaggaguacauggagcggcaggggaagacgccccugggccucguggaccuguucguguucagcaccuccuucuaccugaucagcaucuuccugcaccucgucaagaucccgacccaccgccacaucguggggaaguccugccccaagccccaccggcugaaccacaugggcaucugcagcugcgggcuguacaagcagcccggcgugccggucaaguggaagcgcugaggacuaguuauaagacugacuagcccgaugggccucccaacgggcccuccuccccuccuugcaccgagauuaaucaaaggcucuuuucagagccaccaaaaaaaaaaaaaaaaaaaaaaaaaaaaaaaaaaaaaaaaaaaaaaaaaaaaaaaaaaaaaaaaaaaaaaaaaaaaaaaaaaaaaaaaaaaaaaaaaaaaa

SEQ ID NO: 34593 - RNA, 1689 nt, Artificial Sequence
  mRNA product Design i-3 (hSL-A100) comprising derived and/or modified sequence from LASV(LM765-SLE-2012;Clade IV)__AIT17814__GPCmut8 (opt1)
aggagaaagcuuaccaugggccagaucgugaccuucuuccaggaggucccccacgugaucgaggaggugaugaacaucguccugaucgcccucagcauccuggccgugcugaaggggcucuacaacuucgcgaccugcggccugguggggcuggucacguuccuccugcugugcggccgcuccugcaccaccagccucuacaaggggguguacgagcugcagacccuggagcucaacauggagacgcugaacaugugcaugccgcuguccugcaccaagaacaacagccaccacuacaucauggugggcaacgagaccggccucgagcugacgcugaccaacaccuccaucaucgaccacaaguucugcaaccucagcgacgcccaccggaagaaccuguacgaccacgcccugauguccaucaucagcaccuuccaccucuccauccccaacuucaaccaguacgaggccaugagcugcgacuucaacgggggcaagaucuccguccaguacaaccugagccacuccuacgccaaggacgcggccgaccacugcgggacgguggccaacggcgugcugcagaccuucaugcgcauggccuggggcgggagcuacaucgcgcucgacuccggccgggggcgcugggacugcaucaugaccagcuaccaguaccugaucauccagaacaccacgugggaggaccacugccaguucucccggcccagccccaucggcuaccuggggcuccugucccagcgcacccgggacaucuacaucagccgccggcugcucggcaccuucaccuggacgcugagcgacuccgagggcaaggacacccccgggggcuacugccugacccgcuggaugcucaucgaggccgagcugaagugcuucgggaacaccgccgucgccaagugcaacgagaagcacgacgaggaguucugcgacaugcugcggcuguucgacuucugcaagcaggccauccagcgccugaaggcgcccgcccagaugagcauccagcugaucaacaaggccgugaacgcccucaucaacgaccagcugaucaugaagaaccaccuccgggacaucaugggcauccccuacugcaacuacuccaaguacugcuaccucaaccacacgaccaccgggaagaccagccugcccaagugcugccugguguccaacggcagcuaccucaacgagacgcacuucuccgacgacaucgagcagcaggccgacaacaugaucaccgagaugcugcagaaggaguacauggagcgccagggcaagaccccgcuggggcucgucgaccuguucguguucagcaccuccuucuaccugaucagcaucuuccugcaccucgugaagaucccgacgcaccggcacaucgucggcaagcccugccccaagccccaccgccugaaccacauggggaucugcuccugcggccuguacaagcagccgggggugcccgugaaguggaagcggugaggacuaguuauaagacugacuagcccgaugggccucccaacgggcccuccuccccuccuugcaccgagauuaaucaaaggcucuuuucagagccaccaaaaaaaaaaaaaaaaaaaaaaaaaaaaaaaaaaaaaaaaaaaaaaaaaaaaaaaaaaaaaaaaaaaaaaaaaaaaaaaaaaaaaaaaaaaaaaaaaaaaa

SEQ ID NO: 34594 - RNA, 1689 nt, Artificial Sequence
  mRNA product Design i-3 (hSL-A100) comprising derived and/or modified sequence from LASV(LM776-SLE-2012;Clade IV)__AIT17824__GPCmut8 (opt1)
aggagaaagcuuaccaugggccagaucgugaccuucuuccaggaggucccccacgugaucgaggaggugaugaacaucguccugaucgcccucagcauccuggccgugcugaaggggcucuacaacuucgcgaccugcggccugguggggcuggucacguuccuccugcugugcggccgcuccugcaccaccagcguguacaaggggguguacgagcuccagacccuggagcugaacauggagacgcucaacaugugcaugccgcuguccugcaccaagaacaacagccaccacuacaucauggucggcaacgagaccggccuggagcucacgcugaccaacaccuccaucaucaaccacaaguucugcaaccugagcgacgcccacaagaagaaccucuacgaccacgcccugauguccaucaucagcaccuuccaccuguccauccccaacuucaaccaguacgaggccaugagcugcgacuucaacgggggcaagaucuccgugcaguacaaccucagccacuccuacgccggggacgcggccaaccacugcggcacgguggccaacgggguccugcagaccuucaugcggauggccuggggcggcagcuacaucgcgcuggacuccgggcacggcaagugggacugcaucaugaccagcuaccaguaccucaucauccagaacaccacgugggaggaccacugccaguucucccgccccagccccaucggguaccugggccugcucucccagcggacccgcgacaucuacaucagccggcgccugcugggcaccuucaccuggacgcucagcgacuccgaggggaaggacaccccgggcggguacugccugacccgguggaugcugaucgaggccgagcucaagugcuucggcaacaccgccguggccaagugcaacgagaagcacgacgaggaguucugcgacaugcugcgccuguucgacuucugcaagcaggccauccagcggcucaaggcgcccgcccagaugagcauccagcugaucaacaaggccgugaacgcccugaucaacgaccagcucaucaugaagaaccaccuccgcgacaucauggggauccccuacugcaacuacuccaaguacugcuaccugaaccacacgaccaccggcaagaccagccugcccaagugcugccuggucuccaacggcagcuaccugaacgagacgcacuucuccgacgacaucgagcagcaggccgacaacaugaucaccgagaugcuccagaaggaguacauggagcggcaggggaagacgccccugggccugguggaccucuucguguucagcaccuccuucuaccugaucagcaucuuccugcaccuggucaagaucccgacccaccgccacaucguggggaaguccugccccaagccccaccggcucaaccacaugggcaucugcagcugcgggcuguacaagcagcccggcgugccgguccgcuggaagcggugaggacuaguuauaagacugacuagcccgaugggccucccaacgggcccuccuccccuccuugcaccgagauuaaucaaaggcucuuuucagagccaccaaaaaaaaaaaaaaaaaaaaaaaaaaaaaaaaaaaaaaaaaaaaaaaaaaaaaaaaaaaaaaaaaaaaaaaaaaaaaaaaaaaaaaaaaaaaaaaaaaaaa

SEQ ID NO: 34595 - RNA, 1689 nt, Artificial Sequence
  mRNA product Design i-3 (hSL-A100) comprising derived and/or modified sequence from LASV(Mad39;Clade IV)__ANH09722__GPCmut8 (opt1)
aggagaaagcuuaccaugggccagaucgugaccuucuuccaggaggucccccacgugaucgaggaggugaugaacaucguccugaucgcccucagcauccuggccgugcugaaggggcucuacaacguggcgaccugcggccugaucgggcuggucacguuccuccugcugugcggccgcuccugcaccaccacccucuacaaggggguguacgagcugcaggcccuggagcucaacauggagacgcugaacaugugcaugccgcugagcugcaccaagaacaacucccaccacuacauccgggugggcaacgagaccggccucgagcugacgcugaccaacaccagccucaucaaccacaaguucugcaaccuguccgacgcccacaagaagaaccuguacgaccacgcccucaugagcaucaucuccaccuuccaccugagcauccccaacuucaaccaguacgaggccauguccugcgacuucaacgacgggaagaucagcguccaguacaaccugucccacacguacgcgggcgacaccgccaaccacugcgggaccguggccaacggcgugcuccagaccuucaugcgcauggccuggggcgggagcuacaucgcgcuggacuccggccgcgggggcugggacugcaucaugacgagcuaccaguaccugaucauccagaacaccaccugggaggaccacugccaguucucccggcccagccccaucggguaccucggccugcugucccagcggacccgcgacaucuacaucagccggcgccuccugggcacguucaccuggacccuguccgacagcgaggggaaggacaccccgggcggguacugccucacgcgguggaugcugaucgaggccgagcugaagugcuucggcaacaccgccgucgccaagugcaacgagaagcacgacgaggaguucugcgacaugcuccgccuguucgacuucugcaagcaggccauccagcggcugaaggcgcccgcccagaugagcauccagcucaucaacaaggccgugaacgcccugaucaacgaccagcugaucaugaagaaccaccuccgcgacaucauggggauccccuacugcaacuacuccaaguacugcuaccugaaccacaccgugaccggcaagacgagccugcccaagugcugccucgucuccaacggcagcuaccugaacgagacccacuucuccgacgacaucgagcagcaggccgacaacaugaucaccgagaugcugcagaaggaguacauggagcggcaggggaagacgccccucggccugguggaccuguucguguucagcaccuccuucuaccugaucagcaucuuccuccaccuggucaagaucccgacccaccgccacgugguggggaagcccugccccaagccccaccggcugaaccacaugggcaucugcuccugcggguucuacaagcagccgggcguccccgugcgcuggaagcggugaggacuaguuauaagacugacuagcccgaugggccucccaacgggcccuccuccccuccuugcaccgagauuaaucaaaggcucuuuucagagccaccaaaaaaaaaaaaaaaaaaaaaaaaaaaaaaaaaaaaaaaaaaaaaaaaaaaaaaaaaaaaaaaaaaaaaaaaaaaaaaaaaaaaaaaaaaaaaaaaaaaaa

SEQ ID NO: 34596 - RNA, 1689 nt, Artificial Sequence
  mRNA product Design i-3 (hSL-A100) comprising derived and/or modified sequence from LASV(Z0947-SLE-2011;Clade IV)__AIT17840__GPCmut8 (opt1)
aggagaaagcuuaccaugggccagaucgugaccuucuuccaggaggucccccacgugaucgaggaggugaugaacaucguccugaucgcccucagcauccuggccgugcugaaggggcucuacaacuucgcgaccugcggccugguggggcuggucacguuccuccugcugugcggccgcuccugcaccaucagccucuacaaggggguguacgagcugcagacccuggagcucaacauggagacccugaacaugugcaugccgcuguccugcaccaagaacaacagccaccacuacaucauggugggcaacgagaccggccucgagcugacccugacgaacaccuccaucaucaaccacaaguucugcaaccucagcgacgcccacaagaagaaccuguacgaccacgcccugauguccaucaucagcaccuuccaccucuccauccccaacuucaaccaguacgaggccaugagcugcgacuucaacgggggcaagaucuccguccaguacaaccugagccacuccuacgccggggacgcggccaaccacugcggcaccguggccaacggggugcugcagacguucaugcggauggccuggggcggcagcuacaucgcgcucgacuccgggcgcgaccggugggacugcaucaugaccagcuaccaguaccugaucauccagaacaccaccugggaggaccacugccaguucucccgccccagccccaucggcuaccuggggcuccugucccagcggacgcgcgacaucuacaucagccggcgccugcucggcaccuucaccuggacccugagcgacuccgagggcaaggacacgcccgggggcuacugccugacccgguggaugcucaucgaggccgagcugaagugcuucgggaacaccgccgucgccaagugcaacgagaagcacgacgaggaguucugcgacaugcugcgccucuucgacuucugcaagcaggccauccagcggcugaaggcgcccgcccagaugagcauccagcugaucaacaaggccgugaacgcccucaucaacgaccagcugaucaugaagaaccaccuccgcgacaucaugggcauccccuacugcaacuacuccaaguacugcuaccugaaccacaccacgaccgggaagaccagccugcccaagugcugccugguguccaacggcagcuaccucaacgagacccacuucuccgacgacaucgagcagcaggccgacaacaugaucacggagaugcugcagaaggaguacauggagcggcagggcaagaccccgcuggggcucgucgaccuguucguguucagcaccuccuucuaccugaucagcaucuuccugcaccucgugaagaucccgacccaccgccacaucgucggcaagcccugccccaagccccaccggcugaaccacauggggaucugcuccugcggccuguacaagcagccgggggugcccgugaaguggaagcgcugaggacuaguuauaagacugacuagcccgaugggccucccaacgggcccuccuccccuccuugcaccgagauuaaucaaaggcucuuuucagagccaccaaaaaaaaaaaaaaaaaaaaaaaaaaaaaaaaaaaaaaaaaaaaaaaaaaaaaaaaaaaaaaaaaaaaaaaaaaaaaaaaaaaaaaaaaaaaaaaaaaaaa

SEQ ID NO: 34597 - RNA, 1689 nt, Artificial Sequence
  mRNA product Design i-3 (hSL-A100) comprising derived and/or modified sequence from LASV(Josiah;Clade IV)__NP_694870__GPCmut8 (opt1)
aggagaaagcuuaccaugggccagaucgugaccuucuuccaggaggucccccacgugaucgaggaggugaugaacaucguccugaucgcccucagcgugcuggccgugcugaaggggcucuacaacuucgcgaccugcggccuggucgggcuggugacguuccuccugcugugcggccgcuccugcaccaccagccucuacaaggggguguacgagcugcagacccuggagcucaacauggagacgcugaacaugugcaugccgcuguccugcaccaagaacaacagccaccacuacaucauggucggcaacgagaccggccucgagcugacccugacgaacaccuccaucaucaaccacaaguucugcaaccucagcgacgcccacaagaagaaccuguacgaccacgcccugauguccaucaucagcaccuuccaccucuccauccccaacuucaaccaguacgaggccaugagcugcgacuucaacgggggcaagaucuccgugcaguacaaccugagccacuccuacgccggggacgcggccaaccacugcggcaccguggccaacgggguccugcagacguucaugcggauggccuggggcggcagcuacaucgcgcucgacuccgggcgcggcaacugggacugcaucaugaccagcuaccaguaccugaucauccagaacaccaccugggaggaccacugccaguucucccggcccagccccaucggguaccugggccuccugucccagcgcacgcgggacaucuacaucagccgccggcugcucggcaccuucaccuggacccugagcgacuccgaggggaaggacacgccgggcggguacugccugacccgcuggaugcucaucgaggccgagcugaagugcuucggcaacaccgccguggccaagugcaacgagaagcacgacgaggaguucugcgacaugcugcggcuguucgacuucugcaagcaggccauccagcgccugaaggcgcccgcccagaugagcauccagcugaucaacaaggccgugaacgcccucaucaacgaccagcugaucaugaagaaccaccuccgggacaucauggggauccccuacugcaacuacuccaaguacugcuaccucaaccacaccacgaccggccgcaccagccugcccaagugcugccuggucuccaacggcagcuaccucaacgagacccacuucuccgacgacaucgagcagcaggccgacaacaugaucacggagaugcugcagaaggaguacauggagcggcaggggaagaccccgcugggccugguggaccucuucguguucagcaccuccuucuaccugaucagcaucuuccugcaccucgucaagauccccacccaccgccacaucguggggaaguccugccccaagccccaccggcugaaccacaugggcaucugcagcugcgggcuguacaagcagccgggcgugcccgucaaguggaagcgcugaggacuaguuauaagacugacuagcccgaugggccucccaacgggcccuccuccccuccuugcaccgagauuaaucaaaggcucuuuucagagccaccaaaaaaaaaaaaaaaaaaaaaaaaaaaaaaaaaaaaaaaaaaaaaaaaaaaaaaaaaaaaaaaaaaaaaaaaaaaaaaaaaaaaaaaaaaaaaaaaaaaaa

SEQ ID NO: 34598 - RNA, 1686 nt, Artificial Sequence
  mRNA product Design i-3 (hSL-A100) comprising derived and/or modified sequence from LASV(LP;Clade I)__AAF86701__GPCmut8 (opt1)
aggagaaagcuuaccaugggccagaucaucaccuucuuccaggaggugccccacgucaucgaggaggugaugaacaucgugcugaucgcccucagccugcuggccauccucaaggggcuguacaacaucgcgaccugcggcaucaucgggcuggucgccuuccucuuccugugcggcaaguccugcagccugacgcucaagggcggguacgagcugcagacccuggagcucaacauggagacccugaacaugugcaugccgcuguccugcaccaagaacagcucccaccacuacauccgcgugggcaacgagacggggcucgagcugacccugaccaacaccagcaucaucaaccacaaguucugcaaccucuccgacgcccacaagaagaaccuguacgaccacgcccugaugagcaucaucuccacguuccaccucagcauccccaacuucaaccaguacgaggccauguccugcgacuucaacggcgggaagaucagcgugcaguacaaccugucccacagcuacgcgggcgacgccgccgagcacugcgggaccgucgccaacggcgugcugcagaccuucaugcggauggcguggggcgggcgcuacaucgcccucgacuccggcaaggggaacugggacugcaucaugaccagcuaccaguaccugaucauccagaacacgaccugggaggaccacugccaguucucccggcccagccccaucggcuaccugggccuccugucccagcgcacccgggacaucuacaucagccgccggcugcucgggaccuucacguggacccugagcgacuccgagggcaacgagacccccgggggcuacugccugacccgcuggaugcucaucgaggccgagcugaagugcuucgggaacacggccguggccaagugcaacgagaagcacgacgaggaguucugcgacaugcugcggcuguucgacuucugcaagcaggcgauccgccggcugaaggccccggcccagaugagcauccagcugaucaacaaggccgucaacgcccucaucaacgaccagcugaucaugaagaaccaccuccgcgacaucaugggcauccccuacugcaacuacuccaaguacugcuaccucaaccacaccagcuccggccggaccagccugcccaagugcugccugaucuccaacgggagcuaccucaacgagacccaguucuccgacgacaucgagcagcaggcggacaacaugaucacggagaugcugcagaaggaguacaucgagcgccagggcaagaccccgcuggggcugguggacaucuucaucuucagcaccuccuucuaccucaucagcaucuuccugcaccugaucaagauccccacccaccggcacaucgugggcaagcccugccccaagccgcaccgccucaaccacaugggggucugcuccugcggccuguacaagcaccccggcgugcccacgaaguggaagcggugaggacuaguuauaagacugacuagcccgaugggccucccaacgggcccuccuccccuccuugcaccgagauuaaucaaaggcucuuuucagagccaccaaaaaaaaaaaaaaaaaaaaaaaaaaaaaaaaaaaaaaaaaaaaaaaaaaaaaaaaaaaaaaaaaaaaaaaaaaaaaaaaaaaaaaaaaaaaaaaaaaaaa

SEQ ID NO: 34599 - RNA, 1686 nt, Artificial Sequence
  mRNA product Design i-3 (hSL-A100) comprising derived and/or modified sequence from LASV(803213;Clade II)__AAF86703__GPCmut8 (opt1)
aggagaaagcuuaccaugggccagaucaucaccuucuuccaggaggugccccacgucaucgaggaggugaugaacaucgugcugaucgcccucagccugcuggccauccucaaggggaucuacaacgucgcgaccugcggccuguucgggcugaucuccuuccuccugcugugcggccgcagcugcuccgugacguacaaggggguguacgagcuccagacccuggagcugaacauggccaaccucaacaugugcaugccgcugagcugcaccaagaacaacucccaccacuacaucauggucggcaacgagaccggccuggagcucacgcugaccaacaccagcaucaucaaccacaaguucugcaaccuguccgacgcccacaagaagaaccucuacgaccacgcccugaugagcaucaucuccaccuuccaccugagcauccccaacuucaaccaguacgaggccauguccugcgacuucaacgggggcaagaucagcgugcaguacaaccucucccacagcuucgcgguggacgccgccaaccacugcgggacgaucgccaacggcguccugcagaccuucaugcggauggcguggggcggguccuacaucgcccuggacagcggcaaggggaacugggacugcaucaugaccuccuaccaguaccucaucauccagaacaccacgugggaggaccacugccaguucagccgccccucccccaucggcuaccuggggcugcucagccagcggacccgcgacaucuacaucagccggcgccugcugggcaccuucaccuggacgcucuccgacagcgagggcaacgaggcccccgggggcuacugccugacccgguggaugcugaucgaggccgagcucaagugcuucgggaacaccgccguggcgaagugcaacgagaagcacgacgaggaguucugcgacaugcugcgccuguucgacuucugcaagcaggccaucaagcggcucaagaccccggcccagauguccauccagcugaucaacaaggccgugaacgcccugaucaacgaccagcucaucaugaagaaccaccuccgcgacaucaugggcauccccuacugcaacuacagccgguacugcuaccugaaccacacggucaccgggaagaccucccugccccgcugcugccuggugagcaacggcuccuaccugaacgagacccacuucagcgacgacaucgagcagcaggcggacaacaugaucacggagaugcuccagaaggaguacauggaccggcagggcaagaccccgcuggggcugguggaccuguucgucuucuccaccagcuucuaccucaucuccaucuuccugcaccuggugaagauccccacccaccgccacaucgugggcaagcccugccccaagccgcaccggcucaaccacauggggaucugcagcugcggccuguacaagcaccccgggguccccgugaaguggaagcgcugaggacuaguuauaagacugacuagcccgaugggccucccaacgggcccuccuccccuccuugcaccgagauuaaucaaaggcucuuuucagagccaccaaaaaaaaaaaaaaaaaaaaaaaaaaaaaaaaaaaaaaaaaaaaaaaaaaaaaaaaaaaaaaaaaaaaaaaaaaaaaaaaaaaaaaaaaaaaaaaaaaaaa

SEQ ID NO: 34600 - RNA, 1686 nt, Artificial Sequence
  mRNA product Design i-3 (hSL-A100) comprising derived and/or modified sequence from LASV(GA391;Clade III)__CAA36645__GPCmut8 (opt1)
aggagaaagcuuaccaugggccagaucgugaccuucuuccaggaggucccccacgugaucgaggaggugaugaacaucguccugaucgcccucagcauccuggccauccugaaggggcucuacaacguggcgaccugcggccugaucgggcuggugacguuccuccugcuguccggccgcagcugcucccucaucuacaaggggaccuacgagcugcagacccuggagcucaacauggagacccugaacaugugcaugccgcugagcugcacgaagaacaacucccaccacuacauccgggucggcaacgagaccggccucgagcugacccugaccaacacgagcauccucaaccacaaguucugcaaccuguccgacgcccacaagcgcaaccuguacgaccacagccucauguccaucaucagcaccuuccaccuguccauccccaacuucaaccaguacgaggccaugagcugcgacuucaacgggggcaagaucaccgugcaguacaaccugucccacagcuucgccguggacgccgcggggcacugcggcacccucgccaacgggguccugcagacguucaugcggauggccuggggcggcuccuacaucgcccuggacagcgggcgcggcaacugggacugcaucaugaccuccuaccaguaccucaucauccagaacaccaccugggacgaccacugccaguucagccggcccucccccaucggguaccugggccugcucagccagcgcacgcgggacaucuacaucagccgccggcugcugggcaccuucaccuggacccucuccgacagcgaggggaacgagacgccgggcggguacugccugacccgcuggaugcugaucgaggcggagcucaagugcuucggcaacaccgccguggccaagugcaacgagaagcacgacgaggaguucugcgacaugcugcggcuguucgacuucugcaagcaggccauccgccggcucaagacccccgcccagauguccauccagcugaucaacaaggcggugaacgcccugaucaacgaccagcucaucaugaagaaccaccuccgcgacaucauggggauccccuacugcaacuacagccgguacugcuaccugaaccacacguccaccggcaagaccagccugccccgcugcugccugaucuccaacggcagcuaccugaacgagaccaaguucuccgacgacaucgagcagcaggccgacaacaugaucacggagaugcugcagaaggaguacaucgaccggcaggggaagaccccgcucggccuggucgaccuguucguguucagcaccuccuucuaccucaucagcaucuuccugcaccuggugaagauccccacccaccgccacaucgucgggaagcccugccccaagccgcaccggcucaaccacaugggcaucugcuccugcgggcuguacaagcagcccggcgugcccgugcgcuggaagcggugaggacuaguuauaagacugacuagcccgaugggccucccaacgggcccuccuccccuccuugcaccgagauuaaucaaaggcucuuuucagagccaccaaaaaaaaaaaaaaaaaaaaaaaaaaaaaaaaaaaaaaaaaaaaaaaaaaaaaaaaaaaaaaaaaaaaaaaaaaaaaaaaaaaaaaaaaaaaaaaaaaaaa

SEQ ID NO: 34601 - RNA, 1689 nt, Artificial Sequence
  mRNA product Design i-3 (hSL-A100) comprising derived and/or modified sequence from LASV(AV;Clade V)__CCA30314__GPCmut8 (opt1)
aggagaaagcuuaccaugggccagaucgugaccuucuuccaggaggucccccacgugaucgaggaggugaugaacaucguccugaucgcccucagcauccuggccgugcugaaggggcucuacaacaucgcgaccugcggccugaucgggcugaucacguuccuccugcugugcggccgcuccugcagcuccaaccucuacaaggggguguacgagcugcagagccuggaccucaacauggagacccugaacaugugcaugccgcuguccugcaccaagaacaacagccaccacuacauccgggucggcaacgacaccggccucgagcugacgcugaccaacaccuccauccucaaccacaaguucugcaaccugagcgacgcccacaagaaggaccuguacgaccacgcccucauguccaucaucagcaccuuccaccuguccauccccaacuucaaccaguacgaggccaugagcugcgacuucaacgggggcaagaucuccgugcaguacaaccugagccacuccuacgccaucgacgcggccaaccacugcgggacgguggccaacggcauccuccagaccuucaugcgcauggccuggggcgggagcuacaucgcgcuggacuccggccgggggaacugggacugcaucaugaccagcuaccaguaccugaucauccagaacaccacgugggagaaccacugccaguucucccgccccagccccaucggcuaccucgggcugcugagccagcggacccgcgacaucuacaucucccggcgccuccugggcaccuucaccuggacgcugagcgacuccgagggcaacgccacccccgggggcuacugccucacccgguggaugcugaucgaggccgagcugaagugcuucgggaacaccgccgucgccaagugcaacgagaagcacgacgaggaguucugcgacaugcuccgccuguucgacuucugcaagcaggcgaucagccggcugaaguccccggcccagaugagcauccagcucaucaacaaggccgugaacgcccugaucaacgaccagcugaucaugaagaaccaccuccgcgacaucaugggcauccccuacugcaacuacuccaaguacugcuaccugaaccacacgaucaccgggaagaccagccugcccaagugcugccucguguccaacggcagcuaccugaacgagacccacuucuccgacgacaucgagcagcaggccgacaacaugaucacggagaugcugcagaaggaguacauggagcggcagggcaagaccccgcuggggcucgucgaccuguucguguucagcaccuccuucuaccugaucagcaucuuccuccgccuggugaagauccccacccaccggcacaucgucggcaagcccugccccaagccgcaccgccugaaccacauggggaucugcuccugcggccucuacaagcagcccggggugcccgugcgguggaagcgcugaggacuaguuauaagacugacuagcccgaugggccucccaacgggcccuccuccccuccuugcaccgagauuaaucaaaggcucuuuucagagccaccaaaaaaaaaaaaaaaaaaaaaaaaaaaaaaaaaaaaaaaaaaaaaaaaaaaaaaaaaaaaaaaaaaaaaaaaaaaaaaaaaaaaaaaaaaaaaaaaaaaaa

SEQ ID NO: 34602 - RNA, 1686 nt, Artificial Sequence
  mRNA product Design i-3 (hSL-A100) comprising derived and/or modified sequence from LASV(Togo/2016/7082;Clade VI)__AMR44577__GPCmut8 (opt1)
aggagaaagcuuaccaugggccagaucaucaccuucuuccaggaggugccccacgucaucgaggaggugaugaacaucgugcugaucgcccucagccugcuggccauccucaagggggucuacaacguggcgaccugcggcaucaucgggcuggugacguuccuguuccucugcggccgcuccugcagccugaucuacaagggguccuacgagcugcagacccucgagcugaacauggagacccugaacaugugcaugccgcucagcugcaccaagaacuccagccaccacuacauccgggucggcaacgagacgggccuggagcugacccucaccaacaccuccaucaucaaccacaaguucugcaaccugagcgacgcccacaagcgcaaccuguacgaccacgcccucauguccauccugagcacguuccaccuguccauccccaacuucaaccaguacgaggccaugagcugcgacuucaacgggggcaagaucuccgugcaguacaaccucagccacgccuacgcgguggacgccgccgagcacugcgggaccgucgccaacggcgugcugcagaccuucaugcggauggcguggggcggguccuacaucgcccuggacagcggccgcgggaacugggacugcaucaugaccuccuaccaguaccucaucauccagaacacgaccugggaggaccacugccaguucagccggcccucccccaucggcuaccuggggcugcucagccagcgcacccgggacaucuacaucagccgccggcugcugggcaccuucacguggacccucuccgacagcgagggcaacgagacccccgggggcuacugccugacccgcuggaugcugaucgaggccgagcucaagugcuucgggaacacggccguggccaagugcaacgagaagcacgacgaggaguucugcgacaugcugcggcuguucgacuucugcaagcaggcgauccagcgccucaaguccccggcccagaugagcauccagcugaucaacaaggccgucaacgcccugaucaacgaccagcucaucaugaagaaccaccuccgggacaugaugggcauccccuacugcaacuacuccaaguacugcuaccugaaccacaccagcuccgggcgcaccagccugcccaagugcugccugguguccaacggcagcuaccugaacgagacccacuucuccgacgacaucgagcagcaggccgacaacaugaucacggagaugcuccagaaggaguacaucgaccggcagggcaagaccccgcuggggcugguggaccuguucgucuucagcaccuccuucuaccucaucagcaucuuccugcaccugaucaagauccccacccaccgccacaucgugggcaagcccugccccaagccgcaccggcucaaccacauggggaucugcuccugcggccuguacaagcagcccggggugcccacgcgcuggaagcggugaggacuaguuauaagacugacuagcccgaugggccucccaacgggcccuccuccccuccuugcaccgagauuaaucaaaggcucuuuucagagccaccaaaaaaaaaaaaaaaaaaaaaaaaaaaaaaaaaaaaaaaaaaaaaaaaaaaaaaaaaaaaaaaaaaaaaaaaaaaaaaaaaaaaaaaaaaaaaaaaaaaaa

SEQ ID NO: 34603 - RNA, 1686 nt, Artificial Sequence
  mRNA product Design i-3 (hSL-A100) comprising derived and/or modified sequence from LASV(KAK-428;Clade n.d. (VII))__ANH09740__GPCmut8 (opt1)
aggagaaagcuuaccaugggccagaucgugaccuucuuccaggaggucccccacgugaucgaggaggugaugaacaucguccugaucgcccucagccugcuggccauccucaaggggcuguacaacuucgcgaccugcggcgugaucgggcugaucacguuccuccugcugugcggccgcuccugcagcgccaccuacaaggggcaguacgagcuccagacccuggagcugaacauggagucccucaacaugugcaugccgcugagcugcaccaagaacaacucccaccacuacauccgggccggcaacaacacgggccuggagcucacccugaccaacaccagcaucaucucccacaaguucugcaaccugagcgacgcccacaagaagaaccucuacgaccacacgcugauguccaucaucaccaccuuccaccugagcauccccaacuucaaccaguacgaggccauguccugcgacuucaacgggggcaagaucagcauccaguacaaccucucccacagcuacgcgggggacgccgcccagcacugcggcaccguggccaacgggguccugcagacguucaugcgcauggcguggggcggcuccuaccuggcccucgacagcgggcggcgcggcugggacugcaucaucuccagcuaccaguaccugaucauccagaacaccaccugggacgaccacugccaguucucccggcccagccccaucggguaccugggcuucgugagccagaagacccgcgacaucuacaucucccggcgccuccugggcacguucaccuggacccugagcgacuccgaggggcacgacaugccgggcggguacugccucacccgguggaugcugaucgaggccgaccugaagugcuucggcaacacggccguggccaagugcaacgagaagcacgacgaggaguucugcgacauguggcgccucuucgacuucugcaagcaggcgauccagcggcugaaggcccccgcccagaugaacauccagcugaucaacaaggccgucaacgcccucaucaacgaccagcugaugaugaagaaccaccuccgcgacaucauggggauccccuacugcaacuacagcaaguucugcuaccugaacaacaccaccaccggccggacgucccugccccgcugcugccugaucagcaacggcuccuaccucaacgagacccacuucagcgacgacaucgagcagcaggcggacaacaugaucaccgagaugcugcagaaggaguacauggaccggcaggggaagaccccgcugggccucguggaccuguucguguucuccacgagcuucuaccugaucaccaucuuccugcaccucgucaagauccccacccaccgccacaucguggggaagcccugccccaagccgcaccggcugaaccacaugggcaucugcuccugcgggcuguacaagcagcccggcgugcccguccgcuggaagcggugaggacuaguuauaagacugacuagcccgaugggccucccaacgggcccuccuccccuccuugcaccgagauuaaucaaaggcucuuuucagagccaccaaaaaaaaaaaaaaaaaaaaaaaaaaaaaaaaaaaaaaaaaaaaaaaaaaaaaaaaaaaaaaaaaaaaaaaaaaaaaaaaaaaaaaaaaaaaaaaaaaaaa

SEQ ID NO: 34604 - RNA, 1686 nt, Artificial Sequence; identical to SEQ ID NO: 34598
  mRNA product Design i-3 (hSL-A100) comprising derived and/or modified sequence from LASV(Pinneo-NIG-1969;Clade I)__AIT17836__GPCmut8 (opt1)

SEQ ID NO: 34605 - RNA, 1686 nt, Artificial Sequence
  mRNA product Design i-3 (hSL-A100) comprising derived and/or modified sequence from LASV(ISTH0009-NIG-2011;Clade II)__AIT17404__GPCmut8 (opt1)
aggagaaagcuuaccaugggccagaucaucaccuucuuccaggaggugccccacgucaucgaggaggugaugaacaucgugcugaucgcccucagccugcuggccauccucaaggggaucuacaacgucgcgaccugcggccuguucgggcugguguccuuccuccugcugugcggccgcagcugcuccacgaccuacaaggggguguacgagcuccagacccuggagcuggacauggccagccucaacaugugcaugccgcuguccugcaccaagaacaacagccaccacuacaucauggucggcaacgagacgggccuggagcucacccugaccaacaccuccaucaucaaccacaaguucugcaaccugagcgacgcccacaagaagaaccucuacgaccacgcccugauguccaucaucagcacguuccaccuguccauccccaacuucaaccaguacgaggccaugagcugcgacuucaacgggggcaagaucuccgugcaguacaaccucagccacgcguacgccguggacgccgccaaccacugcgggaccaucgcgaacggcguccugcagaccuucaugcggauggccuggggcggguccuacaucgcccuggacagcggcaagggguccugggacugcaucaugaccagcuaccaguaccucaucauccagaacacgaccugggaggaccacugccaguucucccgccccagccccaucggcuaccuggggcugcucagccagcggacccgcgacaucuacaucucccggcgccugcugggcaccuucacguggacccucagcgacuccgagggcaacgagacccccgggggcuacugccugacccgguggaugcugaucgaggccgagcucaagugcuucgggaacacggccguggcgaagugcaacgagaagcacgacgaggaguucugcgacaugcugcgccuguucgacuucugcaagcaggccauccggcgccucaagaccccggcccagaugagcauccagcugaucaacaaggccgugaacgcccugaucaacgaccagcucaucaugaagaaccaccuccgggacaucaugggcauccccuacugcaacuacuccaaguacugcuaccugaaccacaccgucaccgggaagacgagccugccccgcugcugccugguguccaacggcagcuaccugaacgagacccacuucuccgacgacaucgagcagcaggcggacaacaugaucaccgagcuccugcagaaggaguacauggaccggcagggcaagaccccgcuggggcugguggaccucuucgucuucagcacguccuucuaccugaucagcaucuuccugcaccucaucaagauccccacccaccgccacaucaccggcaagcccugccccaagccgcaccggcugaaccacauggggaucugcuccugcggccuguacaagcaccccggggugcccgugaaguggaagcgcugaggacuaguuauaagacugacuagcccgaugggccucccaacgggcccuccuccccuccuugcaccgagauuaaucaaaggcucuuuucagagccaccaaaaaaaaaaaaaaaaaaaaaaaaaaaaaaaaaaaaaaaaaaaaaaaaaaaaaaaaaaaaaaaaaaaaaaaaaaaaaaaaaaaaaaaaaaaaaaaaaaaaa

SEQ ID NO: 34606 - RNA, 1686 nt, Artificial Sequence
  mRNA product Design i-3 (hSL-A100) comprising derived and/or modified sequence from LASV(ISTH2010-NIG-2012;Clade II)__AIT17482__GPCmut8 (opt1)
aggagaaagcuuaccaugggccagaucaucaccuucuuccaggaggugccccacgucaucgaggaggugaugaacaucgugcugaucgcccucagccugcuggccauccucaaggggaucuacaacgucgcgaccugcggccuguucgggcugguguccuuccuccugcugugcggccgcagcugcuccacgaccuacaaggggguguacgagcuccagacccuggagcuggacauggccagccucaacaugugcaugccgcuguccugcaccaagaacaacagccaccacuacaucauggucggcaacgagacgggccuggagcucacccugaccaacaccuccaucaucaaccacaaguucugcaaccugagcgacgcccacaagaagaaccucuacgaccacgcccugauguccaucaucagcacguuccaccuguccauccccaacuucaaccaguacgaggccaugagcugcgacuucaacgggggcaagaucuccgugcaguacaaccucagccacgcguacgccguggacgccgccaaccacugcgggaccaucgcgaacggcguccugcagaccuucaugcggauggccuggggcggguccuacaucgcccuggacagcggcaagggguccugggacugcaucaugaccagcuaccaguaccucaucauccagaacaucacgugggaggaccacugccaguucucccgccccagccccaucggcuaccuggggcugcucagccagcggacccgcgacaucuacaucucccggcgccugcugggcaccuucaccuggacgcucagcgacuccgagggcaacgagacccccgggggcuacugccugacccgguggaugcugaucgaggccgagcucaagugcuucgggaacaccgccguggcgaagugcaacgagaagcacgacgaggaguucugcgacaugcugcgccuguucgacuucugcaagcaggccauccggcgccucaagacgccggcccagaugagcauccagcugaucaacaaggccgugaacgcccugaucaacgaccagcucaucaugaagaaccaccuccgggacaucaugggcauccccuacugcaacuacuccaaguacugcuaccugaaccacaccgucaccgggaagaccagccugccccgcugcugccugguguccaacggcagcuaccugaacgagacgcacuucuccgacgacaucgagcagcaggcggacaacaugaucaccgagcuccugcagaaggaguacaucgaccggcagggcaagaccccgcuggggcugguggaccucuucgucuucagcaccuccuucuaccugaucagcaucuuccugcaccucgugaagauccccacgcaccgccacguggucggcaagcccugccccaagccgcaccggcugaaccacauggggaucugcuccugcggccuguacaagcaccccggggugcccgugaaguggaagcgcugaggacuaguuauaagacugacuagcccgaugggccucccaacgggcccuccuccccuccuugcaccgagauuaaucaaaggcucuuuucagagccaccaaaaaaaaaaaaaaaaaaaaaaaaaaaaaaaaaaaaaaaaaaaaaaaaaaaaaaaaaaaaaaaaaaaaaaaaaaaaaaaaaaaaaaaaaaaaaaaaaaaaa

SEQ ID NO: 34607 - RNA, 1686 nt, Artificial Sequence
  mRNA product Design i-3 (hSL-A100) comprising derived and/or modified sequence from LASV(Lassa virus/H.sapiens-wt/NGA/2015/ISTH_0543;Clade II)__AVO03639__GPCmut8 (opt1)
aggagaaagcuuaccaugggccagaucaucaccuucuuccaggaggugccccacgucaucgaggaggugaugaacaucgugcugaucgcccucagccugcuggccauccucaaggggaucuacaacgucgcgaccugcggccuguucgggcugguguccuuccuccugcugugcggccgcagcugcuccacgaccuacaaggggguguacgagcuccagacccuggagcuggacauggccaaccucaacaugugcaugccgcugagcugcaccaagaacaacucccaccacuacaucauggucggcaacgagacgggccuggagcucacccugaccaacaccagcaucaucaaccacaaguucugcaaccuguccgacgcccacaagaagaaccucuacgaccacgcccugaugagcaucaucuccacguuccaccugagcauccccaacuucaaccaguacgaggccauguccugcgacuucaacgggggcaagaucagcgugcaguacaaccucucccacaccuacgcgguggacgccgccaaccacugcgggaccaucgccaacggcguccugcagaccuucaugcggauggcguggggcgggagcuacaucgcccuggacuccggcaaggggagcugggacugcaucaugacguccuaccaguaccucgugauccagaacaccaccugggaggaccacugccaguucagccgccccucccccaucggcuaccuggggcugcucagccagcggacccgcgacaucuacaucagccggcgccugcugggcacguucaccuggacccucuccgacagcgagggcaacgagacccccgggggcuacugccugacgcgguggaugcugaucgaggccgagcucaagugcuucgggaacaccgccguggccaagugcaacgagaagcacgacgaggaguucugcgacaugcugcgccuguucgacuucugcaagcaggcgauccggcgccucaagaccccggcccagauguccauccagcugaucaacaaggccgucaacgcccugaucaacgaccagcucaucaugaagaaccaccuccgggacaucaugggcauccccuacugcaacuacagcaaguacugcuaccugaaccacaccgugacggggaagaccucccugccccgcugcugccuggugagcaacggcuccuaccugaacgagacccacuucagcgacgacaucgagcagcaggccgacaacaugaucaccgagcuccugcagaaggaguacaucgaccggcagggcaagacgccgcuggggcuggucgaccucuucguguucuccaccagcuucuaccugaucuccaucuuccugcaccucgugaagauccccacccaccgccacaucaccggcaagcccugccccaagccgcaccggcugaaccacauggggaucugcagcugcggccuguacaagcaccccgggguccccgugaaguggaagcgcugaggacuaguuauaagacugacuagcccgaugggccucccaacgggcccuccuccccuccuugcaccgagauuaaucaaaggcucuuuucagagccaccaaaaaaaaaaaaaaaaaaaaaaaaaaaaaaaaaaaaaaaaaaaaaaaaaaaaaaaaaaaaaaaaaaaaaaaaaaaaaaaaaaaaaaaaaaaaaaaaaaaaa

SEQ ID NO: 34608 - RNA, 1686 nt, Artificial Sequence
  mRNA product Design i-3 (hSL-A100) comprising derived and/or modified sequence from LASV(Lassa virus/H.sapiens-wt/NGA/2016/ISTH_0009;Clade II)__AVO03571__GPCmut8 (opt1)
aggagaaagcuuaccaugggccagaucaucaccuucuuccaggaggugccccacgucaucgaggaggugaugaacaucgugcugaucgcccucagccugcuggccauccucaaggggaucuacaacgucgcgaccugcggccugcuggggcucguguccuuccugcugcucugcggccgcagcugcuccacgaccuacaaggggguguacgagcugcagacccuggagcucgacauggccagccugaacaugugcaugccgcuguccugcaccaagaacaacagccaccacuacaucauggucggcaacgagacgggccucgagcugacccugaccaacaccuccaucaucaaccacaaguucugcaaccucagcgacgcccacaagaagaaccuguacgaccacgcccugauguccaucaucagcacguuccaccucuccauccccaacuucaaccaguacgaggccaugagcugcgacuucaacgggggccggaucuccgugcaguacaaccugagccacuccuacgcgguggacgccgccaaccacugcgggaccaucgccaacggcguccugcagaccuucaugcgcauggcguggggcgggagcuacaucgcccucgacuccggcaaggggagcugggacugcaucaugaccuccuaccaguaccugaucauccagaacacgaccugggaggaccacugccaguucagccggcccagccccaucggcuaccuggggcuccugucccagcgcacccgggacaucuacaucagccgccggcugcucggcaccuucacguggacccuguccgacagcgagggcaacgagacccccgggggcuacugccugacccgcuggaugcucaucgaggccgagcugaagugcuucgggaacacggccguggccaagugcaacgagaagcacgacgaggaguucugcgacaugcugcggcuguucgacuucugcaagcaggcgauccgccggcugaagaccccggcccagauguccauccagcugaucaacaaggccgugaacgcccucaucaacgaccagcugaucaugaagaaccaccuccgcgacaucaugggcauccccuacugcaacuacagcaaguacugcuaccucaaccacaccgucaccgggaagacgucccugccccggugcugccuggugagcaacggcuccuaccucaacgagacccacuucagcgacgacaucgagcagcaggccgacaacaugaucaccgagcugcugcagaaggaguacaucgaccgccagggcaagaccccgcuggggcucguggaccuguucgucuucuccacgagcuucuaccugaucuccaucuuccuccaccuggugaagauccccacccaccggcacaucaccggcaagcccugccccaagccgcaccgccugaaccacauggggaucugcagcugcggccucuacaaccaccccggggugcccgucaaguggaagcggugaggacuaguuauaagacugacuagcccgaugggccucccaacgggcccuccuccccuccuugcaccgagauuaaucaaaggcucuuuucagagccaccaaaaaaaaaaaaaaaaaaaaaaaaaaaaaaaaaaaaaaaaaaaaaaaaaaaaaaaaaaaaaaaaaaaaaaaaaaaaaaaaaaaaaaaaaaaaaaaaaaaaa

SEQ ID NO: 34609 - RNA, 1686 nt, Artificial Sequence
  mRNA product Design i-3 (hSL-A100) comprising derived and/or modified sequence from LASV(Lassa virus/H.sapiens-wt/NGA/2016/ISTH_0017;Clade II)__AVO03567__GPCmut8 (opt1)
aggagaaagcuuaccaugggccagaucaucaccuucuuccaggaggugccccacgucaucgaggaggugaugaacaucgugcugaucgcccucagccugcuggccauccucaaggggaucuacaacgucgcgaccugcggccuguucgggcugguguccuuccuccugcugugcggccgcagcugcuccacgaccuacaaggggguguacgagcuccagacccuggagcuggacauggccagccucaacaugugcaugccgcuguccugcaccaagaacaacagccaccacuacaucauggucggcaacgagacgggccuggagcucacccugaccaacaccuccaucaucaaccacaaguucugcaaccugagcgacgcccacaagaagaaccucuacgaccacgcccugauguccaucaucagcacguuccaccuguccauccccaacuucaaccaguacgaggccaugagcugcgacuucaacgggggcaagaucuccgugcaguacaaccucagccacaccuacgcgaucgacgccgccaaccacugcgggaccaucgccaacggcgugcugcagaccuucaugcggauggcguggggcggguccuacaucgcccuggacagcggcaagggguccugggacugcaucaugacgagcuaccaguaccucaucauccagaacaccaccugggaggaccacugccaguucucccgccccagccccaucggcuaccuggggcugcucagccagcggacccgcgacaucuacaucucccggcgccugcugggcacguucaccuggacccucagcgacuccgagggcaacgagacccccgggggcuacugccugacgcgguggaugcugaucgaggccgagcucaagugcuucgggaacaccgccgucgccaagugcaacgagaagcacgacgaggaguucugcgacaugcugcgccuguucgacuucugcaagcaggcgauccggcgccucaagaccccggcccagaugagcauccagcugaucaacaaggccgugaacgcccugaucaacgaccagcucaucaugaagaaccaccuccgggacaucaugggcauccccuacugcaacuacuccaaguacugcuaccugaaccacaccgugacggggaagaccagccugccccgcugcugccuggucuccaacggcagcuaccugaacgagacccacuucuccgacgacaucgagcagcaggccgacaacaugaucaccgagcuccugcagaaggaguacauggaccggcagggcaagacgccgcuggggcugguggaccucuucguguucagcaccuccuucuaccugaucagcaucuuccugcaccucguccgcauccccacccaccggcacgugaucggcaagcccugccccaagccgcaccgccugaaccacauggggaucugcuccugcggccuguacaagcaccccggggugcccgucaaguggaagcggugaggacuaguuauaagacugacuagcccgaugggccucccaacgggcccuccuccccuccuugcaccgagauuaaucaaaggcucuuuucagagccaccaaaaaaaaaaaaaaaaaaaaaaaaaaaaaaaaaaaaaaaaaaaaaaaaaaaaaaaaaaaaaaaaaaaaaaaaaaaaaaaaaaaaaaaaaaaaaaaaaaaaa

SEQ ID NO: 34610 - RNA, 1686 nt, Artificial Sequence
  mRNA product Design i-3 (hSL-A100) comprising derived and/or modified sequence from LASV(Lassa virus/H.sapiens-wt/NGA/2018/ISTH_0959;Clade II)__AVV65099__GPCmut8 (opt1)
aggagaaagcuuaccaugggccagaucaucaccuucuuccaggaggugccccacgucaucgaggaggugaugaacaucgugcugaucgcccucagccugcuggccauccucaaggggaucuacaacgucgugaccugcggccuguucgggcugguguccuuccuccugcugugcggccgcagcugcuccacgaccuacaagggggucuacgagcuccagacccuggagcuggacauggcgagccucaacaugugcaugccgcuguccugcaccaagaacaacagccaccacuacaucauggugggcaacgagacgggccuggagcucacccugaccaacaccuccaucaucaaccacaaguucugcaaccugagcgacgcccacaagaagaaccucuacgaccacgcccugauguccaucaucagcacguuccaccuguccauccccaacuucaaccaguacgaggccaugagcugcgacuucaacgggggcaagaucuccgugcaguacaaccucagccacgccuacgcgaucgacgccgccaaccacugcgggaccaucgccaacggcguccugcagaccuucaugcggauggcguggggcggguccuacaucgcccuggacagcggcaagggguccugggacugcaucaugaccagcuaccaguaccucaucauccagaacacgaccugggaggaccacugccaguucucccgccccagccccaucggcuaccuggggcugcucagccagcggacccgcgacaucuacaucucccggcgccugcugggcaccuucacguggacccucagcgacuccgagggcaacgagacccccgggggcuacugccugacccgguggaugcugaucgaggccgagcucaagugcuucgggaacacggccguggccaagugcaacgagaagcacgacgaggaguucugcgacaugcugcgccuguucgacuucugcaagcaggcgauccggcgccucaagaccccggcccagaugagcauccagcugaucaacaaggccgugaacgcccugaucaacgaccagcucaucaugaagaaccaccuccgggacaucaugggcauccccuacugcaacuacuccaaguacugcuaccugaaccacaccgucaccgggaagacgagccugccccgcugcugccugguguccaacggcagcuaccugaacgagacccacuucuccgacgacaucgagcagcaggccgacaacaugaucaccgagcuccugcagaaggaguacaucgaccggcagggcaagaccccgcuggggcugguggaccucuucgucuucagcacguccuucuaccugaucagcaucuuccugcaccucgugaagauccccacccaccgccacgugaucggcaagcccugccccaagccgcaccggcugaaccacauggggaucugcuccugcggccuguacaagcaccccgggguccccgugaaguggaagcgcugaggacuaguuauaagacugacuagcccgaugggccucccaacgggcccuccuccccuccuugcaccgagauuaaucaaaggcucuuuucagagccaccaaaaaaaaaaaaaaaaaaaaaaaaaaaaaaaaaaaaaaaaaaaaaaaaaaaaaaaaaaaaaaaaaaaaaaaaaaaaaaaaaaaaaaaaaaaaaaaaaaaaa

SEQ ID NO: 34611 - RNA, 1686 nt, Artificial Sequence
  mRNA product Design i-3 (hSL-A100) comprising derived and/or modified sequence from LASV(LASV003-NIG-2008;Clade II)__AIT17580__GPCmut8 (opt1)
aggagaaagcuuaccaugggccagaucaucaccuucuuccaggaggugccccacgucaucgaggaggugaugaacaucgugcugaucgcccucagccugcuggccauccucaaggggaucuacaacgucgcgaccugcggccuguucgggcugguguccuuccuccugcugugcggccgcagcugcuccacgaccuacaaggggguguacgagcuccagacccuggagcuggacauggccagccucaacaugugcaugccgcuguccugcaccaagaacaacagccaccacuacaucauggucggcaacgagacgggccuggagcucacccugaccaacaccuccaucaucaaccacaaguucugcaaccugagcgacgcccacaagaagaaccucuacgaccacgcccugauguccaucaucagcacguuccaccuguccauccccaacuucaaccaguacgaggccaugagcugcgacuucaacgggggcaagaucuccgugcaguacaaccucagccacaccuacgcgguggacgccgccaaccacugcgggaccaucgccaacggcguccugcagaccuucaugcggauggcguggggcggguccuacaucgcccuggacagcggcaagggguccugggacugcaucaugacgagcuaccaguaccucaucauccagaacaccaccugggaggaccacugccaguucucccgccccagccccaucggcuaccuggggcugcucagccagcggacccgcgacaucuacaucucccggcgccugcugggcacguucaccuggacccucagcgacuccgagagcaacgagaccccgggcggguacugccugacgcgguggaugcugaucgaggccgagcucaagugcuucggcaacaccgccguggccaagugcaacgagaagcacgacgaggaguucugcgacaugcugcgccuguucgacuucugcaagcaggcgauccggcgccucaaggcccccgcccagauguccauccagcugaucaacaaggccgugaacgcccugaucaacgaccagcucaucaugaagaaccaccuccgggacaucauggggauccccuacugcaacuacagcaaguacugcuaccugaaccacaccgucaccggccgcacgucccugccccggugcugccuggugagcaacggguccuaccugaacgagacccacuucagcgacgacaucgagcagcaggcggacaacaugaucaccgagcuccugcagaaggaguacauggaccgccagggcaagaccccgcugggccugguggaccucuucgucuucuccacgagcuucuaccugaucuccaucuuccugcaccucgugaagauccccacccaccggcacgugaucgggaagcccugccccaagccgcaccgccugaaccacaugggcaucugcagcugcgggcuguacaagcaccccggcguccccgugaaguggaagcggugaggacuaguuauaagacugacuagcccgaugggccucccaacgggcccuccuccccuccuugcaccgagauuaaucaaaggcucuuuucagagccaccaaaaaaaaaaaaaaaaaaaaaaaaaaaaaaaaaaaaaaaaaaaaaaaaaaaaaaaaaaaaaaaaaaaaaaaaaaaaaaaaaaaaaaaaaaaaaaaaaaaaa
